United States Patent Application Publication US 2020/0377945 A1 - sequence listing, part 23

SEQ ID NO: 4354 - DNA, 28245 bp, Unknown
  gut microbiota DNA sequence
atctacgccggctcggacgagggcctgtaccaatacaatggtacagcctggagcaaggtagaaaccgcagacatctccggctcgatcgaggtggccagcggcaacgccgacggcgaactgctcctcatggcagggaaaaataattatgacccgtacctgtgggatggcagctccgcaacgaagctgtcgctggacgggctgtactttaataataaaaatactttccataactacttgttcttcgggctggaccaggacgggatcccctatgcgcttgtcaacggttcgggcgaaggacggaactatctcgcgggcaacggttatgacggcagctacgtctataagtggaacggtgagaagtgggtctatcaggttatggccgacttcaacgaccccaatgaggatcccaacgacctgagcaagaaaatccgccccgacggtgtgaccgccttgagcggcgtcatagacggcgtcagcgccatgtatggcgaagacggcgcgggcgcgatctacctctcggtggatgacgcaaccattacctttgacgcccagggcggcacgtttaaagatgactcgctgaaaaccatgaccgcccccatcctcagcgaggtggattcgtccaaggtgcccagtgttgccaagagcggcaatgccttcggcggctggtactatgatgcggcctgtaccgagggcaagaagtgggacgccaataccgcccggatgccggggaaaggcatcatgctctacgccaagtggacggagcgcaccggccccgtggcccccgacgacccggagatgcagtatcaccgggaatctgccctggacaacctggaaaaagcatttaacaagtataaggaaagcgactacagcgaagcaaactggaaaaagctggtggccgcatatgagcagggaattgcggatatcaacgccgctctgcccgccgaggacttcatcgaaaataacatcatcgcggccctgaacaaggcgctggccgctatgcaggccatccctgctgaccacgccggacggatcgaggtggcggtgtctatggacgcaaacaccttgagtctgggctatctgattaagccgaccctggtcactgtggatgaccgtacccccgccagcgtggtcattaccgacctgctcagcgagaacggctacgactgggagaacaccggaagcattaccaacagcttctacctggccggtgtgaagcctgtgaaccagaccaaagccaaaatcccacagtacatcttggaccatgccggctccgtcaacatgggtgacagcagcgataagacattgagcgagtttgattaccacaacatgtccggctggatgtacagcgtggacaacgacttccccggcgtgggcgcttcgagctggcagatgtcggacggcgaggtcatgcgctggcagttcaccgtctggggatatggcgcagacttgaacgcagacaattccgcctggggcagttccagtatcgtgaacgtgggtgacaagggctcccttacctgggccgtggccgagctgcggagcgagtacgacgacgaggttctggaggccaacgaggtctatatggacgccatggaggttctgacggaccctgaggccagccaaagtaaaattaacagcgcgaaaaccgcgctggccaaggaggactttgacaagcagcctgaaaagccggacgttccaaccgtggatgtgaagccggaggccaatgtggataaggacggcaacgccaaggtggagcttaccgaaaaagagatcgaaacgatgatcgagaatgcagtggaaggcgaggcggagatcattgccatctctcccgagatggacagtgaggccaccagcctggaggtcacattccccaagggcgccgtggatgctattttggaagagacaaaggcgagtgtatccatacagagcgatctgggccgggtgcttctgtcccgggatgtcctgacctccatttccgaaacgacggagggtggcgcggtcaccgtgacggtggccgccggtaaagctgagaacgccggtgggctgctgaagggacagaaggatgtgaccgaggaggccctgaaggactgctctgtgaccgaggtgaccatccgctccggcaaggagaaggtaaccgctttcggcggcaagtccatcaccctctatctgccggtggagaacaaggcgtttgaggtgggcaagagctatgtcgtctatcagatcagcgacgacggttctgtggaacaattggtgggcaagtgtgtcaagactggtggaaagcgcttccttgagttgaccaccacccacttgagcaccttcgtggcgctgcctgtcgaggtggtggatatgccctttacggatgtgaaggaggaggactggttctacggcgcggtggtgtatgcctaccagaacggtatcctgaccggaacgggtgaaaccaccttctctcccaacggccccatgacccgctcgatgctggttacggcgctgtggagactggagggcgagcctgaggcatctggcgcatccggcttcccggatgtgaagccggatgcgtggtacgccgaggctgtggattgggccagccagactggtatcgtcagcggcacaggtgcgggctttgacccggagggcagcgtgacccgtgagcagattgcctccatcctgtaccgctatgcaaagctcaaaggctgggatgtgagcaaaacggccagtctacaagattttgccgacggtgcggatacctccgcttgggcaacccgggctatggagtgggcctatgcggagaagctgattaccggaaaggatggaaatcgtctggacccgcagggccaggccacccgcgctgaggttgccgccattctgatgcggcttctggagagcaaggcggagaaggcctgagactctggaagaaccataaaggccccgtttggctccggtctgcaaaaccaggccgggctgtatgggggctcccccggtaaggatagagggagcacctccttactcgagcaggagcccggcagaccgaattcgacctgccgggcggccctgcccacaatcaaacagaaaacacagttgggtgaaactccgggaaaccggtacgggcctgcccccgccgtccagtcggcaagacctgattgtggaaaaatgggtgggatgtaccgatacaaggcacgttcacccaatgggagagcgtgcctttacttgttgaggtgagcggtataatgctcaaagagcaaaagctgacggaaaaagagctgctgggataccgccagtggctctcagagctggacgaggaaagccggggagagcagggaacttccagacaggcgatggatccggacctgtggagaatttttgaccccaaagggaatattggccggcagatttatgagagctatacggatgaggcgcttttggaggctgtggtggtgacaatggaccatccggggcataagcctcggacatatcagctcagtcccattcgccaggtttatttgaagcagcggtttggaaacatcaataaagcctgctgggcggccagaggatttcggaagaggctggaagagcaaaagcggtggccgccagactggccggagcgggtatccgctgacggattcagggcgtattgtgaacggattggttctcccctgacggagcaggatgcagaactggcggaacatatgtgcagatctgtcagagagagctggcgcccaccggaggaagagggaatcccgccggagctcaagatgctgtttcaaaaaaagcgatgcagcaataaaaaggccatggagctgatgggcatacccgtccttagcaagctggccatgaagcatttgtggagctattggctcagtgcctgggggaaacctgcagggccttccgaagaaaaagcagaaggagactcggtcatatgaagaaatggaaacagcgcggattcgcatttgtgcttgccctgtccctgaccacaggcctgttgacgggagcacaggcggccgtatccaaagagaccttgaacgatgcggtgcaggataccgcagaatatatgtaccgcaccgtacaggatccgcaggtagggtctatcggcggtgaatgggctgtgctggggctggcccggagcgggtacgatgtaccggacagctattatcaggactactatgccactgtggagacatatgtgaaggcctgcgacggcaagctgcacgataagaaatatacggagtattcccgggtgattgtcgccctcagctcgattgggaaggacgccagaaatgtggggggatatgacctgactaaaccgctgggcgactatgacaagaccatctggcagggccttaacggccccatctgggcgttgattgcgctcgactccagagattaccccatgccggaaaacccagaggcagagacacaggcgacccggcagatgtacatagaccgcatattggagtgccagctgcctgacggagggtggagccttttcggaggaacctctgcggcatcctccggagacggcgtatccgacccggacatcacagggatggcgctgcaggcgctggccaagtatcaggatcagccagcagtggcaaaggcgacggaggaagcgctggcgtgcatgtccaagaagcagaacagcgaaggcggtttttcctcttgggggactaagaattccgagagctgtgtccagattatcgtagctttgtgcgagctgggaattccgctggacgacccccgttttgtcaaaaacggaaacacgctcctggacaatctgatgaccttttatctgcccggaaacgggttcctgcacacggcagacggctccggctccaatcagatggcatcggagcaggcgttctatggccttattgccgcccagcggcttcaggacggcagaaacagcctctaccggatgagcgatgcccgaaccatcccagacggaccggcgacaggtcctgccaaaggagcgggattggaggggaaagatccggcagtccattccagccctatcactcagatgggcaaaacattcgatgacattaccggggtcaatgcccataaaaatcagcctgccattgaggcgctggccgcccgcggcattattgacggcaagtccgatggaagctttgacccggagggaagcatgacgcgtgccgaatttgctgcaatcgtggtgcgggcgcttggtctcacaccggaggggaagaacagcttttctgacgttgcagcagaggcatggtatgcgccctatgtggggacagcctattcctgcggcattattaccggagtcgcagacgaccggttcaaccccagcggcacgatcacccgccaggaggccgcggtaatggtttcccgtgcagccaagctgtgcggactggagacagaaatggacaatgcagcaacacgaaatatgctggcgcagttccctgattatatgagtaccgccgaatgggcccgcgctccgctggcattctgctatcaggagaaaattttgaaccaggctgagctgaacatcaggcccctggaggctgtaacccgggccgaggtggctcagatgctgttcaaccttttaggcagtgccaatctgctataaatttattgtataggagtgaaaagaaccatgctgaatcagagctggttcaggaaccagaataatgtggtgtgctgtcggaaagaagaggttctgcccagacttgcacgggagctggcaattccggatttgtcccaacgagtggaggaattccagaagacgcccacagcggaaggtgtgaacataagtgggcgcaaacggactacgctgaagctcctgattccgaatctgacgttctctgaacctattgatatgggcgaaaacgtgtggatctatatgggagaactgtgtccggcttactgcctgtatatgccgcaggaggacggtgaagaaaagaaatgaagctgacgaaggggaaggtaatcggggcgctggctatcctggtgatcctggcggcggccttttggtatggtggcaatgcaccgggactccagggatggacagtaggcgtccgcgagagcagcccggtgctggagagcatacagcccagccaaacaccagaggaaacagggaaagatggcaatagcccagagccgacggagacggcaggggctttggaaacccctgcgtctccgggaaccccgaagccctcggaaactcctgcacccacggagtctgcggctccagagacaccaacgccttcgccggaggggctggcatcccggcccggcgggctggaaggcggaatgacggcggaggaaaaaattgcggcggcagaagccattgcgggcggctcctccgccggtgtggaaaagggagacagggaatactcagaagccaacggcatggagatcaatccggagactggaaaggacaagtatcttacagatccggtgccggagggaaagcccctgccggtggagccgcaggatgtggagttctctgatgtgacccatacctgcacgctttctgtccgctgcgacactattttggacaacattgactggctggatccagagaaggtggagctggtaccggaagacggagtcatattccctgcgacgaccgttacgttctacgagggtgaaagtgtgttcaatgtgctccaacgtgagatgcggaaggccggcatccacatggagtttgaggatacaccgatgtacaactccgcctatattgaggggattaacaacctctatgaatttgactgcggagagctgtccggctggatgtataaggtgaacggctggttccccaattatggctgttcccgctatcagctcaaagagggcgatacgatagagtgggtctacacctgtgacctgggtgtggatgtgggcggcttctattccaccggcggttgagtacagacggaagcgagcttgactttatgccatatgtggtggaaacaggaaaggcgaaggtttctgtaaaagagtataccgaacgctgtgtagatgtagagcggtttctgggattttgcagggagtgcagcagctataacacgcggtggtcctgcccgcccttttcctttcagccgctgcagctctgacatcaatttaaccatctgacgctgtttgcgcgtatactgcacccatccccggatgaaacgcttccggtgctgatacggggaatgcgggaagagaaggcggggatgatggcggagctgttgaacagggaaaaagtctccccatacgtcggcacattccacaggcggatgcagcttgtgtgagacaactgcatcaggacatgcgggagcccctggccggaggagatgcgctattccttcaacgcccttgggggagacagcgggaaaaccatggagctgtattttggacgccccatagtttggagtcataacggcgaagtgccggagtacctgactctcatgggcggacttctggtgaactgacacgctattttcgtgaaaaactaataaaaaatttacgtggggcgcggcgcctcaccgcgccccacgtctggaagggatgccttattcaatacagggatacattttccagctatcaccctattataaactttttgtattttggattggtaattgcttttaccatgtttctgatgcacccggtttcgctggcgatttctctggcttccgctttggtctatgccgtatacctgaacggacggcgagcagtgcgcttcagtctgttgtatatgctccccatgatggtggttgccgccttggttaacccggcgttcaaccacgagggagccacgattttgacctatctgccctccgggaatcccctgacgctggagagtatcctgtatggagcggcggcagcggccatgctggcggcggttgtcacctggttttcctgctatacggcggtcatgacctcggacaagttcgtgtacctattcgggcgcattattccggccctctctctcgtcctgagtatgacgctgcgctttgtaccaaaattccaagcgcagcttcaggtcgtatcagaggcccaacggtgtattggccgggatgtctctaatggtggggtgctccagcggcttcgcaatgcaattacgatcctctccattatggtgacctggagcttggagaatgcaattgaaacagcggacagcatgaaaagccgtgggtatgggctgcctggacggacagcattttccatctaccggtttgacagccgggatcaatcggcactttcatggctgctctactgcggatttttcctctgctgcggcgcggcggcaaagggcttttactggcgttattatcctacggcgagaggagtgccgctgacaccgatgaccgtctgccttcaagcagtgtatctggctttgtgcctgatgccggttatcctgaatatacgcgcggaccgggagtggggagtactgcgcaaagaaaacgaggtgcagccatgtaccaaacaatgagcctcccgctgtattcggggagctttgaagaataccacggctggggcaacctgcgggcggagctggcagctctgggatgcgacggcatggagggtatctggagcggtgaggaatttcctgaggatttgccggcagacctggtcatcggctatcacctcaccttctatccggactggctggacttctaccgggatgaccggagggcgctgaagcgaaaattcggttcactggatgctgcggcacgcttttacggcggtccagggtcggagacactgctggagcagtaccgggcggatctgcggcgcgcggcagggctgaatccccactatgtggtctttcatgtatcggatgtctcaattgaggaagggtatacctaccactggctgcacaccaatcaagaggtcattgatgcggcggtggaggtgataaacctcattctgggcacggaaacatggccctttgaattccttgtggaaaaccagtggtggcccggctttacgtttacggagccggaggaaaccgtccgcctgctggagggaatccgttttgcagggaaagggatcctgctggataccggacacctgatgaatgcctgcaccgggctgaagagtgagtcagagggagcggactatatccggcgcatgctgaaccggcatggcagcctggcaacgtgggtgcggggcgtttatctgcaccagtccctgagcggggcatatgtgaaggcccacaccggcttactgccggcagggttgccggaggattatggggagcgcttcggggtgagctaccagcacatccttcagattgaccagcaccggccttggacggatcccgccattcttccggttctggagcagattggcccgcgctacctgacccatgagctgtcctcccgcgggcgtatgtcccgggcggaggccatggccgcacaggcaagactatttcagcagggaggaaagatgggtgtctgagcagaaaagatcatacatagaaattaaacatttttccttttattacccggagcggacagagaaagtgttggacgatctgacgctgaccgtggagcagggggaattcctggtgctgtgcggcccgtcggggtgtgggaaatccacgcttctgcgacagctcaagacggtgctggcgccccacggccgaaggctgggaagcatccgtttcgaggggcgccctttggaagaactggatcagagggagcagagcgccggaatcggctttgtgcagcaggaccccgaaaaccagattgtcaccgacaaggtgtggcacgaactcgcctttggcctggagagcctggggtatgacacgcctaccatccggcgccgggcggctgagatggcctcctttttcggcattcagacctggttctacaagaacgtcacggagctgtccggcgggcagaagcagctcctgaatttggcgtctatcatggcgatgcagcccagtgtgctcattctggacgaaccgaccagtcagcttgatcccattgcagcggcagactttttggcgacgctggggaaaatcaaccgggagctggggacgacggtcgtgttgacggagcaccggctggaggacgccttcccgttggccagccgtgtggcggtcatggaccgcgggcggctgctctgcacagggagtcccgcggaggtgggggcgatcctgcgcggggcgggacactcaatgttcctggccatgccgaccccgatgcggatctgggcatccgcgccggatgcgggcggacactgcccggtcacggtgcgggagggccgggattggctgaccgggtttgctgacggccatccgctgggagaactgcccgccgagtcccggcatgtgtatccggatgagccggccatcacggcggaagggctgtggttcaagtacgaaaaagagctgccggatgtggtaaaagggttgagccttacggtgaggcgaggagagtttctggccttactgggcggcaacggcaccggaaagaccaccagcctgaagctgctgtccggactccagaagccttaccggggggaggtgaagctggttgggagggtaggtgtgctgccgcagaatccccaggcgctttttgtgaagaaaagcgtccgggaggacctcattgagattctcaagggccgggctttctccagaaaggcgcaggaggagcggatcgcttgggcggtgcggttgtgccgtctggaggaactgctcgaccggcacccttacgacctgtccggcggcgaacagcagcgggcggctctggcaaaggtgctcctgctgggaccggaaatcctgctgctggacgagcccaccaaggggctggacgcggaatttaagcagacattcgctgagattttgcagacactcctgcgacaggaggttgccctgctcatggtcagccacgacattgagttctgcgcccggtatgcccaccgctgcgccctgcttttcgacggctccatcgtcacggaggccccgccgcgggcttttttctccggcaacagcttctacacgacctcggccaaccgcatggcccgtggcctgctcccggaggcagtgacagcggaggacgtcatactggcctgcggcgggacgctcccgcctgtgccggaactcccggatcgcagggagccgctcccggagccggaggaggccggcgcgtactccaaaccaaaaccgctgacctggtggcgcaagctgggcgcggcgctgacaggagctatggccttcctcctgttcctgtccttcatgaacatcacagatttgaccaaattgatcaccgcaggcggtatgacagagctggcaaaccatcaaatgtttctgtatgcgctctttattctctcgttgttcctgtttgctgcctgcattacgcgccggtcacaccggaaggattatgtcctccaggtgcccagagccaagcggaagctggctaagcggaccattgtggcagccgtgctgattttactgctaatcccgctgaccctatatatcggagtgttctatttggggaataaaaaatactatttcatctctctgatggtgctgttggagtgtatgctgccgtttttcctgatctttgaggggagaaagccgcaggccagggaactggtgatcatagcggtcctgtgtgccattggcattgcaggacgggcggcgtttttcatgctgccgcaatttaagccggtgatggcgttaacgattattgctggtgttgccttcgggggagagacggggtttctggtgggcgcaatgaccatgcttgcctccaatgtgctctttggacagggcccgctgactccctggcaaatgttcgccatgggcattattggcttcctggcaggcctcctgttccgaaagggactcctgcgcagaaaccggggcgcgctatgcgtgtttggcgcgctggccgccatactgatctacggcggaattatgaatccggcatccgccctcacctgggtgggagagctcaatgaaaaggtcctgctgacctactacatctccggactccccttcgactgtatccaggcggctgccacttggctttttctctggtttggggcagagcccatgctggagaagctggaccgcattaaggtcaagtatggaatggtagaggtataatacttgcttggaatcgactttgctgccttttgtcaaaggtaggatgatatgcctggatggagaaatagaacataggcggagaaaaggctgaaaacatgcggcgctcaaccgagcgccgcatgttttttcttgccgctttgatttgtccttactgtttaaacgtcaaaccgccatagggcccgcctgtatctcaggcgggtcctatggccaaaagtgttttcggcaaaataaaaattgtagcaaaggctacccaaaatgtgagcgccctaatggcgaattaaaatgagccattgtcagcatctgaaataaacgctacctcttaggtgggataaccataagggggggtagcagaaaggcgttacgaatggctcaaatccagtatatcaaatttccccagatctaactacggagtatcgtaagcattccagccccaaaaccaagagtgcctgcggataggcatgaagcggatttttgagtacattgggggtattcccatcagactgcgctttgacaatatgaccacggctgttgctcaggtattgaaagacggtgagcgtgttctgacagacggctttacccgatttatgctccactgcattttccgggctgatttttgcaatccggcttccggcaacgaaaagggcaatgtagagaagaaggttggttacagccgccgcaatgcctctgcttcggttccgtcattacctcgtttgaggaatttaataaatggttttgggagtggtacgaaaaggacgccgaccggctccactacaaatacaaggtccgcgcggttgttgagccaggagctggccgtgatctgcgccctggagacatacggcccggacccggcagggcaggtacagtcaacacttgcccagcaaaagggagtgacaacgcccgggtatgggacacatctaaacgggcgatccagattgtcctcaacaacctgaagggcatcttcttccgggacgatgatttggagcaaatgaccttttcggggacggggcggcgggggggaaacaggtatcacgatcctccgcatctcagcttttcaagaagtcggcgactacgacttggcaccagcctttccgccagcgattttgctatacataaagatagtgtcattgatttttatatgttaccttgctacaataatattattttagcgggaccctgggatatggggccgtggggacatcaagaaaggagtttacgatcttgacgagccaacgattaatccaagaggcaaagaatttcctgcgcagcggtactcctatcccagaggaggcggtacggccggaggtcctacggtcgtggaaacgttgctgggggtcccatgtgcccatggagcacgggaataaggagatcctgccactggatgccgtggaggagcggatcgcccggcggaacagtctgtgtcaggtggccttctcctatctggatgggctgtacgatttcatacggggctcggagtttctgctgctattcagtgacgaggagggctatatcctctacgcccggggggacgaggacatctcccggaccgcccgggagaacgggctggtcaagggggcctgccgcagcgaatcccggctgggcaccaacgggatcggcacggtcttggtggaccggatccccctccaggtctttggggcggagcactactacgaggtacatgccaactgggcctgctccggcgcatcggtctttctgcccgatggagacatcggcggcgtggtctgcctgtccggcatggcggagcatgtgaacgatcacactctgggcatggtggtggccgcagcagatgccatttctcggcagctgaagctgaaagatgcctacgaccagctgtccaagagctaccgcaacttgtccgctatcatcgagacggtgcccacggccatgtgtctgctggacgagtccctccatgtggtagcctttaatacacaggccactcggcagctggccctcgctccggctgagctaagcggagctgactttctggaggtgctgggatgtggggcggtcacggcggaggatatcaagacctccctatccaaccgcaccatctccttcgagcggggagagggcaagcacaccatctccctgtcggtggagagcaccggccaccaggagtatgtggcgcagattgagcagttgtccagccttcacaagcgggtcaacaacattatgggcaacgaagcccatttcagattccaggacatcatcggcatctctccggccatgggggaggcagtgcgcatggccaagatcgccgcccagaacgacgcctcggttttcctgtccggagagagcggcacgggcaaggagctctttgcccaggccatacataacgccagctcccgtcgccgggggcccttcatcgcagtcaactgcggcgcactgcccaagagcctgatcgaggccgagctgttcggctatgagggcgggagtttcactggggcccggcgggacggctgtgcgggcaagttcgaactggccaacggcgggacgatcttcctggacgagatcggggatatgccggtggatgtccagatcaccctgctgcgggtgctccaaaaccgagaagtccgccggatcggggcctccaaggcgctgagaatcgacgtgcgggtgataactgccaccaaccgggatctggagcagctggtggacagcaaagtcttccgggaggatttgttttaccggatcaatgtctttcggatcaatatcccgtctctgcgggagaggacgggagacgtgaggcagttggcgggcttcttcctggccaagtacagtgacatccgtcctggaggaagggtggagggcttcacggccgaggccctggccatgatggaggcatacccctggccggggaacgtgcgccaactggagaacagcgtggagcgggcggtctacctggccgagggggaactggtgaccgccgccgagctcccgccggaggtccgggccttccagggatcggcgccctctccggctgtgcccgcggcggcgggagagtccccctctgggggcgagggggaggacgaggcggcgcggatccaggacatgctccaccgcacccacgggaacgtcatggaggcggcccgcttgctgggcatcagccgaagaactttatatcgaaagctccaacggtatcacatcgactacagctcgcatcggatctgatataccgtatgacacaaatggaactgtgacacaactgtgcgccatgtgcggctgtgtcacagtttttgtcacatatgtggcacactccagtggcgcactggggcagagaagtcccggtttgccttggtttttcaaggggttgcggaggggaagagttggcatggcatttgcgtgtttatcaaaaacaagaccgggtgcggtacgcagatgaccgtccccgtttgctggcggagcaggacccacggggacaaatcgaaagaatgggaggcgatcacgatgaagtatgccgttttgagcggcaacgagcggttcgagatccgggaaggagagctgaaaagcaatggatgcgcggtgctccaggtgacccatgttggcgtctgtggcacggatacctcttactggcacgagggcgagcgataccgtggggtggtcatcggacacgagtactcaggcgtcgtagtggccccaggcaccaaccgggccctcaagccgggcgaccgggtggccgggtacacccaaaacgtatttcaggagccctgcggccactgtgaggcatgcctggctggcgactgggaccactgcaccaaccgcagggtcttcacctggaagggcggcgagctgggccatcccggcgcttacagccagtacaccacctggttcccccacagtctggtcaagcttccggataatgtgaccaacgaggagggagccatggccgagcccttcgcggtgggccttcatgccatccaggtcagtcaggtgaagcccaacgacagggtgctcatcctgggcggcgggatcattggcatgagctgcgcggagtgggccagaaccttcggcgccagtgagatcaccgtctcagagctcaacccccagaagcgggagatcatccggggctatcaggtggctgaccatgtggtggctgccgacgcccccgacttggagcagcagctgctggatatctcggggggcggctatgacctgctgattgactgcgtgggggtgcccagcgccttcaacaccggcttgcgcgccctcaagccggagttctatatgcgggccaccgccgtgggcctgccccatgctcagttccctctggactatgagcggctggtgctcaagcaggtgctcctccgtggcagcaagggccacaacttcgatgaattcaagaccgttatcagcgccatggcctctggccggatctccgtaaagaaatacatctctcgccgcatcaaactggaggaggtccaggcgggttttgaggccatgaaggccgcccgcggcctggacgccaaggtaatcatcgagacgcagtgaccccgaaacgatcaaaacaagtctgcaaataaagagggaggagaatcatggacattatctccatactgggcctggtcctggggctggcagtcctgatcatgatgggctttaaaggctggggcatgatccccacgtccatcgtgggcgcgctggttgtcgtcatcaccaaccgcatggacctttgggaggcgctgagcacccactacggaacctttatgaagaactatgcgggcgactacttcctgatgtttttcctgggcacgctgttcggcgcactgatggggagcagcggtgcggccaaatccattgcctgtaaaatcgtggatctgatgggcagcaagcgggccctgctgattgtggttatcacctctgccgtcctctcctatggcggcgtcagctttgccgtggtggtgttcaccctgtacccgatcgccctagttctgttcaaggagggcaacgtctccaagcggctgttccctgcggcgctgttcgccggctgtgcctccttcaccatggtgggcctgccgggcagcccacagatccagaatatcatgcccactgaggtactgggaaccacggcctacgctgctcccctcaacggtatcgttgtttcctgcatcatcttcgctctgagcatggtatggctggagtggaacgacaagcggttgaaggcggccggcatcggcttcgtccccggacgaaaagacgatctggaggccatcgatatctccgaccgcaccgggatgctgcccttcggtctggctgtcattcctatcttattcgtggtgctgtatatctttgtgatgcagcaggtgctgaaggacgctgtcacctggagcaccaactacatcgtcatccagtccctggccctgggctgcctgctggcctttgccctgttccacaagcggatccacgccttccgcgattcggtcaatgatgcggccaccaacagcctgatcgccctgatgaacaccgccgtggtcaccggcttcggcggcgtagtccagggatcccatggcttcgagctggtcaaggaattcgcactgagcctggatatgaacccactgatctctgcctgcgtggccaccgccatcgtggctgcggcctgcggctcctgctccggcggcctgtccgtgttcctggcggcccttggtccccagtatgtgcagctgtgtcaggcgcagggaatcgatccgcagatcctccaccgctccatcacctgggcgggcgccggcctggactccctgccccactccggcggctatgtgacggccaatatctacaccgaccagacccccaaggagacctatccctatttcttcgtcaccaacatcggcctgacgacgctgggctgtgtgctgacggtggccctgtatatgctcttcggcctggtgtgaccaggcggagaggctggagaaatccgatcacgctctgaaatcgagaaaggaacattgctatgctggaaatgatctggaagccgactctgtacggcttcgacacctgcaaagagtttgccgaggcgttccgcctcaacagagaggacctgatcctcagcaacgcctatatctatgagccctacttcggctgtatggagaacctgaactgccatgtgatcttccaggagaagtatggcgccggggagcccaccgacgtgatggtggatgcgatcctggccgacgcggccaagaccagctgtaagcgggtgatcgccatcggcggcggcacggtgatcgacatcgccaaggtgctggccgtctctgacggcgagggggtggacgacctttatgacaaggcccccgatctggaaaagaagcgggagctgatcatcatccccaccacctgcggcacgggcagcgaggtgaccaatatctccatcatggcccgcacccgcataggaaccaagcttggcctggtcagccccgccatgtacgccgactacgcggtgctgatcccccagctgctggagggcctgccgttcaaggtgttcgccgccagctccatcgacgccctggtccacgcggtggagtccgccctgtcccccaaggccaccccctacaccaagctctttggctataaggccattgagatgatcattcggggctatcagactatcgccaagaaggggccggagagccgcttctctctgctcaacgacttcctgctggcctccaactatgcgggcctggcctttggcaccgccggctgcgccgccgtccacgccaccagctaccccctgggcggcaagtatcatgtggtccacggcgagagcaactacgccatgtttacaggggtgctcaagaactacatggagctccgccgggacggggagattgcggtcctcaaccagtatctggccgacctgctgggctgtatgcccgacgtggtctatgacgagctggagaagctgctggaccagatcctgcccaagcggcccctccgcgagtacggcgtgaccagggaggatctgcccgtcttcgcccacagcgtggtcaccgagcagggccgcctgatggccaacaacttcgtccctctggacgaggcgcgggtgctgaagatctatcaggagctgttttaagaccgttccagtcccggttgcctgtccccgccttagagggcggggatcgccggggggaatccctctgaccgggggagcgggactgggcgcaatgataaaaggaggagattctcatggcgcttatgagcaaggcagcgatcgtgaccggggcagcccagggcatcggcaaggccatcgccgcacggctggtgaaggatggaatgcgggtggccatcgtggacatcaaccaggaggccgccgtcgcagccgccgaggagctggccgggcagtatggcgcggacaccatggccgtgcagtgcgacgtctctcaggaggagcaggtcaacaccgccgtgcaaaaggtgctggaacggttcggtacggtggatgtgctggtcaacaacgccggcatcctgtccctgaagaagccctttgtggagtacaccaaggccgactgggacaaaatcttcggcatcaacttcatgggcgatgtgttcttctgcaaggcggtgatccccaccatgaaggagaaaaaggccgggcggatcatcaatatggcctcccagtccgccgagacgggcggcctggccgcctcgccgatttacgccgccagcaaagctgcggtctggtgcatgacaaagtccctggccggggagatggggccctatcaggtgaccgtcaatgcggtggcccccggctacatcatgaccgagatgacccgcaacgccggttatcgggacgacatggtccccatgaagcgcctgggtacccctgaagacgtggccgacgtggtgggcttcctggcgagcgaggacagccgctatgtcactggcatgatcgtggatatcaacggcggcacggtgatgcgctgactttgtctgaacgagtgcgggtcatcaactgacattgggaggtaaaatatatgagcacgaaaaaggaaccaaaggagctggcaaagcagttctataccgtaatgtaccggatgcgccgcttcgaggaggaggtctttgagttctataagcggggcctgatgccaggcctggcgcacctgtatctgggggaggaggcggtggccgccggggcgtgtgtcgctctgcgtgaggacgactacatcggctccacccaccgcggccacggccacctggtggccagaggcgccgatctggaccggatgatggccgagatcctgggaaaaaagaccggctactccaagggcaagggcggctccatgcacatcatggccatggacaagggcatcctgggcgccaacggcattgtgggcggcgaaatccccatcgccactggcgcggcctactccgccaagctccggggcaccgagcaggtcaccctggcctttttcggcgactccgcgtccaacgaggggaccttccatgagtccatcaacatggctgccgcctggaacctgcctatcgtctatatcatcgagaacaatctcttcggcatttcggtggatatccgccgggtgaccaaggagcacgacctctataagcgggccgagggctatggcattccgggcgaggctgtggacggcaacgacgtctatgcggtgtacgaggccgtctccagggcggttgagcgggcccgcaagggcgaggggcccaccctcatcgagtgcaagacctaccgctggcagggccaccacgtgggcgaccccggcgagtaccgcgcccccgaagagctggccgcatggaaggcccgcgagcccttggtggtgctgcaggagaagggactgctgagcgacggcgagattgaagagatccgcgcctctgtggagaaggagatcgcccaggcctgtaagttcgccgaggagagcgattatcccgacgtgtccgaggcctacaaggatgtgtttgtagatatcgccgcatctgtttgataataagggaggttcagatcatgagagaattgatggtgagagacgccatccgggaggccctggacgaggagatggcgcgggataataccgtattccagatgggcgaggacatcggcgtcatcggcggcaacttcaagtgcaccgtgggtttgcgggacaagtatggtgatctgcgtgtaaaggatacccccatctctgagcaggggttcgtgggcatgggcgttggcgcggccctgaccggcctgcgcccggtggtggagctgatgttcgccgacttcatgatggtctgcggcgaccagctcttcaaccagatggccaagatcacttacatgtccggcggccagtgcaacgtgcccatggtggtgcgcctgcccctgggtggcggacgctcctccgcggctcagcactcccagtccatccatgcctgggccgcccacatccccggcgtcaaggtggtggtcccctccaccgccggcgagtgcaaggggttgctcaagaccgccatccgggacaacgaccccgttatgttctttgagcacaagatgctctataccaccaagttcaacgatgtcccggaggtggaggaggatgtgtgcatccccttcggcagggcccgcatcgtcgcggagggcgccgatatcaccgtggtcaccaactccatgatgaccatcaaggcggagaaggcggtctggcagctacagaaggagggcatcagcgccgagctgatcgacctgcgcaccatcgtgcccctggacaccgagacaatcatcaggtcggtgaaaaagacgggcaagctgctgatcgtagacgagggccacctcagcttcggcatcaccggcgagatcgcctcccggatcatgcccgacgtgttctatgatctggacgcccccatccagcggatgggcaccgccgacgtgcccctgcccttcagccccgcgctggagttcccgctgattcccgacgagaagaagatcgcggccaagatccgcgagatggtgtaaggaggcatcgcaatggctgaagtcgtcatcatgcctaagctgggcttcaacatggacgagggccagctggtcaagtggcacaagcaggtgggcgagacggtaaagaagggcgaggtgctctttgagatcaacaccgacaagaccaccatgcccgtggaggccaccgaggacggcaccctcctgaagatcattctggaggagggtgccttcgccgaggtgtttacccccatcgccgtgaccggcgcaccgggggaggatccggatgccgccctggcttccgccggacaggggcaggccggtggaagcgcgcccgccgccgctccttcggcccctgccgcgccggtggacatgaagtctctgaaactgacacccaaggcccgaaagctggtccaggacgagggcatcgacccggcctccctgacccagatcaagggcaccggcttccagggcgggatcacctataaggacctcaaggcatccccgctggcccgcagggtggcccggcaaatgggcgtggatctggccgctgtccagggtaccggcgccgccggcaagatcatgaaggccgacgtgaaggccgcggccgccaaggccgcgcctgcctccgccgggtcggacacccgacaggtggcctccgccgttccctacaagggtgtgcgcaggatcatcggcgagaagctggcccagtccaaattcactgcgccccacctgtactttaccgacgcggtggacaccaccgagctggccgccttccgcaagcggctcaacgagaccagcgaggtaaagatcgccgtctccgacctgctgaccatggcggcctgcaaggccctgaagaaattccccggcatcaatgtcaccctgaaggacgaccaggtcgtcacctacaagtccatcaacgtgggcactgccgtggctggtgacaacggcttggtcgtcccggtgattaagaatgtgcaaaacaagactctcaccgacgtggcacgggagagcaaggatctggtggccagagccagggaaggccggctggccccggaggagtacagcgagggtaccttctccatttccaatctggggatgttcggcatcggcaacttcaccgcgatcatcaacgcgcccgaatcggcgatcctgtcggtcagttccgtgcgcaagacccccgttgtggtcaccggcgagaacggagaggacgccatcgccatccggcccatgatgaacatacagctgtctgtggatcaccgggtcattgacggtctgctggcctcccagttcgtggagtatatgaagcagctgctggagcatcctatccagattctgatgtgagtggaggagtgtcatggcagagatcatcatcatgcccaagctgggcttcaatatggacgagggccagttggtcaagtggcacaggcgggtgggtgaaacggtaaagaagggcgaggtgctctttgagattaacaccgacaagaccaccatgcccgtagaggctacagcggacggcaccgtcctccagctcatgctggaggacggggctttcgccgaggtgttcacccccatcgccgtgatcggcgctccgggggaggaccccaatgccgtcctcaacggccccgccaccccccaggccgcgcccgcggccccggcggagccggccggatacgactacgacgtggtcgtgatcggtgccggccccggcggctatgagacggcgatcaaggcggcccagtgcgggaaaaaaacctgcatcatcgagggggccggtttcggaggcacctgcctgaacgtgggctgcatcccaaccaaggcgctgattcagaccgccgacgtgtaccacaaggtgaaggatgccgcccgcttcgcggtgacgggcgtggaggcggacaagatcgcggtggatatggccgccttgcaggccagaaagaaagccgtggtcaaaaccctggtcaacggcgtcaagggtctgctccggggcaataaggtaacggtggtggagggaatggcctcgtttgccgatacccataccctgtctgtggacggcaggagcatcaccggggccaacatcatcatcgccaccggctccagcgtattcatgccccccttcatcgcgctggagggggaaaaccacctgctgaccagcaccgaggccctggacctggatcaggtgcccgcctcggtcaccgtgatcggcggcggtgtgatcggcgtggagttcgcctatctcctgaaccgtctgggcagtaaggtgacggtgctggagctgatggaccatatcctgcccatggtggacatcgaggtctccaggctggcggagaagcggatgaccaaggacgggatcctgttccggctgggcgcaaaggtcagccgggtgaagggcgacacggtgtactacgagtacgagggacaggagtgccaggtgaagtcggacatggtgctcatggcggtggggcgtgttcccaacacgcagggcctcaacgcagaggggatcggcatcgagttcgaccggaaggcgatccggacggacgcccatatgcgcaccaacatcccccatatctatgccattggggacgtgaacgggaaggttatgctggcccacaccgcctcccacgagggtatggtggcagtggcggacatctgcggccaaggggaggagatgcgctatgaccggatcccatcctgtgtctatctggagcctgagatcgcctgcatcggcctcaccgaggcccaggccagggagaagtacggcgacgggctgaagatcgggcggttcaacatggcggccaacggcaagtccctgatcgcgggggacacggacggcctgttcaaggtgatcgtggcggcggacaccggcgaaatcctgggcgctcacctctatggtcagcacgtcaccgacatgatcggtgagatctcggcggccatggccgccgagggcaccgctgaggagctgatccatgccatccacccccatcccacggtcaacgaggccctgggcgaggcctttatggccgcctggaacggacgggccatcaattccctgtgacagggcggatcctctgcctgggtgacagcctgacctatggcttcggcctcccgcggggactggtctggacggcgctgtgcgccgcccagaccggggcggagctgctgggccggggtgtcaacggcaacaccaccggcggtatgctggccgtcctgcccgatctgctggtccgggagcacccggacgcggtcctcctgatgggcggaaccaacgatatcgcctacggcggggatctggcgggcgccaggtccaacatgggggccatggcccacctgatcatcgccggaggaggcctcccgctgatcgggatcccgccggggctccggcggcccattcggcgggagtgggcggagctgatgccggagcgggcggcagagctgctggccgagtaccagagctggctgcgccgctttgccgccgccttccgtctgccggtcctggacttcgaccgggccttcacccgatggggagaggaggggctctttcagccggatggcctccaccccaacgccgccggccactgcctgatggcggagacggccgcggcgctcattcgatccctgtgagagaaaggagcctgtgccacgatgcgtgccatccaaagccccagcaccgacccccgcttcaatctggcgctggagcagtatatttttgaccagatgcctcggaaccggtcctatctcatgctctggcgcaacgaccggacgatcgtggtgggcaagcaccaggataccttcgccgagatcaacgccgactatgtgcgggccaaccagattcaagtggtccgccggctgtccgggggcggggcggtctatcacgacctggggaacgtgaacttcaccttcatcgccgaccacacgggcagcgactttgacttctccaccttctgccgcccggtgatctgggcgctggagagcctgggggtgcccgcggagctgaacggccgaaatgacatgaccatccggggcagaaagttttcgggcaactcccagtatgtgaaggagggccgggtgatgcaccacggcacgctcctgtatgactctgacctgagcgtggtgtcctcagcgctggctcccagccgggacaagctgacctccaagggcctgccctcggtgcgcagccgggtcaccaacatcaagccctatatgcatcagccgatgcccacagaatccttcatggagcggctgtggtcctgcctgggagaggtatgtgacctagtcccctatgagctggatcggggggatctgaatcaggtggagcgtatccggcaggcggtgtacgaccgctgggagtggaactatggaagttccccccggtgtcagatcgacaagcgccgcagggtagagggctgcggcgagatccgggtctgcctggatttgaaggagggtgcaatccaggcgctgtccttctatggggacttcttctcccgaaaggaacccgaccagctggcccggcggttgatcggctgtcctctgcgggaggaagctctgcgggcaacggtgccggcgggggaaatcgggcagtattttcagaacatggacctggatgaattttgcgggctgatgctctgctgaggccccatcaaaaacagggcgcggcccggaaggccgcgtctaacagcaaggagtggatgatatgagtattgaccgtctgccgcccgtgggccatgtgggtgtcgtcgtggccgatatggaccgggcgctggaggagatccgtcagatcttcgggatcgacggcgcagggaaggtgtacgacttcacacccatgaatgtatgggcctggggggagaaaattcccggctgccagattcggatcgccatgctggattggaccgacagcctgaagctggaggtgctccagcccgtctttggcgagattgaacataagcgcttcgtagatgaggtgggaggcgggatgcaccacaccgcctactacgtcaaggactacccggcttatcgggatttcatcgtgggccaggggggcgagatcatttttgagtcggagaccgaggatgaaaaggggtaccgtcgatgctgctacgcccgtatgcctgggacgcagatgattgtagaagtattggagaaggcgtggttgcgcaattgaggtgctcctgtcttttgagaaaataagttcatagattaagtatgggcaacacccctcctgtggttcggcagacggggtgttgcttatattctggacataaggatgccctcctgaagcactcttattgagaaaaatgctccatctaagtttagatgaagttatagggtcaagcgtcaaacagcaattattaggtatgaaaaaaatcatgcttaattgtataaatgactataattagactaaaaagtaaaaatagaactttggaaaatattacaacgtacagtcaaagcagcggctgggaggagagggctttcgtgcttgtaccgtaaatttaaagataattaagctaccaaaaaagagatgttccagaggtcactatacctttggaacatctctttctgtttagatttcaaagcggaatcggtaagaagacggcgtatgagcttttgaaggatggcgcaatccactaaatgaagattgggaaatcgtttaagatacctaaaatctatatcattgaatatctgatcggtatatattaaaaagtttcggtgtgtggaaataaggcagtacggaatattggaggagagaactttacatggaataatattttacatcctcttcgattgagcatcccaatatactttcatgccaacgattgtaatagatttcttgttaacgggaagcttttccatagcggccttggtctatttggaatgaccggttgagaaggaaagtccttttgcaaagagcatattaacaatctttcctaagctggctccagcaagatagtatttaaatataccgcggacagcatctgttttttcttcatgcgcagtgatttccttgccagctaaaacgtagccatacggaagtttcacaggtacctcactttccaaaacataaataaaggcaggtttaagagagataccatctctttaaatctgcttgctgacacttgcaatatgtaatggtagccagttctatgctgtggttttaatacacttttacaaagtatagacaaaacctgcatataactatcgttatacgcaggttttgtctacgatggtgccggtagtgggactcgaaccc

SEQ ID NO: 4355 - DNA, 12065 bp, Unknown
  gut microbiota DNA sequence
gttgttggccttggtgggccaggcgcccgtagtggccacagtgatgatcgtcttgttcttcagctcgctcatggttttgcctcctcctacaaatttactaatttacttccgcaattttcgtgccaattttatatattccttatagatttcccggaatctactgagccgcaaggaattatagcggtacaggagaaggaggagagagaagggcctggtgaaaataatcaccaggcccttctctctcctccctatacaacccttgtactttatccacatgtagaccagaaaacttgggcaagttatgctgattatagaaatttaaaaatgttatattccttgagtcggaaaaaattcaccatagtggtcaaaaaaatcaccgttttgcggagctaatccccagtctcttacatttttttacaagagtagaatgctctacccccaggctggccgccgccttgcgaagggaaccagtccgctccagagctccgaggatcaattcacgttcaaaggtctgtagttgagttttgaggctggccctcaaagggccagcctccggtaccgcggtaccggaaaaattcagcgccgacgcaacctggcagccaccaatttcacccacactgtcggtaaccaccagccgctccaccagattttccagctctctgatgttgccaggccagtcatacttggctaactctgccacggcgtttggggagagttcggtctcttttccgtatttacgccgatacagctcacagaagtgcctggccagtaccggaatgtcctcccgacgctcccgaaggggcttgagttcgataggcaccacactgagccgatagtacaaatcctcccggaacctcccctgccgcacctgtgtcagcaattccttattggtggctgcaatcacccggatatccaaatctatcgtcttgctgccacccagacgcaccaggctgcgctcctgaagtacccggagcagcttggcctggagtgccatgggcatatccccaacctcatccaaaagaagaactccggtattggccaactcgaacatgcccgcttttccggttcgtttggcccccgtaaaggccccctcctcatatccgaatagttcagactccaacagttcagcagggatagcggcacagttgagtttgataaagggtttgccgcaccggtcgctgttctgataaatctcgttggcgatgagttccttacccgtaccagattcccccgtgataagtaccgtgacatccgtcggcgcaactttccgcacaatttccatcacttcccgcatggccgcgctgtggtagatcgtctgcttatcgcccgcctgctggctgcggagataggccagttcctgaactgctttttcctgcttttcctccaaagccaatagttgagcctccagccgcttcagctctgggaagtcccgtgtgttggttactaccagcctgatattcttctcctcgtcaaacaccggcgtccctgtcaccagtacttctttattcaaacgatgaatcgtggccacagagttgattctcttgccttgagccagcacgcgttccgttacagagccggtgtaaaggattccctccgcctcaatttccgataccttccgccccaacagctcctccgggaggattccagttgtacgggtataggccttgttaatgaacagaatggtacccgtaccgtcggtgatgtgtatcccgtcgtaaaggttttcacagatacttttatagtccccgctttccagttctgtcagatgaacaacgccttttcctgattgcatggccacctaccctttccgctaatcaccgcattatctaggtatattattatatcatactttcaaattgtgcgaaatgcatgaaaccataatcactatttaaaaaagcattggtttgctctaaatgtctgacaaatacattatgggggtgacagcaaaggcagggaatcctgctgttcgcctgctttcaaaagagagccccgcagttcaccttgctgaaatagcactgcttccgcttgcacaggcgcgtttgaacctggtcaaatagcgcctttcaataaccagccgcaatgcgcaccagcccgccacaggctgctttgtggacggatgggtaccgctctgcatctttcttggccgtctttgatgcggacttgtgtcctatcgcagctatatgagctcctccgcaatccagagatagaggacgttccgccctgttacccatccgatatccgcacaccttatctggtagccgcgcaccaccaacaccaagtcacatccggggctgccgcagtagttcacgccggcacacacggcctcccgcccccttacgctgtggttgtgggtggagcggtttacccgctcgccggtcagcttggaggcggcagtcatcagatcccggtattccggcctctgggccaagccgcaggtcatgcgcgcgctgtttaggttggaccgaagaatggtggtgtccaccgatggacaccaccattcttcctaaataaatacacctgtatgttcaggtttaagagctcccgggcttcgtcaggggtggcggcctgcttgccgtactcctcgatgacccgctctgcccgctccacaaaccggacgttgctcttagccggtacgttcctgatatacatcacattgtccaccatgcccacccgtctgttttccgtcccgcagccgggttttacagctttgctctcctccgctattgcattttcggaacaagcacacctgcttgtacccccttcttgttgcatccccgcatcatcgcagtgttaggtgggaggtttattcctaaaaatcaagcaaaattgttggcatctgacttgcagtttatattcaaagaaccaatcccaccacaccttgagaggagttattctgtatgaatcatgttgcaatcgtatccgcctgccgcacccccatcggcaccatcggcggtcagttcaagaccttgaccgccctggacctgtccatcccggtgatgcaggctctgatccagcgctccggcgtggaccccgccctcatcgacgatgtgatctggggctgcaactaccagcgcacctatttggagaacaacctggcccgcgtggccgccatcaaggccggcctccccgacacggtgcccggaatcaccgtccaccgcaactgcacctcctccatgtcctccattcagttgggcttctatcagatcatggccggggaggccaagtgcattatggccggcggtgccgactgcatgagcgccgctccctttatggtgtttgacgcccgctacggcaagaagtacggccacatggagctgcgggattccatgtgggactccctgaccaacctgggcgtgggcccctctatgggcatcactgccgaaaacgtggccgatgcctacggggttacccgggaggacatggatcagtatgccctccgctcccagcagcgtgccgccgccgccattgacgcaggcaaattcgaggaggagatcatccccatcaccgtccatgacaagagggagaacaccgtcattactaccgatgagcacgtccgccgggacaccaccctggagaagctggctaagctgaagcccacctttaaggccgacggccgggtcaccgccggcaacgcctccggcatgaacgatgcctcctccggcgttctgctaatggaggaggagctttccaaaaagctgggactgcccatcctggcccgcgtagtcgctgtggccaccaccggcgtttcccccgacctgatgggcatcggccccatcagcgccacccagaaggtgctggagaaggctggcctcaccgtgtccgatatcgacctctttgagatcaacgaagcctttgctgcccagtgtgtggcctgccagcgcaccctgggcatcgacgaggacaagctgaacgtcaacggcggcggcatttctctgggccaccctgtgggcgccaccggcagccgtctggtggtcaccctgctctacgagttgaaacgccggggcggcaaatacggcctggccaccctgtgcgccggaggcggcatgggtaccgccgtgcttatcaagatggcctgactgtgatacttccatgaaaaactttaccttttcctttcccacccaggtaatcttcggccgggatgcggaaacccatgccggggcactctctgccccctttggtcccaacgtcatgttgctttacggcagcgatcgcatccgccgcagcggcctgctgggcagactcaccgccgatttggaggctcacggccttacggtcaccctctttggcggtattcaggaaaacccggccctttccactgcggaggaaggccggcggctggccaaggaaaaaaagatcaccctgctgctggccgtgggcggcggcagtgtgatcgacaccgcgaaggccataagcctgggtgccaaaaacagcgtccccctatgggaactatacagcggcaaagcccaaactcagcgggccctgcccatcggcgtggtgctcaccaccgccgctaccgccagtgaggccaacggggtctctgtcctctgccacgatgtcctccacgaaaaggcggccctggacgagcctctgacccgcccccgcttcgcactgatgaatccagtcctcacctatacactaccgccccgacagaccgcctcctgcgcggtagatatcttttctcacgcttttgagcggtatttccacaaggggcagcagggcaccctccgcagccagatgtgtgcggcggtgatgcgcactgtgattacagagctgccccgggcgctggctcaccccgacagctatgatgcccgcagccaactgatgtgggcctccaccgtggcccacagtaatatgctggggtttgagggggactttgcctgtcacgccctctctcatgtgtttaccaccgagctgggcctgccccacggtgcggccctgggtatcctgatgaccgcatggtgcaagtatatgctcaccgatgaaaccgaggccattgccgacttctgcaccctggtttggcaggtcccctcctgtcccagccagattcaaaccgcccaaaacggcatctccgcgtttcaggacttcctctgctcgtcaggccttccggttacacttcgggaggctggtttgtgcgacgtttccattgagcacctggcgcggctggctttgcccgatatggcaggaacgctgggcggcaacttccgggccttggactacggcgcggtagtcagcctcctacagttggcccggggatagctgttgcaaagcaaaaatgcctgttgccgccgtgcaacggatgcgtagctatccttctgtccagggcctttctatcatgtaattttatcgtattttattggcatcaactttgctcttaacctatttgttgaacgaaatggagagagaggaggcaagtcttgccgccagcgcaagccggtacaacagagccaaggctgaccatctacagtacaaaagaggagtgagtaacctatgagtaaaaagagttcccaaatcgccagtgaaaatatgagcatgaagttctccaaaggctggggcatcatcctgtaccaggccctgatgttcttctttctgatcggcttttccattgacggcctgaacatcgtagctcccgccttcgccgagtccaccggcatcgcctacgaccaggtgctgggcgtggctacctgggccggcatgatcggtgttgtagcctatattctcatcgcccgcatcaacgtatccgtgggcccccggctgctgtcgggcgtctgcctgatcggcgccggcctgtcctacatttttctggggcacagcaccaccctgaccacctacttcattgccctgaccctggtaacctgctttatcaacggcgcagcctacatcgccggcaacaccctgattgcccagtggttccccaagaagaagggtctggccaacggcttcaccaccatgggccataactgcggctccgccttctatgtgcctctgatttccttcaccatcggcgctttcggctttgccaacggcatgagctacgtggcggtgggggccatcgtgctgggcatcatcggcctggttcttgtccgcaacaccccccaggagtgcggcatgtatcctgacaacgtgacccgcgaggtctatgagcgggagtacttccagggcaacagcgaggacaacggcggctggactgccggtaagctgctgaaaaccaaggagctgtggctgtgcgccctcatcatcggcatcaaccagctggtgaccaccggcgtcatgagccaactggtggtccgcaataccagcttgggcttctctcaggaggccgctgtgggcctgatgacggtgtgcgccatcatcggcgtgtgcggttcctacctcttcggcgccattgaccagaagttcggcgtcaaaaaggccattatcctcttcctgatctggtactgcatcgccttggccatcaactgtactgacaccacaatcggtgtgtatgtgtctgtagctatgatcggcattgccgtgggcgccgccgccaacttcatcgtgtccctgcccgcctctgtgttcggccgccatggcttcaccatggtcaactctgtgttcttccccctgatgcagattgtgctcatgaccaactaccaggttaacgccttcgccatccgggtcaccggcagcctgcggggcgcctacatcttctacatcggcctgcttgtggtcaacatgatccttaccgccatcatccatcccaccaggtacaacaaggacgtggctaccgagcaggagctgatgaagtaatccgttccccgcctatttcaatctctctctaagcagcaagggccgccggaataatcgggcggcccttgctgctttctatttgaatcagcttctgcggttttcgtagtcaatcccatactgcttgatcttgcggcagatggtagaggcgttaatattcagcttgcggctggcctcccgtagattggacgattccttcagcacctgctccagcagctttttctcaaatccagccactgcggtgttgaagtccaggtcctccggcggcagctcctccggctcctcttcctgtgcacactccacaattgcgggcgctgccggctgtggccccaggttctcctccggcacgttcagcagacctctcagcacatcgtcctcaatgcggccgataccggaactgcacaggatcaggtactccatcacgttctccagttcccggatgttgcccggccactgatagcgtttcatatagtcgatctgccattccgtcaggcaaaaggtccggtcatattttttggtaaagcgatgaataaagtgccggcacagctcctcaaaatcctctgtgcgctgccgcagcgccggcacagcaatggggatcacattgagccggtagtagaggtcctggcggaaactcccctccgccaccttcttctttaggtctgcgttggtcagtgccagaaagcggatatccagcttgatggggcgggttccgccgatgcgggtgatctcctgggactggatggcccgcaacagttttacctgtaggtccatgggcatatcgccaatctcgtccagcataagtgtaccgtggttagcgtactcaaacaggccgaccttgcccttggtgttggctccggtgaaggcccccttctcatatccaaagagctccgactccagcagatgtcccgggattgaggcacagttaatctttacatagggcttgttcttccgcaggctgcggcggtagatctcgtccgctaccacctccttgcccacgccggattcgccggtgatgaggaccgaggcatcggtgggcgccacccggtccagcagagtgtcgatctgcttcaaggagccgtatttccctatcattccctccgacagatgcttgtctgagtccgtggtgatggtcttggggtggatggcattgatttccttaacaaatgcctcaaaatcctcctgcaacgagctgagagtcacgatgggccggctgcaagccactacctggcgtaggctgccgtcctccttgaagatgggcgtccccaccacatagcccaccaacggctccccggtcttgtaagtggtggagagccgaaaggcgctcttcccactctccagcacactggtcaccgcgccgccggtaaacagtttgtccttgccaatcaggctacggacatcccgattaagcacgtcctcctctgtaatctctgtgttgcgggtgtaggcagggttgatgtacaacaccgtcccctccgcatcggtaatcatgatgctgtcatccagcccgtccaccacttctttaaaatcaatgccccggtcatgaaacgcctttaatcggacgtcaatctcctccaactgttcaatcagttccggtcgctggctttgctccattactgctctgagaagcctccgcacctctcgtatggccgaatactggttcattacgtttctcctttatccatcttttccatcggtacaaaggcgttcagaggttcagctccctgatttccgcggtcccctcccgctgtacgccacaggcattgcgatattccagatagccaaaacccagaatcaggctgtaataccggaccagtcctccactgtcctcactcccgttatgagtggatcacaaggatatggggcgcagtgacaaaaaacatgacgccgggattgcgggcccggctctcactccaactgcttttcccagtcgcttttgctgatgctgccagggtagagccgcctgctctgccatgcagtgctgacagccgcagcagccatcccccacacacaacgccgtcggccttctgctttatggccggcaatcccgattcatcaaaatacaggatcactgaagcgcagggctggatgcaccgggcacaataaacacacttgtgcgaatcaaccttaaaatgaaagccttacataggccctccttgtgtttcactaatttaacagcattacaactcgtttgtcaacgctcctccagaaaaatcacagacagggagaggattccacataaaacctattttaggaacaaacagaaacttctatatctttctgctttttactacttgttttctcaccggcgctgctgttgcatatttgcaataacagcgccattcactgtcccaatttgattccattttgcaacgccagattaaaataagccgtttgtagccttgtttaatgctcaaatatttggcacgtcgtttgctttattcttttcgtaaggacgcagtaaccatagacgccctggataacaaacaaagaaatgaggaaagtgacatgggcaatatcaaagcagtttttgtaggcaccggtatgatcggcgccggcttggctgccaacgccatgctgaacggttatcagacggttctctacgatgtggtgcctcatgagaaaatgcgccagaacatcagccatatcctggatattctagttggggctggcgccgccaccagagagcaggccgatgccgcactaaatgcctgtcatttctcgaatgatctggaggatgccgtgaagggcgctaatttcgtgcaggaatgcatccccgagcggctggaattgaaaaaatccacctatgccaccattcagaaagtcacgggtcccgacgccattatatgcagctccacctccaagctcttccccaccaagctccaggagggctccctctatccccaatctatcttggtgggccacccctataaccccgcctacctgctgcctctgatcgagctgtgcggcggtgagcagaccgcccccgaagccattgaaaaggccaaggagatttacactggcatgggtaaggtggccgtggtgtgtaaaaaagagatctacggctttattgtcaaccgcctttcctgggccgcactagatgccgccaaggagtgcgtgcgggacggcgtctgctctgtggaggacatggacaaggcaattatgttcggccccggcatgcgtatggcggtcaccggccagctgctcaccatcagtctgggcgtggaaggcggcttccgggccattgccgataaatacggcgaggagtcaaccccctggaatgaggtatacgcccaaggggttgacgaggagatcgccaaccgggatccctccattggcaacacggtcgacagtgtgtgcaaattccgggattacgccttcgccgagctgctcaagcttcataagcttctctaagtttgtttcagcgctgcaacaagcaattgtgtattgtcctatttctgcaacaacacgccccaaatccccctgcaatttagcaaaaagcggctcattacacttggcatcagccttgcataatccattgatggaaatagagattaccaagaactgaagggagaactgagtatgtctgacaagaaagcgctggttgctctggccaaagaggccagtattcaggacagcgtcaccaaggtctttgacctgatgggcggcgtaacaaacatgatcaagcccggcaccactgtaatgctcaagcccaacgccggccacgcttcccccgccgatacttcggtctgcaccaatcccgaggtcgtccgcgcagtcatccgcgaagtcaagaaagccaatcccaagagcattgttattgccgaggctgccgccatcggctgcgataccatggaatgctatgaggtctctggcatagccgatgtggcccgcgaggagggcgtggagctctacgatattaaggccgacaaggacctgatcaatgtggctgtccgcggctaccgctccaacctccatcatgtcaagctgccccgccgcctgctggaggccgatcatctcatcaacctgcccatcctgaaggcgcacgccagcatggtgttctcctgcgccctgaagaatattaagggtgtggtgcaggatgctgtacacctgcagatgcaccagcagaatctgaccatggctatgatggatgtgtggagcgtgtgccgcgcggatatcaacatcgtggacgccatccgtcccgccagcggctactccccccacacccccgttcccattgaagtgggctgcatcctggggtcctccgatcccgtggccgtggacctgatcgcctgcgatctggtcggcatcgacgccgaggcggtggattacttccgggtggctgccgagaccggactgggtatcaccgagcgggagaacattgacgttgtgggcgccaccgtcgccgaatgctataagaaaatgtgggttccctacatcggtgatatgagcacccgttggcccgagtacaaggtgctgtgtgatggcgcctgctccagctgtcaggcgttgctggccatcaacatggagactctgaaggccatcggcgactacgagcgccgctccgacttcgtggttgtggccggcggaaaaaatgaagtgcccgacgaggtacccgacgagaagctggtgctccacggcaactgtacccgcaaatacctgaagaagcaccccaacgccatccacatcgagggctgccccccctctgagcctctgctgtatatgtccatcagcaacggcgagctggtccacggcaagggcggccagatgagcgagtacatccgtccccgtatggctgccgaccagcccgtgtggcgtaagtacgtggaggagcaggctcagaagttctacggcagtcaggaaggttgatatggcttttcaatatgtggactacccccagaaaatgaaggacctgctgatgcaaatctttgacgattccttcatgcaggccaatacccgtttccagtcctttgagggctttcgctactccagcgctgtctttgtaaactggaattccgactgtctcatctatgacgacgcgcttttggaccgtttcgtgcaggagagcacccgcttttccacctgggatgagatgatccagaccgccacagatcttcattttcagcccgccgtctgttcctgattttgttacaactcaattttaatcataaagaaaaggagtcttatactatgggcaagaccgtacttgttgacctgtcccatcccttcggccgcggcaatcccctgtggccctccaacggcgacttccacatcgaccgtgtgca

SEQ ID NO: 4356 - DNA, 206 bp, Unknown
  gut microbiota DNA sequence
gccagcagccgcggtaatacgtaggtggcaagcgttatccggatttactgggtgtaaagggcgtgtaggcgggaaggcaagtcagatgtgaaaactatgggctcaacccatagcctgcatttgaaactgtttttcttgagtgctggagaggcaatcggaattccgtgtgtagcggtgaaatgcgtagatatacggaggaacaccag

SEQ ID NO: 4357 - DNA, 820 bp, Unknown
  gut microbiota DNA sequence
ctggtcctggatcaccaccggcttgtggtattcctccagaacagcctgaagttccgggcagtcctcatgggcattgactatctcggagatacaccaggggcgcaccaccagatcctttgccaattcttctttcatccggcggatcttcaggcggcagatctgctccttgccaaagcgtccccagcctttgtcactattgcgttcctcctcggtgaccggccaatccagccgctcctctttggtgctgaccttgccggtgtcacagaacatgatacccagcgtcacaacggtcatttcccaaaagttgcttttccagttaaatccgcccccaatgcagcgattgatcagagcgaccacttcctgctcctcgggctcgtacatctcatagaattcttcaaacatcggtgtagcctcctttacagcagttccagcacctcggcagcgggcttggaaaactctgccgggacttgctccaatacatcctggtaggctttcaccgcttgccaggagtagtaatagaagctatagaacaggtcatcggggaaaacctcgtcctcctcgtagcgcatctcatcttcttcctcgtcgtattcctccgaccacaggtattcttccttcagcagatcggagaacagcggcagcgcctcggcgtgctccatatcatctccatcgtggaagcactggaggatgcaggcaaagaagtccagcagttccccggccaggaaatgggccacagagttctgcccgctctctgcgagggccttctccagaattcggcacaggaacaccatgccaaagggggtagcgtgccacagagtac

SEQ ID NO: 4358 - DNA, 34136 bp, Unknown
  gut microbiota DNA sequence
cgcctgacggaggagagcaagcgggagctggttcgggccttggaggcccggcggccggctcccagacggcaaatacccctgcggcgtgtggcggccctggcggcctgcgcggggctggtgctgggactggtaaattatcaggccgtagccgccgggacagagcgggtgatccgttacttcctgggggtgggggcggcggaggagaacctctccctgctggtgcagggggaggcactccacaaggaggacggggcgttcctctaccgcatcggcggggcctatcagcgggatgggatgctcactgtgccggtgagtgtttttaccagagagggggcgctggccgagggggaggagctgcgctaccgcctgctggtatacgacgccgacgggaagaagctgcggcgggtgtcctcttactatgacgacgccaagggtgagatgtcggcccccgtttttttaacagaggggacgacataccaccccagccgcctggatgtccttgccgactggatgagccgcacctattgggcccagggctacacggagggcgaaaccgagatctatcacatggaggtgcccgacggggcgaaggggccctataccttcgacgtggaggtgtactccaacgacgtctcccatctgggctaccagcccatgtgggaggggggcgtcctggccctggataccccccagactctggacgccgtctccgtcagccgcaccttccgggagggtaccgtcaccgccctggtgggggacgacgggcacagcgtggctttctatggggagctgagccccgccctggcggcccgggaggagaagctgcaacagctatgggtgcccatgctctattctgaggatgaggcgggccgtgtccagcctgtgccggcgatatggttcatcgacgaggcgggcaaccgctatcggggctgttctatctggcacatgcccgccgcgtgggtcaccgatgaggcgggcaaccgctacgagcgataccgggtcttccccggcccggcggaggagtactggccggagttccggctgctggaggagccagaggggaagattacggctatcgaggtggaggcgctggttttcaacattctgcgcaccgaccggccgcgggaggtggagacccggtcgtatacatccacttatgacccgctgaactgggtgatcgagctgccctagatcacacacccgcccggcggggctccggccccaccgggcggagcagcctttcacatgcgctttccctccgaaacgcttggcaaaagcgtttaccggcagactcacccgccaggggggttgtcctcttttccgccatagacaaaatcctatgggcggcgtataatatccccatactacatagattggggaacggtcatggacacgaatgccaacaataaccgtgaatccttcgaggatcagcaggtcatttttgtggatacccatctgattcagaaggcggtggagggactccagcgcgcccgcgaggagttccagaccctgctggagcaggcggagggcggagacgcctccgtctattacgaccttggcgtgcgctataccgagggcgacgggaccgacaaggacccggcccaggcggcccgctggtttgccctggcctcggaggacggggatctccgggccaccgacctgctggggcgctgttaccagtctggcgcaggggtggagaaggacgaggcccgtgcggcggagctctttcagcaggcggcggagcaggactacgcccccgcccagtgcgacctgggcctgagctatgagaacggctccggcgtggagaaggacgaggcccgtgcggcggagtgctacctccaggcggcggagcaggattacgccccggcccagaccaatctggcggtgtgctacttcaatggaatcggtgtggacaaggatgtggagtgcgcccaccagtggctggagaaggcggcggagcagaagtttccccgggcgctgaacattctgggcgactgccactgggacggcaccggcgtggagcaggaccggggggaggcggcccggctctaccggcaggccgccgagcaggactatccccccgccctgtgcaacctgggcctgtgctatgagcacggggacggcgtggagcaggacaaggccaaggcggtggagtgctaccggaaggcggcggagcaggactacgccccggcccagtgtaatctgggcgtgctcacgctccacggcgtgggcaccgaggccgacccggccgcggcggcggagtggttccgccgggcagcggagcagagcttcgcacgtgcccaggatctgctgggcgactgctatctggacggcaagggcgtggaggccgacccggcccgggcggcggagctctaccggcaggccgccgaccagggctacgccccagcgctgtgcgacctgggcctgtgctacgagaacgccaacggcgtggcggaggacaaggtccaggcggcggagtgctatcggaaggcggcggagcaggactacgctcccgccatgtgcaacctggcggtgtgctatctcaacggcatcggcgtggaggaggacatggcccaggcggtggcgtggttccagaaggcagtggagggcggctccgcccgggccaagagcatcctgggggacttctacctggatggccgtggggtggagcaggacaaggagagggccctctccctctaccgggagtctgcggcggacggctacctgcccgccatatgcagtctgggcctgtgctatgagaccggcgacggcgtggcggaggacaaggcccaggcggtggagtggtacaccagggccgccgaggggggctatgccccggcccagaccaatctggcttactgctttctcaccggcatcggcatggaggcggcgccggagaaggccatcccctggctggagaaggcggcggagcagggccaggcccgggcccagagcctgctgggaagctgctaccgggacggcgacggcgtggaggccgacgcggcccaggcggcggagtggtatggaaaggccgccaaacagaactatccccctgctatgtgcagcctggggctggccttcgagctgggggagggactgaccgaagacccggccaaggcggtgtactggtacaccaaggccgccggggagggctatgccccggccatgaccaatctggccgtatgcctgctcaacgggaccggcgcggaacggagcgcggaggaggccgtaggctggctggaaaaggcggtagagcaggagttcccgcgggcccaggggattctgggggatctgctgctcaccggcaacggcgtgcccgaggacaaggcccgggccgtggagctctaccgggccgccgccaagggcggctatgtgcccgccatgtgcgacctggggctgtgctatgagaacggggatggcgtggaagaggatctgcgccatgcggtgctgtggtaccgcaagagcgccgaggagggctatgccccgggccaatgcaacctggcggtgtgctacctcaacggcaacggagtggagcgggacgcggccgccgccgtgcggtggctggagaaggcggcggcccaggggaatgcccgggcacagagcatcctgggcgacctgtgccgggacggggagggcaccgaaatggatgcggcgcgggccttccagctctatacccaggcggcggagcagggctatccccccgcccagtgcgccttgggctactgctacgaggtggggagcggcacggcggaggacaagaccaaggcggtggagtggtacgaaaaggccgcgcagcggggccatgccaccgctcaatgtaatctggcctactgctacgagcagggcatcggcgtggcggaggacaagaccaaggccgtggagtggtatgccagggccgccgagcaggagcaccccagggccatgtgcaacctgggcctgtgctatgagtacggcgagggtgtggcggaggacaagactaaggcggcggagtggtatgagaaggccgcccggcgggggtatgccccggcccagtgcaacctgggcttcttctatgaccggggcgtgggcgtagcggaggacgccgccaaggccgtggagtggtacgagcgggcggcggagcagggctatccccgcgcccagtgcaacctgggctactgctatgagagcggcaagggcgtgaaggaggacaaggcccgggccgtgaagctgtaccgccaggccgccgaacagggcagctccgtgggccagtgtaacctgggctactgcatgctcaaggggatcggcatacggcctgacccggcgcaggcggtgtattggttccgaaaggccgccgaaggcggctccggccgggccatgtgcctgctgggtgactgttaccgggagggccagggcgtggaggccgacgcggcacaggcccggacgtgctaccaaaaggccattgacctgggcttcgacgccaaggaggagctggaggagctggacaaggccacccccgccggagcggcggaacagccgaagaaaaagaagtccttcctgggccggctgtttggaaaataggacaaaatcaatcgcgggccgcaggcattgcctgcggcccgcgattgtatgacccccggccgggcggggcggccgcctccctcagccgatgcgtccgaagtcggagaaggggaagcagatgaactccgccttgcccagcagatagcgcgtgtccacggtgcccagggtcacgtcccggctgtcgttggagtggttgcggttatcccccatgacgaagaccgacccctccggcaccgtcacggaggtgagatcctcataccagggctcctccatgggctcgttcagatagggctcgtccagggcttcgccgtccacatagacggtgccggtctggtagtcgatgtccaccgtctggccctccacggcgatgatccgcttgacaatgggccccctggcggcgtcaaactccttggtgagcaccacgatgtcccccggctggggatcggtgtagccgatgtcccggatcagcatcacatccccctcgtggagggtgggcagcatggactcccccaccaccggggtgatgcgccccacgaaggtgaataccaggatgatggtcaccagcgccacaatcaaaatctgaagccactcgtaggcatcctgagcgccgctgaggggcttttcttcttttttcggttttttcatgggcaaactccccgctttcgacaaaggaggggctgtccagcagcccctcccgtgcgtatcttatttcgcgtactcgatgaccttggtctcccggatcatgttgaccttgatctggccgggatactccagctcctcctcgatcttcttggcgatgtcccgggccaggagcaccatctgatcctcgctgaccttgtccggggccaccataatgcgcacctcgcggccggcctgaatggcgaaggacttctccacgccggggaaggaggaggtgacctcctccagcttctccagacgcttgatatagttctccaggttctcgcggcgggcgccggggcgggcggcggagatggcgtcggctgcctggacgatgcaggccacgatggtgcggggctccacgtcgttgtggtgcgcctcaatggcatgcacgatgtcctcgttctcccggtacttccgggccagctccacgccgatctgcacgtgggagccctccacctcgtggtcgatggacttgcccaggtcgtggagcaggccggcccgcttggcctgggtcacgtcggcgccgatctcagcggcgatcagccccgccaggtgggacacctcaatggagtggttgagcacgttctggccgtagctggtgcggtagcgcatgcggcccagcagcttgatgagctcggggtgcaggccgtggacattggtctcgaacacggcgcgctcgccctcggccttgatggtggcgtccacctcccgcttggccttctccaccatctcctcgatgcgggtgggatggatgcggccgtcctggatgagcttctccagggcgatgcgggcgatctcccggcgcaccgggtcgaagcaggagacggtgatggcctccggcgtgtcgtcgatgatcagatccacgccggtcatggtctccagcgtgcggatgttgcggccctcgcggccgatgatgcggcccttcatctcgtcattgggcaggggaaccacagagacggtggcttcggccacatggtcggcggcgcagcgctgaatggccagggacaggatctccttggcgcgggtgtcggcctcctccttgaactgggcctcgatctcccgcaccttcatggccgactcatgggtgacctcctcggcaagctggttgatgaggtagttcttggcctcctcggcggtgaagccggagatgcgctccagcacctccatctgggtcttcttgacggtggccacctcgtcccgggcctcgtccagctcggccagcttgcgctgcagggtgtcctccttcttctcgatgttctcggtcttgcggtccaggttctcttccttctgctggagccgccgctcctgcttctgcaggtcggcccggcgctccttcacctcgcgctcatactcgttgcgggcctggagaatctcctccttggcctccaccagcgcctcccgcttcttactctcggcgctcttgatggactcgttgatgatgcgcttggcctcctcctccgcactgttgatctctttttccgcggtgcgtttgcggatttgaatgccgatgggaatgcctatgatgagtgcgaccacggccgtgatcacacaggcgatgacagtctgcatcaagggttcaacacacctccatatcttggattttcaaagttctttttcatgaaacggatgcacgcgctcccgcccgctcttgggcagagcgcacaaaatttgaagagcttacccctcgttcttcaaaatattacaccttatctattttaagtctgcggcggccttctgtcaagaacattcctgttcggaatcaatttctgcggccctgggcctcaaagggatcggggcagggagtcgtcctcccgcacccagtcggccacctccaccacccggtactccgtgcgggtgtcccggatgaccacccgctcgatgccggcgttgatgatgaggcggcggcacatggagcaggaggtggagccgggaatcagcgccccggtgtccggctccacgcaggccatgtagagggtggcgcccagggtttcgcggcgggcggcggagatgatggcgttggcctcggcgtggacggagcggcacagctcgtaccgctccccggatgggatgttcagcgcctcgcgggtgcagtagttcagatccacgcagttgcgccgcccgcggggggcgccgttgtagccagtggagatgatctcgtcgctcttgacgagaatggccccatagcaccggcgcaggcaggtggagcgcccggccaccgtctgggcgatgtccagatagtaattctccttgtcgatgcgtcccataaacgcccctcccatgcttttttaccagtataccgggttttccgccgtcccgcaagccccggaatggctgtcccgggcggacaattcacatattgtttacgtttccttccttgacgaagaaacagggaggcgctatcataagttcagaaaaaatttatttttaacttcaaaggagacgaccgtatttcatggtgatgaacttcattcgaaaattgatgtacggccggtatggaagcgaccagctctcctttttcctcctcgtggtctatatcgtcctcattcttctgtccggcctgccccacctggaggtgctctcctggctggcgctggcagtgctcctgtgggatctgttccgcatgttctcccgccgtatcgaccgccgccgggcggagaacgcccggtttctggctctggccggacccgccatacgctggctgcggatgcgccgtaccatccgccgggacaaggagcaccgctacttcaagtgccccaactgcggacagtatctgcgggtgccccgggggaaggggaagatcaccgtcaactgccgcaactgcggcgccagctttgaggagcggagctgagctttcaccggccgggaccggcgcgccttgccgcgccggtcccgctttgcctttacaggcgggcgaaaagctggtatcatagcaaagaaagtgggtgaagccattgagacagtgtatggatgcggacaacctccaccgcagactgaaaaagatcatcgggcagttgggcgccatcgacaagatggtggatcaggacgtgccctgtgaggacatgctgatgcagatcaacgccgccaagagcgcactgcacaaggtgggacaggtggtgctggaggggcatctcaaccactgcgtccgggacggcatcgagcacggagacgcggaccggaccattgcggaattcgccaaagccatcgagcacttctcacgtatgagctgacgctgatgcggcccgtttgggccgcttttttcttgacaaataatacccgtgggggtataaatatacctatagggggtatgggtatatgaaacgggatatcacatttcttgcgctgggagggggttccctcctgttgagcttttttgccccggcggccctgccggtgaacccggcgtggctggccatcctgctctgcggcgcgcccattgtcagggaggcggccgtggggctgttcacccgctttgacatcaaggccgacgtgctggtgtccctggcgctgctcgcctcggtggccattggggagatctttgccgccggcgagatcgccttcatcatgcagcttggctctctgctggaggagcggacggtggccaaggcccgggcgggcatcgaaaagctggtccggctgacgccccgcaccgcccggcgggtgaccgccgccggggaggagagcatccccgccgaggccgtggcggtgggggaccggctgcgggtgctccccggagagaccattccggtggacggggtggtgcgggccggacagacctccgtcaaccaggcggtgatgaccggcgagtccctcccagtggacaaggggccgggagacgaggtattcagcggcaccgtcaaccagttcggctcctttgagatggaggccgcccgggtgggggaggacagctccatccagcggatgatccgcctggtgcagtcggcggatgcgggcaaggcgaagatcgtgggcctggccgaccgctgggccacctggatcgtggtcgccgccctcgcttccgcagccctcacgtggctgctcagcggtcaggtgatccgggcggtgaccatcctggtggtgttctgcccctgcgccctggtgctggccacccccaccgctatcatggcggccatcggcaacgccacccgccacagcttcctggtgcgggagggggacgccctggagcggctggcccaggtgggcaaggcggccttcgacaagacgggcaccctgacccgcggcgtgcccgaggtgacggcggtgcgcagcctgtcccccggcgtgacggaggaacaggtctacgcctggctggcccgggcggagctgggctcggagcaccccctgggcaaagcggtggtcagggggtggcaggccgccggaggcgggacgcccgccccggcggaggccttcgaggccctgcccggccggggactccgggcggtgctggacggccataccgtcctggcaggcagcgaggccctgctggaggaggcgggcgcggcacttcccccggcggccagagcggaggcggagggttttctggcccgggggtgcaccctcatctatctggcggtggacggggcccccgccggcttctgcgccctggcggacacggtgcggggagaggcggcggccatgctccgggccctgagcgcggagggggtgtccccggtgctcctcaccggcgacaacgagaacgccgccgcccacatcgcccggacgctgtccattcgggagtaccgggcgggctgtctgccggaggacaagctcaactggatcgaccgggcccagcagacgggcgtccggatctgcatggtgggcgacggcatcaacgacgcccccgccctgaaaagggcctttgtgggcatcgccatggggggcgtgggcagtgatatcgccgtggacgccgccgacatcgttctggtcaatgaccgggtagaggagctgccccacctgctggccctgtcccggcggatgatgaccaccatccgcctcaacctggccttctctatggccctcaacctagtggccatcgtgctggccatgaccggcgtcctcaaccccgtggtgggggccctggttcacaacgccggctccgtgctggtgatcctcaactccgccctgctgctgaaatggaggagaaggagctgacgccgcggggagcatggagcatatggaaaaacagagccgccgccccgactggggcggcggctctgtgctgctatccgacggtgccctgtatggcgctctcggccagggccagatcatccttgtgcacatataccgtgtactcgaagggggctacgccggcccccagatggagggctgggccggaggttccatagccggagaatccgcccaccgggcggctgtcctgggtgatgacaaactccaccccggcatcctggagggcggcgcggagctgtccgacctcctgggcgttgaaggtgttgcagagcctgcggcgggcgaggaggggaatcgtggacatgacggcacgctcctttcgataaaaagagacctcttccgacggccgcccacgggcatttttcagttgagggtgccctgaagggcggcctgggccagctcaaagtcgtcctcatggacataaataatgtattcaacggagggggggaccaactgcaggccgatgccgaaaaaggaaccgttctggcggtcctgctggatgacaaactccacccccgcgccctggagggcggcgcggagctgtccgacctcctgggcattgaaggtgctgcagagcctgcggcgggcaaagaatgggatactggacataacggcgcactcctttccacagaaaaggccttgtttccaaccgacgcccgcagggcggccccccaaccgcgagcccaacaacgtgggtcgcggttggaggcgaagaaccgcccggcccggctaagaggtttcgccatcccggcggaacctcgtgccaaaagggcggttctgagcccgtggcgggggcgggtgcgaatcgaacacaccaggacgggagcgccgtccccgtcggttttgaagaccggggggcccaccagcggcccttccgcccccatatccactcccatcatagctggttttccaccgcgggtcaagcagatgtggaaaaaatccggccctctccctgccggcgggtgacgccggaggcgtcccagtgctccagcaggagcagggcgcaccggcgggaacagcccagggcatccctggcctcggccagggaaaagggggcggggccgaagcgcccgcgcagccgggcctccgccgcccggacggccccggcgtggagcagatggccgggggagagctccagcaggacgccccgctccttcaggcggcggcaggcccgccgcgcctccctgatccgcccggcaaagcggggctccacccgcgcccaggggggcggctccaggccgtaccccagatagagggcctccagctccccctccgcctccgccgacggggcgggggccgccggagccgccggggcggcgggggattccgccgccaggaggggccgcccctccgccagggcggccagccgggccagccgctccggggccatgcggcccttgcggggcggcaccagatccaccagtgagccgcctcccaccgtggccaggggggagaagaagcgcgccacgaaccggtcgccgggggcggcggcgacgggctgggtgaagcggagctgggcccaccccgcctcgccggggcggagcacgtcccgccccaggaggatgcagcggcacaccagggcgcgggcgccgtggtggaagtggagctgactgccggtgcgcacggggaagggggcgtcggggagcacccccagggacacgtcggcccggtcggtgagggtgagtgcgccgggagcggccagggtgtccccccggcccacgtcccgcaggcgcacccccgccaggttcaccgccgcccgcaccccggcgggcagcgcctccgccgggacgccgtggcactggaggccccgcacccgggcggtctgccctcccggatagagctgcaccctgtccccccggtggagggggccgccggtgagggtgccggtgaccaccgtgccgctgccgtccacggagaagacccggtccacgtggagccgggggctgccctccggcgggggcggcgcctgccgggccatggccgccagggcggcccgcagcgcctccagcccctcgccggtgacggcggagacgaagatccggggggctccctccaggaaggtacccgccgtcagggcccgggtgcgcgcctccgcctccgcccgggcggcgggggaggccagatccgcccgggtgagggcgaccaccccccgctccaggcccagcagggagagaatgtccaggtgctccgccgtctggggcatggggccctcgtcggcggccacggtgaagaccgcgccgtccagcccgccgcagccggagagcatggtggggatgaactgggcgtggccgggtacgtccaccagggagacccgccccacccccggcagctccaggggggcgaagcccagctcgatggtgaggccccggcggcgctcctcggccagccggtcggtgtccaccccggtgagggcccgcaccagggcggtcttgccgtggtccacatggcccgcggtgcagaagatcatgcctttccctccctccacgccgccagggcggcggcgatctccgcctcgtcgccgggcaggagggtgcgcacgtccagcaggagcttcccccggtggatgcggcccaggatgggcacccgccaggcgcggaggtgggcctccagcgcctctgcgggctccagggccgccgcccaggtagggaggctctcccccggacgggcgccgccccccacctccccctgggtctccaccgccgtgcaggggtggaggggggagagggcctctgccagggcctccgcccgccgccgcagctcctccggcggggcggagagcatggcggacaccggcaccgccgtcccgtcccgccagtccagcagggtggactctagggcggccagggccagtttgccggggcgcagggcgcgggagagggggtcggcccgcagacggccgagcggttccgccttccccagcaaaatccccgcctggggcccgcccagcagcttgtccccggagaagcagcacacatcggcccacgccaccgccccggccagctccggggagccgggggcggcggagccgagatcgcagaacaggggcacgccccggttccgggccaaggcacctagctctggcagggaggccgcctgggtgaagcccacgatgcggaagttgctggggtgtaccctgagcagcacctgggcctcccccgcgtccagggcggcggcgtagtcggccgggcgggtcttgttggtggtgcccacctccaccagccgggccccgctgcgggccaggatgtcgggcacccggaagcccccgccgatctccaccagctccccccgggagatggccaccccccgccctgtcgccagggcggagaggaggagaaacacggcggcggcgttgttgttgaccaccagggccgcctccgcgccggtgagggcgcacaggagggactcgacggccgccccccggcggccccggcggcgggcggagaggtcgtactccaggttggaatagccccgggcggcctctcccaccgccgccgccgcccgcggactgagaggggcccggcccaggttggtgtggagcaccacgccggtggcgttgatcacccgccccagggcgggccgggccagctccgcgccccggcggaggacggactgctccagctcctccaggccggggacggcagacagcgccccggcgcgcagggcggcgcggtactcgtccagcacctggcgggccgcctgccgccgcagggcgtagggcagggggctgcccgccagggcggggcgggcgagaagcagatccattttgggcagcgcacgcagcagttccggcttcacagagatccctcccgggtgtcatttggctagagtatatcacattttttcagacgagggggtataaactgcatggttttcagaaaaacgggtacaaaatacggtaagacaaggaaacattttcattgacaggacacttaccaaacggttatgattggagaggtcaaaaagcaaccgattccggcctgccccgcctcggggccgggccgatacagaaagggacagagagcagatgagaggtgtcgaaacccgtatccaggagatccgccaccgggtgttccgggaggtggcccgcatggcttaccacacggagtggccggtggacaagcgcattgagagcctgccttacaagatcatcccgggcgaggtgggcaacttccgcaacgacgtgtttttggagcgggccatcgtgggcgagcggctgcggctggccatgggcctgccctgccggagcgcggcggagcacgccccgctctcggagaatatcgaggcggccgaccggccggagacctactacacccctccgctcatcaacgtcattaagtttgcctgcaacggctgcgcggagaagcgggtgctggtgaccgagggctgccagggctgcctggcccacccctgcgaggaggtctgccccaaggacgccatcaagctggaccgttacaacggccgctcccacatcgaccccggcaagtgcatcaactgcggccgctgcgccgacgtgtgctcctacaaggccattatcattcaggagcggccctgcgccgtggcctgcggaatggacgccatcggaaccgacgccaatggcaaggccgagatcgacccggacaagtgcgtctcctgcggcatgtgcctggtaaactgccccttcggcgccatcgccgacaagtcccagatcttccaggtcatccgggccatccagtccggcgagcgggtttacgccgcggtggcccccgccttcgtgggccagttcggccccaaggtgacccccggcaagctccgcgccgccgtgaagcagctcggctttgccgatgtctttgaggtggccatcggcgccgacctctgtgccacccaggaggcggaggacttcgtccgggaggtgccggaggagctgcccttcatgggcacgtcctgctgcccggcgtggtcggtcatggccaagaagctccaccccgaccacgcccactgcatctccatggccctcacccccatgaccctcaccgcccgcctcatcaagcacgagcatcccaacgccaaggtggtgttcatcgggccctgcgcggccaagaagctggaggccatgcgcaagagcgtgcgcagcgaggtggacttcgtgctcacctttgaggagatggcggggatctttgcggccaagcatgtggatctgaccaccatcgaggaggatccggacggcgtcaacgatgcctctaccgacgggcgcagcttcgccgtgggcggcggcgtggccaaggcagtggtcaacgttatccagcaccgctaccccggccgggaggtcaaggtgaccagctcccagggcctgcgggagtgccgcaagatgatgcaggaggcggtggcaggcaagtaccccggctatctgctggagggcatggcctgtcccggcggctgcgtggccggcgccggtaccatgcagcccatcaagaagtcccaggccgccgttggcctttacgcccggcaggccaagcacaagacctccgacgaaaccgagcacatcaaggagctggacaagctggtggactgagcagagcaaaacgaacccccggaaccgcgtcggttccgggggttcgtttattccttgcaggccagacgcttgtgcacatcccggcggagcagggcgtagagcaccgaggccacgggcacgctgagcagcacgcccaccaggccgcccacgccgccgccgatggtgacggcggccagcacccagatgccgggcaggccgatggaggtgcccaccaccttgggatagatgacgttgccctcaatctgctggagcaccaccaggaagaccaggaagaccagggccttgatgggggagaccatcaccagcagcagggcggacacaatggccccgatgtaggcgcccgccaccgggatgatggcggaggcgccgatgatgacgccgataagaggggcgtagtcggcctggatgaagagcatccccgccgcgcacagcccgcccaggatacaggcctcgatgagctgcccggtgacgaagcgggtgaaggtgtcggccgtcaggtggaccacatcggtaagggggtcggcaaaccgggcgggcacataggcccgcagcacccggcggcactggctcatgagggtgtccctgccggagagcatatagatggagaagaccagggagagcaccccggtgaccaccatggagacgatgccgctggtgagctccagcaggtgggggcccaggtcggacaggaagcccagcacgtagttaaacaggtttttgagcacatcgttcaggccagacaggtccagcgcctccacatccaggtggaagtaggcgatgatatcgttgtaccagccctggacgttggccaggtagccccccaggttgagggcgaaggtctggatgctctccaccagcttgggcaccacaaaggaaaagatggcggcgatggccagaatcagcaccagataggaggtgaccaccgccagggggcgggccgcccccctggcccgggtgcgggacagccctcgatcatagaggcggaaaaagaagtggcagggccggttgaggacgaaggccagtgcgaagccgatgagcagcggcttaaccagccccagcacccatgccaccccgccggcgatcaggcccaggcggctgagtaccatcaccagtaccaccgtataggtgatgaggagcagaatgcttttgaacagctttttatccatgctatctcccaatttcatataatctgcctccactatagcattggcgggcggggccagtcaacggaatccgggcgatttaagcaaagtttaatgaaatgttccgcctccataaaaatttccttgacaaagtggcctggcaggcctataatcatagtaaacatataggaattaagaagttttgaaaggagcgtctctatgtcgcacttcatttacgccgaccatgcggccaccacggctgtctccgataccgccctccaggccatgctcccccacttcaccacggcctacggcaacccctccagcctgtaccgctttgcccaggagggcaagaccgacctggagcgggcgcgggcggagatcgccgcctgcctcaacgcccggccggaggagatctacttcacctccggcggtacggaggcggacaactgggccctgcggggggtggccgagctcatggccctgaaggggcggaagggcggccacatcatcacctccgccatcgagcaccacgccgtcctccacaccgcccagtatctggagaagcagggctatgaggtcacctacctgccggtggacgggcgggggctggtggaccccgccgccctggagggggcgatccggccggacaccattcttatctccatcatggccgccaacaacgagatcggcaccatagagcccgtcgccgagctgggccgcatcgcccgggcccacaaggtgctctttcacaccgacgcggtgcaggccgtgggccatatccccgtggacgtggaggcgtggaatgtggatctgctctccctgtccgcccacaagttccgcggccccaagggagtgggcgccctgtacgtgaaaaagcccctgcgcctgcccgcgctcatccagggcggcggccaggagaagggccgccgctccggcaccgagaacgtccccggcgcggtgggtatggccgccgccctgcgggaggcggtggacggcctgagccgggagtccccccgcctggccgccctgcgggacaggctcatcgacggcctgaccgggcttccctacacccgcctcaccggcgacccggtgaaccgcctgcccggcaccgcctcctttgtctttgaaggggtggagggagaggccctgctgctccacctggacgctaggggcatctgcgcctcctccggctcggcctgttcttctgcgtccctggacccctcccacgtgctgctggccatcggcctgcctcacgccattgcccacggctccctgcggctctccctgggcgcggagaataccgaggcggacgtggactacattttgaaggaagtgccccaggtggtggcgtatctccgggagctgtcccccgtatgggaccgggacgcacagaagcccacctgggagctgtaactggaaaggagaaactgctatgctgtattccgataaggtgatggaccactttgagcaccccaggaacgtgggggagatagaacatgccgacggggtgggccaagtgggcaaccccaagtgcggcgacatcatgaagatgtacctgaagatcgacggggacgtgatcaccgacgtgaagttcaagacctttggctgcggctcggccatcgccacctcctccatggccaccgagatgatcaagggaaagaccatcgcggaggccatgaccctgaccaacgccgccgtggcggaggctctggacggtctgcccgcctacaagatgcactgctccgttctggcggaggaggccatcaaggccgccctggccgactactaccgccgccagggccgggaggtgcccgaagccctccgcctgccctgtgaggatgaggagcacggctgctgctcctgcggccactgagccaggacacgcaaggccccggaatcgaagcggttccggggcttttttcttgacagagggcggggcttgtcataaaataggacggaactttgtgagaaataagggagtatgggtccgtgatcgagttaaaacacatttccaagacctttcccacggccgacggcgtgtttcaagccctggacgacatcaatctgaccatccgggacggggacatcttcggcatcgtgggcatgagcggcgcgggcaagtccaccctggtgcgctgcatcaacctgctggagcgccctacagcgggccaggtggtcatcgacggacaggatctcatggagctgtccgccccccagctgcgggagaagcgccgctccatcagcatgatcttccagcagttcaacctgctcatgcagcgcacctgcctgggcaacatctgcttccccatggagatcgccggggtgcccaagggggaggcgcgcaagcgcgccctggagtatctggacatcgtgggcctgcccgacaaggccaacgcctacccggcccagctctccggcggccagaagcagcgcatcgccatcgcccgcgccctggcctccaatcccaaggtgctgctgtgcgacgaggccacctccgccctggaccccaccaccacccgcagcatcctcaagctgatccaggacatcaaccggcgcatgggcatcaccgccgtgatcatcacccacgagatggcggtggtggaggagatctgctcccacgtggccatcctggagcgcggccgcatggtggagaccggtacagtggaggcggtgttctccaaccctcagaccgaggcaggccgccggctggtgttcccggagggggccaacatcgacaagtttcccgtggcgggcgtggtgcgggtggtgttcaacggcggctcctcctacgagcccctcatcgcctccctggccatcgactgcggcgtgaaggtgaacatactgggggccgacacccgcaacgtaaacggcaaggccttcggctccatgctgctgggcctgcccgaggatcatggagaggctgtccgtgccatgaactatctgaaggcccagaaggacgtcaccgtggaggaggtgcccgactaccatggataaatttatgcagcagatgcgcgaggccttcgccaacgaggccctgtggaaggagttccagactggtatctgggacaccatctactccaccgtggcggccactctggtggcctgcgtcctgggcattatcctgggcattatcctggtggcgggggaggaggacggcgtgcgccccctgcccggcccggtgatgaaggtgctcaactttgccatcaacatcctgcgctcggtgcctttcctgatcctgatgatcatggtgcttcccctgagtgagctcctggtgggtaccaccatcggcactgtggcctccatccctcccctgattatcgcctcggcctccttcgtggcccggctggtggagacctccctgcgggaggtggacaagggggtcatcgaggccgcccagtccatgggctgctcccccttccagatcatctggaaggtgattttgccggagagcctgccctccctggtggccagcttcaccaccgcgtttatcaccattctgggctacggcgccatggccggcgctatcggcggcggcggcctgggcaagattgccatcaactacggctattataaatacaactatgcggtgatgctcatcgccgtggtctttattgtgattttggtgcagattttccagtcactgggtacctccctggccacccggacggaccaccgcatcaccaaccgggctgggcgaagaaagctccgccggaacgtcagccggcagatcaaccgggacaagcgcagccccggcggcatgtgaattttggagggggcggcaaagcagttgctttgccgccctctcttttttgtgcagaatatgcgattgacaggagcgccttccggttgtaaactaagtgcaacccaagcggaactgaataacgcccctcaaacgcgaggaagagaagagtagccagagagatacggcacagagagcccggaatggtggaaacgggtacggaaggctttggggaagatggtctcggagcggcgcggctgactgccacaggcacaggccgcgacgggagcgcccgtcagcgcgcgggagtatgccagtactccataaggcccctgtcgtgaggcaggggtgaagcaaggtggtaccacgaagccggaaggctctcgtccttgaatttggattcaagggcgtttttttgtgctctgatttgggaataccacctcccgttgaggaacaatgaaaaggagaaatgcaccatgaagaagctcgcatccctgctcctgtccggcgccctggccctcggcctgctggccggctgcggcggcacccccggtaccgccgacacccccgccgcaaacaccgacacccctgccgcccccacccagaccggctccctggagggcaccaccctgaaggtgggcgcctctcccgctccccacgccgagatcctggccgtggtgaaggaactgctggcggaggagggaatcaacctggagatcgtggagtttaccgactacatccagcccaacaccgcggtggagaacggcagcattgacgccaactacttccagcacatcacctatctgaacaacttcaacgctgagaacggcacccacctggtgagcgtggcagatgtgcactacgagcccttcggcatctacgccggcaagaccgccagcctggaggagctccaggacggcgcgcagatcggcgtgcccaacgaccccaccaacggcggccgcgccctgctgctcctccaggagcagggcctcatcacgctgaaggaggatgtgggcctggagcccaccaagctggacatcgcggagaacccccacaactatgagatcgtggagatggaggccgcccagctcccccgctccctgggcagcctggacattgccgtcatcaacggcaactacgccatccaggccgatctgaaggtggccgacgccctggcgattgagtccgccgagggcaccgccggcaccgcttatgtcaatgtgctggccgtcaaggagggccgggagagcgaccccgccatccaggctctggcaaaggccctgtgcagcgacgaggtcaaggcgttcattgacgagacctatgccggcgccgtgcaggcggtgttctaaggtcctgtccacacagacggcccgcgaagcgggccgtctcattcgactaaaatcctattgattttgtaggaatttggtggtatactgctgaatagaatctaaattatgagggaggtattacctatgcagattgcaaatacactgcccgagctgatcgggaacacccccctgcttcggctggagcggtttgcccccggggcaggggtgctggccaagctggagagctttaaccccctgtcctccgccaaggaccgggcaggcctttacatgattttggacgccgaggagaggggcctgctccagcccggcgcggtgattgtggagcccaccagcggcaacaccggcgtggccctggcctacatcggccgccagcgggggtaccgggtggtgctcaccatgccggagaccatgagccaggagcggcgcagcctgctggccgctctgggggcggagctggtgctcaccgaaggagcccggggtatgggcggcgccattgagcgggcgaaggagctgctggagagcacccccggcgcgtggatgcccgaccagttcaacaaccccgccaacgcccgggcccactacgagaccaccggtcccgagctgtggcgggacaccgacggcggcgtggacgtgctggtggcgggagtgggttccggcggcaccatcaccggcgcgggccgctatctgaaggagcagaaccccgccatccgcgtggtggcggtggagccggccgagtctccagtcctctccggcggccggccggggccccataagatccagggcatcggcgcgggcttcgtccccggcaccctggacatgggggtggtggacgaggtggtggccgtcaccggcgacgaggcctatgccgccgcccgagagctggcccgtaccgagggggtgctggccggggtgtcctccggcgcggcggcccacgcggcccgcatcctggcccagcggccggacatgcggggcaagaccatcgcggtggtgctccccgatactggcgagcgctacctctctacagggctgtttgcgtaaatagagcgcggtggacacaatcggcagcatggctccggccgcaggcgttttgcctgtggccggagccatattatgtatggagctgggcctccagggcggcacggtcggggagcagatagtgctggcgcgtctttttcagcaggccctcccggctcaggctttgaaagcactgggacaccaccacccgggagatgcccagaaaatcggccacctcctggtgggtcagccggatagtgaggcggacccccgccccctcctctgtaccgtatggctctgacacggagagcaggaactgaatgacacgcccccgcacgcttagaaagctgtcgcggatcagcatgcggccaagcacctggctcttccgggcggagatctggaacagcttcagtgccagggcgggagaggcctcggcccgccgtttgaacacctccgccgggatgcggaaaatctgacacgcagtgactgcgacggcccggtattcccgcgggccgccgaacaggcactcgtcctctcccacgggaatcccttcaaagagcaggcagagcacccgctttttcccgctgctgtggatgcactccacccggatctgccctgtttgcagaaaaatcacctcgcgggccgggtcgccctgctgatagaacaccgtgcccgccgggacggtctccgggcgaaagccgtcggtcagtctgtcccacacggtgtcccacggttcatttccaacggcggagaggtgctccggaatccactgcttttcccagcgaagctctttttccaatggtgttcacccttctcccggtttctgcgcgcgcagcccccgcacagattgggaggcggttcgtgcggtttgcacatggatacccaatttattttctttattttcgcagaaaatgacgattttgtaaagtggttaacagaaaattgcggcggggttttctatactgtatcacgttgtgcggcccgcacgctgtggggcctgtcaaatctggtaaaatggaaaggggtggagcgaatgaaacgaaggacagcgcgcgccctgtgcgcagcgggcctaagcctgtcactgctggccggcttggtgccggccatggccgcaggcccggcggaggtggcggatagcctctacatcaacggcaacatctacaccgtggatgaagacttctccactgccaccactatggcggtgaaggaggaccgcatcctgtatgtgggcgaccaagccggtgcggaggcctatgtgggtgcgggaactgagatcaccgacctcggcggcaaaaccgtgctgcctggtctcatcgagggacatatgcatgtcagcaatctgggggaaaaccacctgaagctggactgctactttaaatcgaaggaggatattctggagatggtacgccaggccgccaaggaggcggagcccggcgagtggatccagggttccggctggctggataccctgtgggatgagcccggcttcccttcaaaggaggaactggacgccgtggcgcccaacaacccggtctatctgctccgggcagacaaccatatgggctggtttaacagcatggcgctggagatggcgggcattaccaaggataccccagagcctcagggcggccagattctcaaaacggacaacggggaactgctgggctgccttaccgacaacgcggcgtcaatggtcatcaaggtaattcctacctggagtgctgaggcacagaaaaacgctgtgctcatggcccaggaggagctgttctcctatggctttacctctgccatggacgcaggcacaaaggtcaactacatccagcactatgaggatctctatgagagcggtgagctgaagctgcgcatttacgccatgcccatgctcaacagcacggacagcgccgaggccggctacatccgggagcacgggccggtcaacggcctgtacgacaaccatctgagtataatgggtgtcaaggtgctgggcgacggtgctctgggctcccgcggctctgctctgctggaggattactccgacgatccgggcaatcgtggttcctaccgctttacggacggggagatttacaacgtgatgagcctggcctacaacaacggctatcagatcgcgtaccacgccatcggcgacggtgccaaccaccaggtgctgaacacctacgagcgcctgctgaaggaaaatccccgggaggatccccgcctgcgcattgagcacttccaggtcgttaccccggaggatattgaccgggccctggagctcggcatcctaaccgcgatgcagtttacccatgccacctcggacctgtccatggcggaggaccgcctgggccccgagcgtattcagacggcctacgcctggcgcaccgttctggataagggcggcatcattatcggcggctctgacgcgccggtggagatggtcaaccccttccacggcctgtatgccggtgtcacccgtatgacccgcgccggtgagccggagggcggctggtacgccaaccagaaggtcacccgtgaggaggcgctgcgcgcctttaccatctgggccgcctatggtcagtttgaggaggatctcaagggctctctggagcccggcaagctggccgactttgtagtgatcgaccgggactacatgacctgtcctgaggaggagatcaaggatattcaggccctgatgacagtctccggcggcgaggtggtctataccaaggacaccagcgagcctacgattctctggcaggggaagccggttaccctcctgtctggggcgctgattgagcagcccggcaccatttatgcctccgcctcggatctggcgggcaacatcagcgcggttctggagcagggagagggcactgtgaccgtgacctgcggtgagcagtcggcggagcttcccgtcaagacggtgaatggggcagactacgtccctgttcgtgccttctttgaaggcatcggctatgcggtgacctggtgcccggacagccggacggtatcaacctcccgcatgagcacggcggacacctctgaggctgcggctcagccccctgtggacgagtacagctttcagctcggcaattttgacggcaccgtgggcgccttctgcgatgtaatcatgaccggagccaaggagctggcgttcagtgatccctttgatcccgaggacgaaccccttcttacatcctatgtggcgaaaaagtgcgagggatacggtgtaaagtactacatcgacaaggatcttcttctgaccaagctgttttccactgtggagatggatggtcagtgggtctatatcctctatgccgacgacgcagtgcttcaggagtatctggagctgaagcaggaggagaaagacatgattgcagcaggaacctacacagagaaggcccagatcgacctggctacccggtatggcaagctgatgggctatagcgatgctcatattgctgccagcatcgcaggggcgtaatccagacaatcagagccgccgcactggaaatcagtacggcggctctgatttattttgggctgttctacgcgttatgtccggggcacttctcatgatagcggcgcacgaggtcggccagagtcaggcggtccaccacgctggagacggcggcctgaatgtcccgccacacctctacggtgacgcaccggtcggcccggttgcagcggcaggtatcgtcctgatccacacagctcaccggcgccagattgccctccagcacccgcagaatctcccccacggtgtactcctctggctcacgggtgaggaggtagccgccccccgcgccccggaccgagcgaaccagcccggcccgggagagctgagttacaatctgctccagatatttatcggaaatctcctgccgctgggccacatcccgcagcggaactgccgcgccatggctgtgaagggccacatccagcatgaggcggagcgcataacggcctttcgtggaaattttcatgcacatccctaccttttctgacaaatataataccatggaacaggtaggatttcaagtgaaatttccacttgactttcgcgccaaaaagtgctaaagtgctctacaagaggagcgtgagaggttcatgcgcaggtacgtcggttatggatacggctattaccgctgctattttgccagcggtctgtttgcctgcccataaccggcctgtcaggaatcttccggcgctccgcagttggagccgatggaacccgcggccgcctttgggcggctgcgggttctttgtttgtgaaaggagtcagaatatggttgtcattatgaagcgggagtttaccccggagcagttggaggccgccgtacacaccatggaggagggcggcgtcaaagtcatggtgtccaagggggcggagaccaccatcctgggcgcggagggcaacgccgagcacatcgaccaggagaagctgtccctgctgcccggcgtggagcgggtcatgcgggtcacggagccctataagaaggccaaccggaagtaccacccggaggacacggtgattgagctgtccaatggccgcagcgtgggcgggaaccggctggcggtgatcgccgggccctgctcggtggagagcgaggcgcagattgtgggggtggcccaggcggtaaaggccagcggcgccgccgccctgcggggcggcgccttcaagccccgcacctccccctatgccttccagggtatgggcaacgacggcatccgcctgctccaggaggcaaaggaggccaccggcctgcccatcgtcaccgagatcatgtccaccgacaacgtggagatgttcgagatgtgcgtggacgtgattcaggtgggagcccggaacatgcagaacttcgacctgctcaagcaacttggcaagacctccaagcccatcctgctcaagcggggcctgtcctccaccattgaggagtggctcatgagcgccgagtacatcatggccgggggcaaccaccgggtcatcctctgcgagcggggtatccgcacctttgagacctatacccgcaacaccctggacctctccgccgtgctggcggtgaagcagctctcccacctgccggtggtggtggacccctcccacgcctgcggcaaggcgtggatggtggagcgcatgagtctggcggcggtagccgccggggcggacggcctcatcatcgaggtgcacaacgacccgccccacgccctctgtgacggggcccagtccatcaccccggcccagtttgacaccctcatgggcaggctgaccgccctggccccctgcgtggggcgggagctgtgaccggccctcagtaaagaagaggagtgcgcgatgaaacaaacgatgctgattgtgggcctcggtttaattggcggctcactggcccttgccctgaagggctttgaggatttcgagattgtgggcgtggacgtgtcccagcccaccctgcgctacgccgccgagcacggtgtgggcgaccgtgtgaccgaggacgccgccgccgagctcccccaggccgacgtggtggccctggccctccacccccaggggatcgtggacttcctggcccggtatcgggatgcgttcaagccgggggccctggtgtgggacgtgtgcggcgtcaagaccgctattttggaggcggcccaggtgctgcccggtacagtggattttatcggctgccaccccatggcgggcaccgagttctccggcgtggagcacgcctttgcggagatgttccgggactcccacttcctgctggtgccccgggatgacagcaggccggagcacattgccctgctggagcggctggcggcctatatcggctgcaaggacgtatgccgcaccaccgcccaggcccacgacgccctgatcgcctacaccagccagatgatgcaccttatcgccgtgtcggtgtgcgacgatccggagctctttcagtgcaggggcttcgagggctcctccttccggggctgtacccgggtggcggccctggacgtggggttgtggacacagctcttctccctcaaccagcccgccctgctggcggcggtggaccggctgctggacaacctccagtcctaccgggacgcgctggcctccggaaaccgggcggccctggcggagaagctggcccactccgccgcccgcaagcgggagatggatctgcccgggcccgatctgctggcatgacaaaaaggcgccgctgcattgcagcggcgcctttttgtcacggcttctgaaaaatgttgagatccgccgcggtgagcggcgcgttgtaggggttgatgagggagttgacggtctccagggcggcctccgggtccagctcgtagcaggagccccagcggtagccccggctgtccacatagtagacattctcacccgccagggtggcgctggcaaagcccgtggagaagtccaggcccagggcgggctgggcaaaccagagggcctcgctgaactccagatcagtgtccacatactccaggaagaggttcacgtaagagttgatcttctgcggattggacagggcttttttcagaatggcggcgatgagctgctgctgggtacgggtgcggccgatgtctccgtccggataggcgccgtagaggttgtcggggtaggagccggggccgtcggagttgttgcggcagcgggccaccttgagcacgtcctcgccggtcaggtgctggaggccgggctggtagtggatgtggaggtcctgggtgggatcgtcaaagctcatgcgcaccggtacgtcgaactcgatgccgcccagctcatccaccagggccacaaagccgtccacgtccaccgccacatagtagtcgatgggcacgcccagcaggtcggagacggtatcccgcaggttctccggccccttgtggtaggcggcgttgatcttcccgctctccagcagggtgtcccgggggacggagaccatacccaccttctgagcctcagtgtcgtaggaggccacaatgatggtgtcggcgttgccgctggactggtcgctggcggccagcagaaaagtgtatgtcccttcccgcctctggcggccgggcgcttcggtctgatccggggagagggagccggcgggggcctccggtgtgggctccggggcctgggtgggctttttggaggccaggcgataggcgcagtagagtaccacgatgatggcggacaggaccaccaggatgcgatatgccagcttccccgcccggcggaggggggagacacgcttttttttgcggatgcgacggcgttgggccacagagaggcgcccccttttctcaggtgtgattatgtcaacaagcaaccactagtatataaaatgggaagccgtctgacaagagaaagtttgcaaacttcacgaatctgtaagaactcagaggcggctctggatactcagggttgcggcggtgagcgcgttgacggcccccagcagctccaccagaagctgattttggcaggccagggcctccagaatccggtccagcccgtcggcgggcggcggggtaggacagtcgatgcagtaggggatgggatgggcgtagcgcttcatgggctcctcctccagaggggcgccctccagccgctggcgggccatccggcggccctgggcgatgatggcctgggcctgggactcggcctgggcccgggcatcccggccgggctgacggcagtttgacatggcagttacctcctttttaccccattctatggaaaagcagccccatttgcgcttgacatttggaaaatacgtgctacactaaactgtaccgtatgagacagatttgggggagggagagccaatggacagccgggaagcggccgagcgggcccgattggcggagacctttctcttccggggtgcgccgccggaggcggtggagctcgcccggaccgacccccgcacactccggcaggagaacggtaagggcggggtgatttacgcccctcacgccttccgccgctgcctgggcgtggtgctggagggccgggtgcaggtgaacaagggcgcgctcatcatgagcgtgctggaaccgggggatctcttcggcgcggcggccctgttcaacgaccgggcggactacgccaccaccctcaccgcccgcgcgccctgccgggtgctccttctgccccaggcgctggtggaggagctgatggtccgctttccggaggtggggcgcaactatgtggcctacctgtccggccgcatctgctttctcagcggcaagatcgacgccctcaccgccggcagcgccgagcggaaggtggcccagtacctgctctcccggctggaggggggatgggtggagctggactgctctgccgccggcctggcccggcggctgggggtgagccgcgcctccctctaccgcgccctggacgccctggccgggcggggggttctccggcgggagggcagacgggtgcaggtgcttcagccggacgcgctggaacagaattaggaaaggaagagattgacatgaaacagaagctgctgtccctgggcctgagcctggccctggtgctgggcctggctgcggggtgcgcccccaaggccgggccggaggagtcccccgcgccggagacgtcctcccccgtcgcggaaaccccgccggccgagaccgttgccccttaccagaccatccggctgggcctgctcaacggccccaccggcatgggagcggccaaactgctctccgacagcgacgcgggggagacggtcaaccactatgagtatgccatcggctccgacccgtccaccgatattgtgcccaagctgaacaacggcgagctggacatcgccgcagtccccaccaacctggcggccaccctctacaacaaggcgggcagcatcaggctgctggccctcaacaccctgggcgtgctccacatcctggagaacggcgacacggtccactccatggccgatctggcggggaagaccatctacagcatcaaccagggcaccaacaccgagtacgtgctcaactacctgctggaggagagcggcctcacccccggcgaggacgtgaccatcgagtggaagaccagcgaggaggtcacggccctcatggcctccggcgggatcgatctgtgcatgctccccgtccccgccgccaccagcgtcatgatgcagaacgccgatgtgcgggacgccatcgatctcaacgacgtgtggcaggacgtgggggccgccggtacctttaccatgggctgcgtggtggcccggagcgacttcgtggaggagcacccggaggcggtggacgccttcctcaccgagtacgccgcctccatcacctatgtgaatgagcacccggaggaggctgccgccctggtcgagcagtacggcatcgtccccaaggccgccgtcgccaaggcggccatcccccaggccaacatggtctgcctgaccggcgacgagctgaagggcatctccgactactatgaggtgctctatgccgccgaccccacctcgatcggaggggccatcccggatgataatttctactatattccgtaatcgaaccacacaaaaaatactgcgcgttgtcgtgcccctggccttctggctgggggcttggcagcttgcggccatttgggtggacacagtatatacccccggacatggggccctgctcctgccctctcccctgctggtgtgggagcggctggccgccctggccgcccggccctccttctggcggacagcggcggtgagcctgggccgcatcttcggcggcttcgccctgggggcggcggcgggcaccctgttggccgtcattacctccgccctctcctgggcggactggctgttccggcccatggtgaaggtgatccgcgccgtgccggtggcctccttcatcgtgctggtgctcctgtgggcctccacggggcgggtgcccgccatcgtctcggggctgatggtgctgccggtgctgtggggcaatgtttgtaaaggtatcagccagactgacgggcagctcctggaggcggcgcgggcctaccgcttcggccgctggaagaccctccggctggtgtatgtcccctcggtgctgccctatttcgccagcggctgcgccaccggcctgggcctggcctggaaggcgggggtggctgccgaggtgctctgccagcccaggctggccatcggcacccaggtctaccgggccaagatcaccctggagacccccgatctcttcgcctggacggcggtggtgatcgccctcagctttctgctggagtacgccctgggcctcctgttccggcggctgggaaagggggcgaagctgtgatatcagcggaacatattacggtctgttatggggaaaagcgggtgctggacgacttctccctggtgctgccggagacggggatcaccgccctgtccggcccctccggctgcggcaagaccaccctgctgcgggtgctggcgggcctccagcggcggtcggccggggtggtgacggttcccccccgccccaccctcctgtttcaagagaaccgcctgctgccctggcggacggtggagcagcacgtcgccgacgtactcccccgggcgcagcggggggaggcggggcgctggctggccctggtcgagctggagggggaggagcacgcccgcccctctgccctctccggcggcatggggcggcggctggccctggcccgcgccctggcctgcggcggcgggctctacctgctggacgagccgtttaccggcgtggacgccgcccgggcggcccgcattctggagcgggtgcgggccctgggcgtgccggtgctcctctccagccacgaggcggagatcgtcgccctctgcgaccgggtgatccccctcgccggaccgccgctgcacatggcggctccgggctagaagggcggctccgacagcctcgcggca

SEQ ID NO: 4359 - DNA, 12300 bp, Unknown
  gut microbiota DNA sequence
acaaacgggcgaaagcacattgcgctttcgcccgtttgtgctaaaatagttgtcataatcatttgagagaaggcagcaaacaatacatgacatacaccgtagacaccccgcgcagcaggcggcgcttccgatggccacgcctccccctgggagaagggcaggccgcctggaccacccgggccctaatgctcctggcccccctgctctccttcaccctggtggagtacctcaactacaacaacccctggactgacttcacctcccttcagatcgccctcaatctggcgtggtactacctgggggagctgtttttctacttcgtcctccggcggcgggcctcggccgtcaagtgggccatggggatcgcctggggcctgggcatggccaaccactacctgatctccttccgggggcgcaccctctttcccggcgacttcctcaccctccgcaccgccgccaacgtggcgggcaactacgactaccggcccgactccatgcagtggctcaccatcggcgtgttcgcggcggtgttgctggccctgtccttcctgccgaacgagaagaaaaggcccttcccgtggcggctctttgtcccggcggccggggccgccgcggtcttcctgggcgtgttcttcggcaccgggtttgtggagagccggggcattgagccctccatgtggaccacccggggcaacggcctgttcctcaacttctcggtgtgcctgaagtacatgagggtggagcggccggagagctactcggaggaggccctcgcggccctcgccgggagcactcccagcgacccggccgccgtgccggcggccggggaggacggcatgattcgcccggtgaacgtcattgtcatcatgaacgagtccctctccgacctttccgtgctgcccggcgtggagagcaatacggacgccatgcccttcctccgctccctgacggagaacaccatcaagggctacgcctactcctccgtgttcggcggcacgaccgccaactcggagtacgagttcctcaccggcaacaccaccgccttcctgcccgcgggcacggtgccctaccagatgtatgtctccgacggcgatcccaccctggtggggcagatggccgccctgggttaccgtaccgtggccgcccacccctaccgctcctccggctggagccgcccctcggtctaccgggatttcggctttgacgaggtatactttgaaggggacttccaggaccgggagtacatgcggggggacgaaaaaaccggctatgtcaccgaccagtgcgactacgagaacctgatccgctggtatgaggagaaggaggcgggggagccgctgtttctcttcaacgtgaccatgcagaaccactccgcctaccagatggcgtggacgaacctgccacgggaggtgtggctcaccggggcgctggagggccgcttcaacacggtcaaccagtatttgtccctggtgtaccagagcgatcaggccttcgaatacctgctcgactacttctcccaggtggaggagcccaccctgatcctcctcttcggcgaccaccagccccaggtggccaccaacttctataccgacgtgctggggacggccccggataccgccctggcccagaaaaaacagatggtgcccttcgtcctctgggccaactacgacataccggaggcccagggggtggagctgtccctcaactacctgtccgctctgctgatggacaccgccaacctgcccatgaccgggtatcagaagtacctggcccggctgtgggaggccgccccggtgatcaacaccgtgggcatccgggacgccggcgggaactggtacggcgagaacgaggcgctgccggaggagctggaggccgccgtggaggactaccgggtgctgctctacaaccatgtatttgacaagaaaaaccgggtggaggggttcttcaccctgacggagtgacacccgtatcccgcccaaatcaaacgcagccgcaggccgcccagtctcactagagactgggcggcctgttgaatgagaggataaaatgcaggggcgggtaatgcgcaagaggcaccggacccggcacagcgggccggtgtgggcatcggcccctgcggtgtgggaatgaaaacgcaggggcagccacaggggccgcccctgctcagggcgcgggaaatgccgcccggcggcggtccggccgaacgggacctcagtacagccccagcagatagcggaaggcgaaccgcttccaccaggggagggacttgtccaccgcctctgccgcggcgcgggcggcgcggaccaccgcgtcccgctcctcggcggtgagggtgtgggggctgaatttggccttttgggccagctccccggcccgggcgggcggctccgctccccagcgggtcagccgctgaagatagagataggccgcgatggccgcccggttggggttttcatcctggaaacgccgctcccggcggcggcgggcccaaaagcgccgcagggggagggccagcgccagcagaagggcggccaggagggccggaagcaggcggagagggagcttcgggccctcattcgggagggccgccgacggcgtgggggtgggtgtaggcgcggcggagtcgggggcgcggctggcctggggcgtgggagagggggtggcctcgggctcctccgcgccgctctgggcgggagtgctcccggcgtagacgggggtgacctccaccggctcccacccgtagccgtcgatgtagacctccacccaggcgtgggcggcggagtcgggcacgttcacgcggccggaggcgggcacgtcggccacaaagccggagacatagcgggcggggacgcccatgctccgcagcagcagcacggcggcgctggcaaagtgcatgcagtagccccgatggctctcggtgaggaaccaggccacaaagtcctccccctccggcgcggcgggggtgtcggggtcgtattccgcgacggcggccaggtagtccgctaccacctgggcggcttccagctcatagggctgcttcacagcggcgggggagacgtactgggcctgccgcagccagtcggccagcggctccaacgcgccgtccagcgcctggcggagcgccgggttttccgagtagaggggcacctggagatagtactcccgcacgaagtccgcgtaggccgcctccgccagagacagctccccccgcaggcccgcggaggcggcaggggaggcgtcgggctggacgtagatggtgtgggtccacacccgggccgcccgggccagataggcgtcgtggacgaattccgccccggacagctcgccgggctgggtcaggatatggtagggaacgtagacatagcccggatcggcccccacattgcgcacggtgatcctggcgtaggggctctccgggtgggcatcccgaaccgccagggcggggaaattcatgggctggaactgggcgaacagggactcagccccagtgacgccaaggtccatgtccagcgtgacgggcgctccatatgtgacgccgcggaggcgggcctgccagttgtaggccgcctcatccagcggctgccagctctcgccgtcatataccgcgtcggagagcccccgcaggtagatgcggccagtgaggtcggtctccacctccagcacggtgcgtccggagaagcgcagcggccccgcgtcggagagagagacggagccgtcggcgtcggccagccgtcccccgccgctgccaatgccgaaggggccgctcccctccagcaggccgtcccccaggcggacggcctgattggtgaggtgctgtagggcccggtcggcccaggcggggcgctggtaggtgtccatgggcatggccaggctgagggcggccagcagcagggcggcggccggaagggcggccaggttgaggcgcgcggcccccaggggcgaggtgcgggccagcagggaggtgagggccggcaccacccaccccagcaccagggccatcaggggcagccagcccggggtgaccgagatgcacagggggagcagcacgaaggggaaggagctgacgaagaccagccagaaggagcgcaggcgcacgacgcccagccccagcagggcgcccagcggtaccagggccaggaggacgagcagggtggcgcagttggtccagagggcttcggggagggaaagggcgggctccagggtgaagcccagctccagactggcggaaacggtgttgaccacgtccacccgcagggcctcggcccccagggccagcggctgccacagccgccgcaccgccaggacccaggcggcggccagcagggccaggggaagggcccaccagcggcgggggagggaccagaggccgaggaaggccagcgcggcggcggcgcagcccagcagcaggggaagggcgtgaatctggacggagaaggcggtaaggaaggaaaagacggtgcccgccagcaccagaagaaggaggcagccgtcccccaacaggatggcgggcccccgccgcagaggcgcggcggcgcggcgcttgcgcttcatggcgcacctccttccagtccggtgggcgttacatggatgtgccggaggggaccggcgcggccgggcaggcgcagggcggtgtccaggatggagcgtccctccgccggggcgggccgggagaaggccagctccaggcaggccagcagggcccgctccgagtccaccagccgcccctccacgccgccgccggtggggctggcccactggatatggtggggcctgccccgctccagcagggcccgggacagggcgcacagccgggcgaaggtctggtccagcgccgcgggggcgccgaagtggtcataggtgagcaccagggtggtctgccggggctccagggtctcccgcaccaccagctcgtcccgcttggaggagagcttccagtggaccgagcgcagggggtcccccggccggtagtcccgcagatcgtagtcctcccccggccctccccctgggcgggggaggagcgcaccgccgccggggccgccccccagcaggcgctccggcagcgcctgctccatatcgggcggcaggatcagcaccgccgccggccgcccggtggggatgggcagggggaacaggcccagcagatcgcaggtccaggcccgctccgcccggcagatcagccggccgcagtggggggtggccagctccagagtgggcggagcgcccggtgcggtgcgcacgggctcccaccgcacccgcccgcccgcgccggtgagctggttgctccagtggagacgggcctgaagccggggcaggggcaggcgggtgcggctgcgcagccgcacctgaaagaccgcgtcctccccctgtaccaccgtgggagcggcggaggtgagaagcagtgtgcagcccagcaccgacggcaggctcagcagcaccgacagcagggggagcagcagcaccagcgccagggtgaaggtggacaggtaaaagcggaacacgatctgaaagagcactgccccgcccagcagggccgcgtaggcaatccgacggtacgccatggcgtcaggagatccggggggcgggcacccgctccagcagctccgaagcggggtcgaaggagcggtcggcctccgcccggggggagaggagcagccggtggggcaccacgtcgccaaagaccagggatacgtcctccggcagaacatagtcccggccccgcaccagggcggcggccttggccatggcggtgagggccagggtggcccgggggctggccccctggagaatcatggggtggctccgggtggcgcccaccaggcgcacgatgtagtccagcacctcgtcggatacgtagacctgtccggcctgggcccgcagggcgagcaggccgttgagctccagcaccgggcgcaccccctccaggagtgcgcccccctgccggcggcgcaccatggccatctcgtcggcgggggcggggtagccgatggacaggcgcaccatgaaccggtccatctgggagtcgggcagaagctgggtgccggaggcgcccgccgggttctgggtggcgatgaccaggaagggctggggcaccgggtgggacaccccgtccaccgtcacctgcccctcctccatggcctccagcagggcggactgggtgcggctggtggcccggttgagctcgtcggccaaaaagaggttgcacagcaccgcgccgggctggtactccatccggcccgcctccttgttgtagagggtgaagcccgtgatgtccgacggcatcacgtcgggggtgaactggacccggttgtaccggaggctcagggccttggagaaggccagggccatggtggtcttgcccacgccgggaatgtcctccagcaggatgtggcccccggccagaatggccagcagcacctttgccagtacctcgtccttgcccaccacggcgcggcgcacctcgcccagaatggcggcggccagcttgctcccctccatggaaacgccctccttatcatctgtcttaccctccattctagcagagctttgatttatgtcaacgaaaaaagagttacagattgggctccgggccaaacaaacgcgcaaaacctcttgcactgcgggattttttgtgctatagtacatacgatagtaagtagtggtatggtgagagtggggtcgcggctccgctctttcttattgaaaaaacggggtatgtaaaattatgggaaataccccgaaacggaggtcaaaccatggcgaaagtgacggagctggtggccgttctggccgcccccattgccgagcagaacggctgcaccctctgggatgtggagtatgtccgggaggcggggcagtggttcctgcgggtgtatatcgacaagccggaggggatctccatcaacgactgcgaggcggtgagccgtcccctgtccgacgcgctggacgaggccgaccccattgagggaagctatgtgctggaggtgtcctccgccggcgcagaccgccccctgaaaaagcccgcccacttccagcagttcctgggcgcggaggtggatgtgcgcctctaccggcccctggacggccgaaaggagtacaccggcgtgctgaagggctatgatggcggcgatgtgaccatcgagaccgcgggcgaggcccgcacctttgtcaaaaaggatgtggcgcaggtgcgcctgacggtgcatttttaaggagagcgggtacaggccgggggcccgtaccgacgatgcaggggcgacctgcggccgcccgcaggagaaataaggagtgcagttatgccgaagaagaatgccaaagcgcagaagtccaacgagctggacggggcggagttctttgccgccatcaacctgattgagaaggagaagggtatccccaaggcctacatgctggagaaaatcacccaggccctggtgtccgcctacaagcgggaccacgagggcgcgggggacaacgtgaccgtggaggccgacgaggaggccggcaccgtgcgcatgttcgtcaagaaggatgtggtggaggaggtcgacaacccctgtaccgagatgagcctccagatggcacgggagaagctgccccacgcccagcttggcgacgtcatccgcatcgaggtgcgcacccgcgacttcggccgcatcgccgcccagaccgcccgccaggtgatcatccagggtatgcgggaggccgagcgggggatgatctacgacgagttctcctccaaggagcacgagatcctcaccggcgtggtcacccgcgtcgatccccgctccggcgcggtgagcctgcgcatcggctcgggcagcgaggccaccgaggccttcctggcccccggcgagcaggtcaagggcgaggcgtacctcgaagggatgcgcctgcgcgtctacgtagtggaggtgcgccgctccaccaagggaccccaggtgctcatctcccgcacccaccccggcctggtcaagcgcctgttcgagctggaggtgcccgagatctacgacggcaccgtggaggtcaagtccatcgcccgtgaggcgggcagccgcaccaagctggccgtctggtccgccgatcccgacgtggaccccatcggcgcctgcgtgggcccccggggccagcgggtcaacaacatcgtggaggagctcaagggcgagaaggtggatatcatcaaatggtccgaggagccggcggagtacattgccgcggccctgtcccccgccgatgttgtcagtgtggctgtccgggaagagggcaaggcctgccgtgtggtggtgcccgacgaccagctctccctggccatcggcaaggagggccagaacgcccggctggcggccaagctgacgggctggaagatcgatatcaagcccgcgtccgcccccgccgatgaggagccggaggacgaagaggacgtcctgctggacgacgaggccgagaccgaggaataagccctgcgggggcggcctcctgagtggggctggccctccctgggacccgccgcaggcgggacggcgcctgcgccgcacaagcgttttgccgagggcaaaaccttggtttggggcaattcagttgccccaaacgggatggaaacagggtccccgcaaaaaggccctgccttttgcggggcgggccagaacgcccggctggcggccaagctgacgggctggaagatcgacatcaagcccgcgtccgcccccgctgacgaggagccggaggacgaagcggacgtcctgctggacgacgaggccgagaccgaggaataagccctgcgggggcggcctcctgagtggagctggccctccctgggacccgccgcaggcgggacggcgcttgcgccgcacaagcgttttgccaaaggcaaaaccttagcttggggcaattcagttgccccaaacgggatggaaacagggttcccgcaaaaaggctccgccttttgcgagatgtccgcacacgtaggggccgatgcccacatcggcccgcgaggaggcgagaaaaatgcccaagaaaatacccctgcgccagtgcgtgggctgccgggagatgaagcccaagaaggagctcattcgggtggtcaagagcccggagggagaggtatccctggatttcaaggggaagaagccgggccgcggggcctatgtctgccccgatgcggagtgtctcaggcgggcgcggaagtccagggcgctggagcgggcgttctccgccgccatgcccgacggggtctacgacgcgctggaggcgcagatgagggagggcggcgatggataacgtgctgcatctgctgggcattgcccgcaaggcgggccgcgtggaggtgggggaggagccggttggtgcttccgcccgggcgcggcaggccaggctgattctggtggcctccgatgcggcggacaacagcgcccgccgggccgcccactttgcccaggcgggcaaggcgccctggttccgggtgccctacaccaagggggagctgggcggcacagtgggccgcgcatcctgcgccatgctggccctcaccgatgtggggctggcggccgccctgctggccaggctggccgccggagcgccggagacctacggcgcggcgtcggcggagctgagtgagaaggcggacaaggccctccagcgccagaaggaacagcgccgccacgagaaaaagctgcaaaagggcggaaggaagccgtgggcggccccgcccgcccggaaggagtccccgccggagcccgccgggaagcggacgctgccccggggcaggctgaccgtcaagaagaagacgccatgagaccatggcacacaataggattggaacaacgagggcttgttccaataagaaagcgcagcggccccgccgcgttttcctattggcgcaagcccgccgatggaggtggcttatttgctgaacaacaagtatcgcgtgcatgaggtggccaaggatttcaagaagaactccaaggagatcaccgacattctgacaaaatatgcgacggctcccaagaaccatatgcaggtgctggaggaccgggagctctccctgatcttcgagtacctgacccagcacaaccaggtggacaacatcgagagcatctacgccgaggtctaccgggagcccaaggctgccccggcccccaagggggagcccgccaaggccgcgccccaggcgcagaagcccgccgcgccggcgggcaggcccgcgccccagcagccccagggcaagccgcagccggcccagcagccggcgaaccggcccgctacccgcgtccccgagaagaaggtagtggacacccgcaagggcggccaggtgaacctggagaagtacgacgagcggctggagaacctggctgcgggcaagaccaagcagatgcaggccggcaagcagaagttccagggccgcaaccagcgcaagggcggcttccagggcagcaagcgccgccaggaggagcaggagaagatgcgccggctccagctggagatcgccaaaaagactccgctgactgtcaagatcccagacgccatcggcgtgggcgagctggcctcccgcatgaagaagaccggcgccgaggtggtcaagaccctgatgaagaacggcgtcatggcctccctcagcgacgtcatcgacttcgacaccgccgccatcattgccgaggagctgggctgcaaggtggaaaaggaggtcattgtcaccatcgaggagcggctcatcgacaccgccgaggacaaggaggaggatctggagccccgcgcccccgtggtggtggtcatgggccacgtcgaccacggcaagacctccctgctggactatatccgcaacgcccacgtggccgccggcgaggccggcggcatcacccagcacatcggcgcctatcaggtgaacgtgcagggcaagaccatcaccttcctggacacccccggccacgaggccttcaccgccatgcgcgcccgcggcgccatgatcaccgacgtggccatcctggtggtggccgccgacgacggcatcatgccccagacggttgagtccatcaaccacgccaaggcggccaatatccccatcatcgtggccatcaacaagatggataagccggaggccaaccccgagcgcatcaaggagcagctcaccaagtacgagctggtgcccgaggagtggggcggcgagaccatcatctgccccatctccgccaagaccggcgagggcatcgacaatctgctggagatggtcaacctgaccgccgagatgcaggagctcaaggccaaccccaaccgctccgcccacggcgcggtcatcgaggcccggctggacaagggccgcggccccgtggccaccctgctggtacagaacggcaccctgaagcagggcgacgtgatcatcgccggcaccgccgtgggccgcgtccgcgccatgaccagcgccaagggcgagaagctcaccgaggcgggcccctccgtgcccgtggagatcatcggcatgggcgaggtgcccggcgcgggcgacgacttccacgccgtggccgacgagcgcatggcccgcgagctggtggagcagcgcaagcatgagcagaagatggccgcctccgcccccgtgggcaaggtaagcctggaggacctgttcagccagatcaagcagggcgagatgaaggatctgaacatcatcgtcaaggccgacgtccagggctccgccgaggccgtcaaggccagcctggagaagctgtccaacgaggaagtccgggtgcgggtcatccactgcgccgtgggcgccatcagcgagagcgacgtcatgctggccaccacctccaacgccatcatcgtgggcttcaacgttcgccccgacaacaacgccaaggagtccgccgcccgcaacaacgtggatatgcgcatgtaccgcgtcatctacgactgcatcaatgagattgagaccgccatgaagggcatgctggctcccaagttcaaggaagtggagctgggccaggccgaggtgcgcaacgtgttccgcatcaccggcgtgggcatggtggccggctgctatgtcacgggcggcaaaatgcagcgcggtgcccagatgcgcctgctgcgggacaatatcgtcatctacgacggcgccatcgcctccctccagcgcttcaaggacagcgtgaaggaggtcgcccagggctacgagtgcggcattaccttcgagaagttccaggacatcaaggagggcgacgtgatcgaggcctatctgatggagcagatcgaggtgtaaccctgcctcctgcagagttccctcctcgcggcaaagcgagggatctgaagcttgcggcgacgagg

SEQ ID NO: 4360 - DNA, 7624 bp, Unknown
  gut microbiota DNA sequence
gatcgaggtataaatttctttcggcttcgtaaaacgccgtaggggcgacccttgtggtcgcccgcgggcggccataaaggccgcccctacgatatggagtggccagatggggcgtgcggtatgctgccgggctatcgtgccgcatgtctggcctcacccgagaaattcgcaggggccgatgcccacatcggcccgccgcgccccaagccggtaaaaaaccaaatcagacccgttccgtccccaagtcatttgaggagggggcgggtctgtgcgtctttatcgggaggatttttatgagcgccgtcaccctgctgtgtgccgaccgccccctgcccctgtacgagtccggtgtccgccgggtcgagaccagctcctatggtgggtacacggtccgtattgaggcgagcggattttccgtgggggagcacacatactaccgggaagcggtggaggatctgtacctgaccatgaagccctgccggtaccagctggatctgcgggcacccaggaggacgcggcggagctgagggcctatctggcaaagcatctgcgccccggagagaccgtggaactgtggaacctgtgggtggggaacgaccccgcgcgaccgaggcgcttttccggcgccctgggggatgtggagctggacaccctgaagcaactggaggagaacttccagacctgcctgaccattcgtatttgaccgggggcgcagccctctggaaaggagtatattatgccgagcaatcgcatcggacgcatcaacgaggagatccagcgggagctggccgcccttatccgcaccgtgaaagacccccgggtgcacggcctggtgtccgtcacggcggtggacaccaccccggatctccgctacgcgaagatttacgtcagcgtgctggacaagagcgacgtgaaggaggtcgtcaagggcctgaagtccgccgggggctacctgcggcgggagctgggccgggccctttcgctgcgctacaccccggagctgcagtttgtggaggacgactccatcgacaccggcgcccacatcttgagcatgctccgcaacccggaggtggtcaagcccgccaacccggccaatgcccacatcgagctggacggcgaggagtgagcgccatgaccgtgaaggagaccgccgcctttctgcggcagcatgacaactatctgatcctcacccacaagcgccccgacggggacaccattggctgcgccgccgccctgtgcgaggggctgcgggccctgggcaggacggcgtggatctgtccccacacggaggagacccacctgttcaccccctatctggagggccgcctggccccggagggctatgttccggagacggtggtgagcgtggacatcgccgcccgcagcctgttcacccgggctggagaaccctggctggcgcggggggttgatctggccattgaccaccacccctcccaggagttctttgcggcgcagacctgcctggacgctgggcgggccgcctgcggcgagctgatctacgacatcctccgggaactcggccccatcacccccgccatggcggtgcccctctatgtagccgtgtccaccgataccggctgctttcagtacagcaacaccacggcggacacccaccgggtagccgccgccctgatggaaaccggcatggacgtgttctctctcaataagcgccacttccgcaccaagagctgggcgcggcttcaggtggagcggctgctcaccgagcggatgcaccgctatgaggacgggaaaatcgctgtggcccccgtgtccctgtccctcatggacgaggcggacgcaactgaggaggatatggaggatatcgccgccttcctgggacagattgagggggtggagacctccgtcaccatccgggagctggcggaggggggctgcaagctgtccgtccgcaccagcggcgggctcaacgccaccaaggtgtgcgcccggctggggggcggcggccacgcggccgccgcgggctgcaccgtctccggcaccctggccgaggcggaggcggccatcctggacgccatccggcaggtggaggcaggggcatagaggccgcggcctgcctgtaggggccgacctgcgtgtcggcctgctgcccgccctacaaaccagaaaagacgccgatttttggcgcacgggaggccacttttatggcaaatggaatcatcgtaattgataagccccaggagtggaccagtatggacgtgtgcgccaaaatcaggggcgtcctccatgagaggcgggtgggacacgccgggacgctggaccccatggccaccggcgtgctgcctgtctttgtggggcgggcgacgcgggcggtggagtttgcatccgaatccgaaaaggaatacatcgctgggttaaaactcggcgtagtcaccaatacccaggataccaccggccaggtggtggaggagcgccccgtggaggcggaccgggcggccctggagggggcgctggccgccttccggggggagatcacccagattccgcccatgtactccgccctcaagcgggacggtaagaagctctatgagctggcccgggcggggaaggaggtggagcgggccccccggcccgtcaccatccacgccctggaggtggcggagcagaccgggccgaactgctataccctgcgggtgcgctgctccaaggggacctatgtgcgcaccctctgccacgacatcggggccgccctgggctgcggcgggtgcatgtccgccctgcgccgcaccgaggccgccgggttttccctggcggaagcggtgccgctggaggcgttgctggacgcacctgacccggcggccctgctccggccggtggacgcctatttcttccgttatccggcgatgacggtggaggggacggccctgcgcaaggcgaagaacggcaacccgtttccctgctccgcggccgacggcgactggcgggtgtacggccccggcggggaattcctgctgctgggccggtgcgccggggggatgatgagcactatcaagagctttttcgaggtgtagcggtatgcagacagagaaacgtgtgatcgccttgggcttttttgacggcgtccatctgggccatggggccctgctgcgccgggtgggggagaaggccgcagagctgggggccgttcctgcggcggtcacctttgacacccacccggagaacctgattttaaaaacccctgcggtccccctgctcagctctcccctggaccgggcggagctgatgcggcggttctacggtatccgagaggtcattgtggcccactttgacgagcggatgatgcacatgccctggcgggaattcgtcaccgattatctggcgggggagcacggggcggtgcatctggtggcggggcacgatttccacttcggctacaagggggagggcaacccggagcggctccaggccctctgcggggagctgggcatcggctgcgacattatccccaaggtggtacaggaccatatcaccatctcctccacctatatccgtaccctggtggcccagggggagatggagcgggccaaccagttcctgggccacccccacaccctgaccgacacggtggcccacggcaagaagctgggggggactttggggttccccacggtgaacctgcgttttcagccgggggtgctggtgcccgctcacggggtgtacgctacccgggtgacctttgaaaacggcgagagccgcccggcggtgaccaatatcggagtgcggcccacggtagacgacggcgaccgggtgactgtagaggggttcatcctggattttcagggagatctctacggccagacggtccgaatggagttctacaagcgtctgcggggggagcggaagttccccagcctggaggcattaaaggacgaggtcatgcgcaacgcggagcagacccggacctatttttccacgcagccctgagcccctgagactgaggatgaggaaagagagggagccccatgcgttataaaaagctctaccccgccgtcatctgcttttgcgtcttcctggctgccatcggactggtgctgggcgatccgtccactgtgctgccaggactgtggaagatcatcgttacggaggacgcgctgatcaccgactacgtgaaaattgcgggtgtaagcgcggccctggtcaactccgccctggtgacgctggtgagcctgctgctgctctacctgagcaaggagccgcccaacggcttcacactggtggagctgggcctgatggctggcttttccctgttcggcaagaacattgtcaacatctggcccatcatcgccgggaccttcctgtacgccaaggcgcggcgggagccgttcggcaagtatgtctccgtgtccctgctggccacagccctggccccggtggtgagttatgtggcgctggacaacggcttcggcaacctgtggtggggtatcgccgtgggactgctcatcggctttgtgctgccgcccctctccgcctatacatacaaaatccagaacggcatgaacctctacaacatgggctttgcctgcggcctgctggccatgatcctggtacccgttatgagctccatgggagccaatcccaccgtggcccaccactgggcggagggctataacctgcactttgctatcttccttggggtgctctgcctggggctgactgtggcaggcttttttttcagcggccgcccggcgtgggccgcctgggcggggtaccgccgcctgctgcgcactaccggccgggctcccagcgattaccttcgcatgtttgggcccgccccggtgctcatcaacatgggggtcaacgggctcatcggcatggccttcatcctcgccaccggcggcgatctcaacggcccaaccctgggcggcattctcaccatcatgggcttctccgccttcggtaagcacgcccgcaacatcacccccatcatgctgggcgtggtcatcggcggcgtttttatgcacttcgatatcaaccagagttccgtgcagctcgccctcctgttcggaaccactctggcccctatctcgggctatttcggctggcccttcggcatcgtggcggggttcctccactcctccgtggtgctccacgccggaaccccggtggagggcattaacctgtataacaacggcttctccggcggcctgctggccatcgttctctatcccatcatcagcgaggccatccgccaccaccggccggggctccaggaccgcgactacttcgatgacaccatcgagcacgacgagcccctggtcccgcctcctgcccggcgaaaatgaaaatgaggtcaaaagaggtgcagcgctcccgaaggagcgctgcacctcttttttgcgcagagaaggcagggatctatccaaaacgctgccgaagaacggacatcaatttgaaaaagtgtaccttttcaaacaccctgcctttgttctataaattgaagtatagcatagaaaaggagcaatatcaatcactttatggaaaggtaatccttacaatctgctgctttgaaaaggtacacaattccaaatcagaagatgggaggcagatttatttatgagaagcaggttactaaagatattgatatgcttaattatgattatttcttatattccgataactgcaatttctgttgagtcaggagaatcagtggtagatggaagcacggcaggggcgccaatcgcagtgccggaagaagggcttgctatttcgggcggaaccttatatggaatcgataaaacatggtttgcaaacgttaatcctgataagggaaagatttatttggctatctctatcccctcaggcgtgacagaaattaataacgatgggctcaaggattcttatacaagcgataaaaaattacataatgcagtcacatatatggatgggttggggagtttcagtgttgcagctcttagttttgatgatgcaactggacttgaaacaattggtgagcaggctttgcaggggaacagccaactgacagggatacttgatttatcagcgacaaatgtctcagtaattaaaaaaagcgccttttccggctgctccaatctgacaggagttgttctaccaaaaacgttgacagaattaggaagcagatcatcctctgccggttctgtatttaacgggtgcgaaggacttcggtatatccgcgtggccggtagtagtaaccagaatgcggtttttgaactgccggagggccttacctatattggaaggcagacatttaagaactgttttgcttccgatgtggatgcaaaggtaattattcctgctagtgtagagacaatcggaagtgaggcgttttacagcaaacggatttcccagatcatcattcaaaaggaaggagacggatgggatccacgattaaccggatatgatacatctgcatttaaaaccggaaacgatgacctgttggtggtgtttttaaataggaaaagctatgtggactatacagtgggccggagctttacaggggcggtaaaacgtgcattgtcctatccggtgacgctcacctttcagaatgccaaagagggtgtcatcaagcaggataaactaaactatcagtccattcagtatgagtatgatgaggcagcaggattttgggccgtcaaccaggactatctgcttccgcagcccgcaggagaacaggtgtccaagcctggctataatacattttggacagtggacgacaaaaaattgacagacagcggaaaaataaatattacttcagataatccaatggtagaaatagactatgtcatacagaacccgacaattcaacctgttgcggacggtactgttcaagcggatttccacacattaagcatagatttggatgcggcgggcccgcataccgtaggggtacaggtttcacacccactgctgaaagagcagcagggcacagaggatacctatgtgtatttccaatactgctggtgggatgaatccggagaggaaagcggtgtcaacggccccagaagcagggcggaacctgaattgttttccagctccgctgaaaacggaattctaaatcgtgtcaagacgggaaatgcggtcattcctatcgacggccaggagcatgccaggaccgatggacactactacatggtcgaaatctatggttacctggtggaaaacggaggtaccccggagcttttctacaagtcccatcacaattttattgatttcggttcggactccgacacggaggcaaccgtgagcaggagctatacactccaagtggaggtaactcaggtagagcgccatgcagttctcttccagactggtgagcatggtacgctggaggggacttccaactttgcagtaaaagacgggtccacgatgcgtaagagcggttatcctgtaccgagcgttgctgcggacagcggatacagctttaccggctggctgggaacggatggtataacccgcaccagcaatgaagtgctggatctgacggtcaccggggacatgacctttacggcgcagtatgcaaaggattccggctccggcggcagcaccggcacggcccggtacaccattgaggccagcgcgggccatggcggcgggatcagcccggacg

SEQ ID NO: 4361 - DNA, 1085 bp, Unknown
  gut microbiota DNA sequence
cccaacaatatctttaactaagggaaacgggcgcatgctgccccgatctcgccctgctggccccgctggcccgcctgctggacaccgatctgaacactctgctctccttccgggaggagctaaccggtgcagagatcgccgcgtttacagaggagctttacaccctggcccagagcgggggcatcgatgcggcctttctgcgggcggaggagctgctccaccggtggcctgggtgcgaccgcctgaccatctctctggccatgacgctgaacggcctgttcttcaccctgggcgtggccgagccggagccctacgagcgccgtctggagcctctgtaccgcgctctggccgacagcgaggagccggatatccgggaccaggccctccacctgctcatcggcagacacatgaggcgggaggagtacgccgcggcggaggagctgctctccgccctgtccgaccgctggccccaccgggacgctttgcaggcggggctgctccgccggacaggccgtggggaggaggccgcggagctgtgggagcggcggctgctcaatgccgcgacggaggtctacgagtcattggtaagccttcaggagctggccctccaggcggagcggctggaggacggggcccggctggccgccctcattgaggagacggtggagcgttatgccctcattcccggtgtcgcctcctccggacggctcctacaggccgcggcagagggggacaagacggccgccctgtctgccctgcgggatatgctggaggcgctcaaccgctcctgggacggcggggggctctatccccaccttctacccggcacgcaggtggccgtcgggtccgttctgttgcccggcctgctgctggagctccagcgggagcccgaactggctttcctccaggacgagccggaatttcaggccctgctgaaacgctatggcggcgggacgcattaagcgtcccgccgccccagcttgtcgaaaaagtcctttcgacaagctgctggacttttgaacacttcaaaaaagtgctcaaaagtcgtttgattggacgtgaacggcccaggccggtctctcttg

SEQ ID NO: 4362 - DNA, 6468 bp, Unknown
  gut microbiota DNA sequence
atggatcttctccaccagccggccccgcagggcggcgttcagatccgccggaaagcgggcgtgctcctggagcacctgctggaactcaggggaaaaggtatgggtcagcacgccctccagccggtcccgctgaatccagctctctccctcgcaatagacctcaaagggcacgccctcttccagcagcagctccgtcagcgcctgccgggtctcctcggggatgcagttgcggtacagccactcccccgtgcacacatccagtacggcggctccgttggacagcaccgcatagcgcagcacacccaactgctccgctacctcgtgcaggaatccccacggtcggccgctggcgacggccaccgccgtcccccgctccgacaccgcccgcagggcgcggacattccgcgccggcaccgtggcgtggtcggcccccaggagggtgccgtccatgtccaggcagatgagcttgatgtccgtcatttcttccgcttcaccgcatggcgcaccttttccgcgatgccctccggggtgaggccgtaggcctccaggacggcctccgccttgccggagcggccgaacacgtcgttgacgccgtggcgcaccaccggcaccgggtagtgctcggccaggaactccgccaccgccgagcccaggccgcccaccacgttggcctcctcggtggtgacgatggccccggtctccagcgccgccttgagcaccagctccccgtccaggggcttgatggtgtgcatatccagcacccggacggacaggccctcttccgccaggcgctccgccgccttcagcgccatctgcaccatcatgccggtggcgattaccgtcgcgtcagagccatcccgcagggtgacgccctggcccaggtggaaggtgtagccggggatggcgtcggtgacgctctccaccgccaggcggcccagccgcagataggcggggccgtcatagtccagcagggcgcgcaccgcctgccgcatctcggggccgtcgcagggagagaccaccatcatgttggggatggcccgcatgatggcgtaatcctcgatgcactggtgggtggcgccgtcctctcccacggacaggccgccgtgggaacccaccaccttgacattcagccggggataggcgatggagttgcgcacctgctcccatgcccgcccggcggcgaacatggcaaaggtgttggtgaagggctttttgccgcaggcggccaggccggcggccacgccggtcatgttggcctcggcgatgcccatgttgtaaaagcggtcgggatgggccttggcaaagcccttggtcatggtggagccggacaggtccgcgtccagcaccaccaactccgggtactcctccgccagggccaccagggcctcgccgtaggccgcgcgggttgcaatcttctctgccatgcttactttccctccagttctgccacgcgggcggacagctccgcccgggccttctcatactgctcggcgttgggggccttgccatgccagccgtagtccccctccataaaggacacgcccttgcccttcaccgtcctggccaggagcaccgtgggctttcccttgcaggccgcggcggcggcgaacgcctccgccagggcggcgtagtcgtggccgtccacacggatgacgttccagttgaaggcctcaaacttctgatccagcggctcggagggcatcacgtccgccgtggcgccgtcgatctgcaggccgttgacatccaccacggcgcacaggttgtccaggcggtacttggccgccgccatggcggcctcccacacctgaccctcctcgatctcgccgtctcccagcagggcatacacccggtagtcccggccgtccgccttgcccgccagagccatgcccacggccacggaaattccctgccccaggctgcccgtggacatatccacgcccttgacgtggcgcatttcggcatggcccgacatgtgcccgtcaatacggcggaactgcttcagctcctccagtggaaaaaagccccgctgggccagagtggagtagagcgccggcgtgcagtgccccttggagagcacaaagcggtcccgctccggggcctgcggagcgtcggggctcacccgcatcacgtggaaatacagggtcgtgaggatatccagcgacgacagggagccgccgatgtgtcccgacgccgcgccgtacaccatatccagcgccagcagccgggaacgcgccgccgtcaatgccaggttttgaacctttgcctgttccatccgattcacctttcccatttctcagcccgatggccgtattttgaactgtctgtattaagtatatcgtaccaggcccgcgctttcaactggcgaactgtaaaaaacattggtttctctgcgcggctttggggaaaaaaggggggccggcagggcgcgcaggcgcccccggccccttatttctagtggatgttcttcatggtcatccatcgctttgagcggtagaaccaccagcccaccggcaccgagctggccacggcgacgccgcaggcgatgtagacgccgtagatgcccaggaagtgctccaggacgacagccaggatcagccgcaccacgatgcagttgaggaaggagttccacatgatgaacactgtatgccctgagccggtggccagggtgttgtaggtaaacatgccggcgtagaagagctggcagacaatctcaatgcgcaggttgaccaccgcccagtgctgcacctccggatcgggggtaaaggtcatggcaaactggggggcaaacacctcggccaccacgataatcaccgccgccatggccagggccagcttcatgcaggtcttcatcacctgctcggcccggtcatagaggcccgctcccaggcactgggcgcacatggtgcccgcgccagtggtcagggcggagaggaagagctggcagaagtcgcggattttgttggacacgccgttgccggcggagacggtgacgccgtacttgttgatgagggtgagcaccaccagccaggagatggaggcgatggtccactggagggctaccggaaagcccagcttcagggtgcgtttgaccatctccgcctcggggcggagatagcggggcagcaggcccagatccgcccggtggcgcagggagaacaccagagcggtcaggcaggatatcgcctggccgatcacggtggccagggccgcccccgccacccccatgtggaaccctgccacgaacaggatatctagcaccacgttgaggctcaccgacgcaatgatgcagtacagcgggatgcgggagttgcccaccccgcgcaggatggcggagagggaattgtagacaaagatgaacagcaggcccacgccgcagatgctcagataggcggtggcctcctccagggtgggggactggagcaaaatcagcagcggacgtcccagcagcagaatgcccacagcaaagagcaggccggcgatgaggcccacggtgagcatgttgcccgcggctttccgacggttctcgtggtcgccgctgccgaaatactggcccaccagcacattcccacccactgtcagcccaatggccaattgggtgagcatattcataatgatgctggcgttgttgatggcggaaattcccacatcaccgatgtagtgcccggcgatgatgatgtccgtaatactataaatagcctgcagcaggctggacgccaccagtggcagggcataccggaccagcttgcgcgtgacgctgccctgggtaagatcctgttctacagcgggcatagcgtaccccctccttatatgcgttcaattccccgtttctttacacgtttttaaagtttactgcggatttcctggcaaggcaatactaacttttttgtcactaccacacaaaaacggacggcttccgccgcccgtttcctataataacgcaatatacgtttactcctcgccctgttccacgccgcgccggcgctcccgcccgggccagaagttgttttcccgcatgatgtcacccagtgcgtccacatacttctccgacttgtgcactacaaaggcatccgcatcgatggggattctgcggtcgtgcatctggcggatactccagatatagagtatgtccagagcagggatgagctgctccccgctgggtgtgagcacatactccaccttgggcggcaccgtgtcgtaggagatgcggcggatcagccccgcctccaccagctccttgagctgctggctgaacaccttttccgagatgggcaggattttaagcgtctggttaaagcggatactgccgtacgtatagatttcatggagaatggtcatcttccactttccgccgatgcagtgcaacacatagtgatagggattagtcggtgtgtcaaaattgtccgctttcacaggcgttcacctcattttcttttgtgatacaactatataaagatagacctgcattatcatatcacacccccaccactcccacaaggaaaactttttccgccccactgtaacgcgccaaaattttttgctgaaatttgtgcaacctatccaacttccacagagatacacttttgtaccgaatagtttacacaatatccctttttctcttttattcgaattatacaatttcggagcacttaccttttggtacgtgcaaacctacaggttatctacttacataattgtgggtattgcacaaatttttattttccgatacactacggctcgaaaaggaaagcataagttccaattcatcgcattggtttcctgaaaatgctgacataagaaggagcggatttcaaatgatcaagcgtacttatgaagagctggagccctatttccccgccggtcattttggcgtgacctgcaagcgctaccacggcaaggacgagaccggcgcccagaagttctggatcggtgtgtccgagttcgagcccgacggcggtgctgactgggcctacgacgacaaccccctggagaaggtctacttcgtcctggagggcgagatgaccgttaccgacaaagacggcaacaagtacgtcatccacaagaacgagtccatctccttcccccccaacgagggccgcggcctgaagaatgagagcggcaagcccgccaagatgctggtcatcatcaattatcccgacgcgcagtaagtaagaggaggaagcagaaatggtcaacgtgaagaaagagttcgtcgacaacatgttctccgtgaagggcaaggtcgccctggtcaccggcgccaccggcgctctgggctgcgtcctctccaaggcttacggctatgccggcgccaaggtgttcatgaccggccgcaacgagaagaagctccaggctctggaggccgagttcaaggccgagggcatcgactgcgcctacggcgtggccgatcctgccgacgaggcccaggtagacgccatgattaaggcctgtgtggcccagtacggcgaggtcaacatcctggccgtcacccacggctttaacaagccccagaacatcctggagcagtccgtggccgactggcagtatatcatggatgccgactgcaagagtgtctatgtagtgtgcaagtatgttgcccagcagatggtcgaccagggcaagggcggcaagatcgtggtggtcacctcccagcgctccaagcgcggcatggctggctacaccggctactgcacctccaagggcggcgccgacctgatggtgtcctccatggcctgcgatctgagcgccaagtacggcatcaacgtcaactccatctgccccaccgtgttccgcagtgatctgaccgagtggatgttcgatcccgagtccgccgtgtatcagaacttcctgaagcgcgagcccatcggccgtctggccgagcctgaggacttcgtgggctacgccctgttcctctcctccgacgcctccaactacatcactggcgccaactgcgactgctccggcggttacctgacctgctaagcctggaaggaagtcgagcagcatgaaagaaatcaagaacattctcatctgcggcgcgggcatgatgggcaagaacatcggctatgtgtttgcgtccaaccccagcttccaggtgggcatgtacgacctgtaccccactgatgtggaggcgggcatccgcaccaacaccaagcagcttctggacaagggcgtcatcaccgagcaggagctgagcgaccgcctctcccgcatctcctttaccaatgacatcgacagcgatctggtgaagaacgccgatctggtgatcgaggccgtcttcgaggacatgaagatcaagcgggagaccttcgccaagctggaggcgcgctgccgccccgacaccatcttctgcaccaactcctctgtcatgagccccagcgagatctccgccgagctccagcaccgtgagcgctttgtgggcactcacttctggaaccccggccacctgatccccctggtggaggtggtcaa

SEQ ID NO: 4363 - DNA, 1582 bp, Unknown
  gut microbiota DNA sequence
ctggcgggaggccatctccatcgtggagaacggcatcgccgacgccgccaccgtggatgaggcggtgcgctactccttcggcctgcggctgccccagctcggccccatggagaacgccgacatggtgggtaccgacctgacctacaacatccacgactacatcctgcgggatctggaggactcccacgagccctcccccctgctcaagcagctccgcgacgagggcaagatcggcttcaagaccggcgagggcttccagaagtggacgcctgagcaggttgcccagtccaacgccgagctcaatgagtatctgattcggatgctctacggaaagtaaaaactttccctttccttttgtcccacactctgctatgattatccaaggaggaactttatcatgggtaaaaaagtttatgtggacctgacccatcccttcagcgcggagattccccgctggccctactttgacaagcccgagatcaccaacgcccacaccatggccaagggcggcgtgctcacctccaagatcacctgcaccatgcacaccggcacccactgcgacgccccccgtcacgtcatggagtacgagtttgacggccgccgcgcccgctacacccacgagatgcccattgatgcctacaccggcgaggctgtggtgctgaagctggacgtggagccctggaccctgatcaccgacaagcacctggacgaggcctgcaagaagtgcggcatcgaccccgcctccctgaagggcaaggttctgtgcctgaacaccggcatgcaccgcctgttcgatgactccaaggcctactatcactactccatcggcaccggcatcgacgccggcaagtggtttgtcaagcacggcgtcaagtgcgtcgccatggacagccaggccctggatcaccccctgcacaccgccatgggcaacaacggcatgacccgcatgaacctgctgggcgccaccggcaagcccatcaccgaggagtacaaggagctgttcggcgaggaggcctatgccgagttcgacaagttcgagtacatccgcatccacggccaggccgcctacgacgagaagttcggcgagctggaggatctgggcgtatggggcacctgggagccctgccacaaggagatgctgggccacggcatcgtgggcgttgagaacctgggcggcgatctggacaagatcaagccgggcaaggtcttcaacttcttctgcttccccctgcgctggtacatgggcgacggcgccatgtcccgctgcgtggccttcatcgacgaggacgacgtggatgccagcgtgcccgaccgcacctacaaatacggcggcaccggctacgccgatgagtccggccacggcgacagtggtctggagtacatgcgcaagctgttcaaccgcaacaagtaatgcaaccggattgagttccacccataccgtaaagcggcgtgcgctatgcccgccgctttacgtgatgtccacaccaaatggagaaaggacctgaattccatgagcgagctgaagaacaagacgatcatcactgtggccactacgggcgcctggcccaccaaggccaacaac

SEQ ID NO: 4364 - DNA, 205 bp, Unknown
  gut microbiota DNA sequence
ccgggcatcgcccgcagcatgggcctcaagacccgcgccaccttcgaggaggccctggccgacgccatgcgcaagtacactggccccaaccccaacatcctggccctgccccgcaccttcaccaccgccgccgtccacctctgcatgaaggaccctgcgctcaactccgcccccgtgggcggctgcccctgcggcggctgagccg

SEQ ID NO: 4365 - DNA, 16280 bp, Unknown
  gut microbiota DNA sequence
cgggagggaacctcccgtggggtgagatgcgcagcccgggccggacgccgcgaaccgccaagcagtttatcgccagcctgagcgtgcggagagggcagatatagaaaacaggccgccccatggggcggcctgcgcggtttgaagcgggtcaatcgtcaaattgcagcagcttgtagggcggaatctccagcgcttccgcgatgaggaaaagggtgctcagggaaatgcccactgccatgccgggggcctccacctgggagagaaagccggggctgattcctgcgcgctcggccaactgctcctggctcagcccccgtagctttcggaagtaggagatgcggatgccgatggcgatatagtgatcccgaaaccgggcgttgtgctcctcttttttcattgcgtctcacccttatgtaagggtatcatcttgacagatagattattacatgctaaaacatagatattactagtatagaactagtataactgcgtgtatagcagaggcagaccctcactgccgcaaattgcggttgacggcggggccgggctgtggtacagtacatgtggaaagcaagctttacaattcgacgagaggagcacatgacatgaagcacaatcggatgcgccggctgctggccggcgtcacggcggcggccctgctggccgcgcccgcgctggcggcggaagataccgctccggcccctcagatgcccgacgcctgggcggtgggagagctggcggacagctacgccatggggctggtggacgacaactacactacgtacattcagagcaccatcaccagcgagcagctctcggccatgaccggcatcgtggccgacaagctggccctgctggagctgccccagcgggcggcggacaccgaaggactggtggtggacaccacccgcggcggcgtgatgaacgcgctgtaccaggaggcggccgcctacgacatcgacggcgtggaggagggggccgcggccttcctcaccggcctgggcgtggtcaggggcgatcaggccggcggactgaacgaggaccggccctgcacctatcaggaggccatggttatggccgagcggctgatcctggccctctatgacgccaacgacgccggctccagaggtctgctgtggaaggccgtcaacggggacaacaccctctacctgctgggcaccatccacatggaccgcagcaacgtctatcccctgcataagtcggtgcgggacgccctggacgcctcccaggtggtgagcttcgagctggatctcaacgaccaggagggcatggccctgctggcccagctccaggcctactccgacggcaccaccctggccgaccacatcagcccggagctgtacgcacgggtgcaggcggcggcggtgagcctgggcatggagcccaacggctttgacgcatataagccctgggccctggcctccaccttcggcgtcctgagcctccaggacgacaccaccggggccaacgccatggcgattgatgtgtatatcaacgcctacgcggtgaacgcgggcaagaccatcgactccgtggagacctacgccttccagggcggcatcttcgacggcctgtccgccgagtaccaggaggcctatctggacgccagcctggccgggtacgaggggatgctcaacggcgaggcggccgacgaggcggcccaggcgctggcccaggcccagcaggagcagattgccgccatgttcgacgcctggaagaaccgggaccccgatgccctggcggaggtctacgacaaagaggccatcctcaacagtgatgacgagctcaactccaagctgttcaccgagcgggaccccggcatgattgccgcagcggcggagtatctggagaccgagggggagaatacgttcttcctggccgtgggcgcgggccacatggtgaatccgggcggcattgtgtccggcctgaaggagctgggctacaccgtagagctggtaccctgaatacccgaataaaagatatgggccgccgcacgcaacgggtgcggcggttgaggctaccaataaaccctcctgccaaaggcttcggagggaaggatagtgtgaaagggaaccgtcagggttccctttcacgtttgattaaacgactttttgaagctcctttagagcttcaaaaagtccggcagcctgttgaaaagtctttttcgacaggctgggccgccgcacgcaacgggtgcgtcggcttttctgtgccggggcgaaaacttctgattgctttctacaggggtggatgataggataaaggaagaatatgaaaaccggagggtctgccatgattttcaagggcaactttttatacactcccgcgctgggcgagctgaccgtgcgggagggggagtacctggtggtagatggggagaagtgcgccggcttttaccgggcgctcccccaggagtacgccgggcagtcggtgaccgacttcggccgggcgctggtgctccccgccttctgcgacctccacctccacgccccccagatggtgaaccggggcgtgggctacgaccaggagctgctgccctggctggagacctacaccttcccggtggaggcccgctacggcgacgcggactttgccgaggcggcgtggaagcggttcctcaaccggatgtgggccaacggcaccctgcgcttttccgcctttgccaccatccacaaggaggccgcctggcggctgatggagctgaccgagcgggcggggctgtccgccctcatcggcaaggtgaacatggaccgcaatgccccggacagtctgcgggaggacaccgacgcctccctggcggacacggaggagctcatctgccgcagccgggcggagctgaagcacgtggggtatatcctgaccccccgcttcgtcccctccaccaccgcccggctcatggacggcctggggcggctgggggagcggtacgggctgcccgtccagtcccacctgtcggagaaccggagcgagatcgcctgggtgggccagctccatccggagtgcgccagctacaccgaggtgtaccgggactacggcctgctccgccgggggtgcaccatcatggcccacgccgtccacctcaccgggcgggaggaggccattctccgggaggggggggtcaccctggcccactgcgcccagtccaacaccaacctgtccagcggcgtcatgcccctgcgccgcagcctgtcggaggggctgcgctgctgcgtggccagcgatgtggccggcggccacgccgccgccatgaaccggcatgtggcggccacggtggggctgtccaagctccgggccctggaccacccggaggagcggcccctctccctgccggaggccctctacctggccaccaaggggccgggggaattcttcgggaaggtgggttcctttgagccggggtatgacttcgacgccctggtggtggatgtggatgagctggacggccgcctgtcccgcaccccctttgagaagctggagcagttcctctacgacggggacgaccgggacattctggcccgctacagccggggctccctggtggaaaagccctttacggaataacggaataaaagaccgccccggagcgcgtgcgctccggggctgctttttccgcggaggagggcgggggagagtcccggcgctttttctttacttccgatgggaaacgtgctaaaatacccccgactggtttccaaacccggtccaagcgcggccacggccgcgttcgttcggtgggactcaccgccgttctctaaagactaaaatggaggtatgatcacacatgcgcaaatccaacatccaacagctcaccctggccgcgatggtggccgccgtctacttcgtcctgtgctacttcggcaacatctttcagctcaccttcggaccggttcaggtccgcttgggggaggcgctgaccgtgctgcccttcctgttccctgccgccgcgccggggctggcactgggctgcctgctgaccaatattctctccccctatggtcccatcgacatgattgtgggcaccttggccaccgccatcgcagctttcctctccatcaagatgccccgttggtatctggccgccctgccccccattgtggtgaacgccctgctgctgccgcccatgtgggcttgggcggaggcaggggctatcaacggcgctttctgggcggcgtatggactgaacctgtggacctttgtggcaggggaggctgtggcctgctatgtgctgggcacgattctcctgaaggccctgcccagggttcggtatttccgccccatgattcccaccgcacatctgcaataacggcgggcggcgttccgcccgctctgctggaggttttttgttatgaaagttcgtaaggccgtcatccccgccgcagggctgggaacccggatgctccccgccaccaagaccgttcccaaggagatgcttcccatggtggacaagccggtgatccagtacatcatcgaggaggcggtggccgccggaattgaggacattctgatcgtcaccaaccgggccaagtccgccatggacgattacttcgactactaccccgagctggagacccgcctgctccagtcgggcaaggagtccgagctggtggaggtgcgccgggccgccgacctggccaacatcttctacgtgcgccagaaggagacgaagggcctgggccacgccatcggccgcgcccgccgcttcgtgggggacgagcccttcgccgtgctgctgggcgacgacatcatgcgggccaaaaagccggtgactctccaactggtggaggccgccgagaagtacggcgcgtccgccctgggggtgcaggaggtggctactgaggctatctcccgctactcctccgtcaaggtctcccccctggaggagcgcatcttcgacgtgtccgacatgaacgagaagcccacccccgagcagaggctctccaactacgccatcctgggccgctatgtgctgactccggagatcttcgatattctggagaacgtcaagcctggttacggcggggagattcagctcaccgacggcctgcgggagctgtgccggagaagccgcatggtggccgtggactttgagggccgccggtatgacactggcaacctctgcggcttcctggaggccaccatcgacttcgccctggatcacccggccaccggtgcgtggctcaagggcttcctgaaggagaaggccgagacgctgcgccaggagcgctgacaaaagaacaaaagaaacgcggcgccccaggcattgcctggggcgccgcagacgggcgaaaaaccttccaggaaggaaagcctcgcagaattcctgcggccacagccgcaggaataacatgaaaatcagtcatttccggggacatgcgccccggaaatgacacttccgcgcaagatgagccgacttttccgtcgggaatcaaggttcatcttgcgcgcatctccctcgaaaaagtggctcttgccgcttttccgacaagcagaacccctccggtttagccggaggggttgatttattccggggcgggggactcagcggcccacctcgatgccggccagataggcgctgcgggtggcctgatccaccttgccgggctggatggcgtcgccgatgacccaggtcttgagtccggcggcctcggcggcggccttcaggggggcgatgtccacgctcttcatgcccagggcaaagaggacggtgtcggcctccagggtctggacgccgccggcgttctccaccttcacgccggtgggggtgatctccaggcagcgggtcttgggcagcatggccatgccgcatttctccatctcccagatcagggcctcccggtacatgccgaaggactcgttggccagccggcccagcagctccaccacggtgacctcgtggccggtcttctggaggaagaggccggcctcgcagcccaccaggccgccgcccaccataacaatcttgtggccgggcttgaccttgccgtcgtacatgtccatggccttgtgggcgtgcccgatgccgggcaccgggggacaggagggcagggagccggtagcaaagatgacgccgtcggcgccgaaggaggtgatgttctccggcgtgatcacggtgttgagccgcacgtcgatgtcacggcgctccacctcgcgcaccagcaggttcttgaagttcatcaggtcgggcttgtcggtgtccacgtcggtgaaccgcagcaggccgcccaggcgggggccctgctcggccaggatgaccttctggccccggtcgcaggcggtgatggcggcctgcatgccggctgcgccgccgcccacgatgagcacggtctcctgcttggaggcgggggccagagtgtcgggatcgaagggcaggtgggccagggggttgatggtgcagtggcccacgtagagggccagctcctcgctggtgaagggcaggtcgtcatagccctcctcgggggagccggggaagcacttgtagcagcgcaggcagcggcggatctgatcctcatggccgcgcttggccttgttggcaaactcggggtcggccagcatctggcggcccaggatggcaaagtcgatcttgccctcggcaatggcctgctcgcacagctcgggggagttgatgccgcccacggcgcccacgggcagtttggtgtacttcttgatgatggcggcgttgtcgatgttcaggccgtgggggtggaacatggagctctcggtgcccgacttgaccgacgcctcatagataccgcaggtcacgtggacggaggtgatgtagggctcggccatggcgacgaacgcgccggtctcctcgggggtgatgccgccgggctggtggtcggtgccgtcgatgcgcagctccaccaggaagtcggggcccaccgcctcccggacggccttcagaatctggagggggaagcgggcgcggttctccagagagccgccgtagctgtcggtgcgggtgttcatcaggggggagaggaactgggtgaagaggaagccgtggccgccgtggatgagcacgccgtcaaagcccgccttctgcatgtaggtggcggagacggcgaagtcgcgggcgatgcgggccatgtcgtcctcgttcatagggcgcaccttcacgccggccaggttggtggtctcgatggggccgatggcctcctgcccggggccgaagggcaccttctccttgccgcagtggaccagctcggccagagcgacagcgccgtggcgcttgatgcggcgggcatactcgcccacggcgtcaaaggtctcgggatcctcctcgggcttggcaaagtcaaaggggcggaagccggggatgcgcacggcgtccacaaagtttacgtcggtctcgcccacgatgacgcagccgttgccgcccttggcgctggcctccagcttgcggtaggtgaagtcccgggcatccgggttctgaacaatgaggccgaaggccatgggggcgctgacaatgcggttgcggtaggtcaccttgcccacctgcatgggggaaaacagatgctcaaatttcatgacactcagactcctttcttagatgccggggaactggatgctctggtacttgggcaggcgctcggccaccagctggcgcttggccggatccaggaagaagccgccctgggtctcggcgatctcgtcgcagtgaaccccgcggccctcctcggtggtgcggtcacgctccagcccgttctcggcgatgacgaatttccagcgcccgtcctcggtctgctccagggtgccgcccgcgccgcacaccacgcactcgatggggtactgtagccccttccactggggctcgcccaggcacagggcgttggagtggcagttggggcaccatccgtaatcgggatcgcccagccacttgcgctcggcggggggcgtgttgagggccttcatcacgttcaggcccatctcccgggcccgggccaccttctcctcgtagagaagcacctgggcgggggcgggaacctgggtggccatgtacatgtccacaattttgaagctgttggtgaaggtggtggcctgcatgcactccagggccatggactgccaggagcgggtggagccgcccacggcgatgagcgcgcccacccggtcccggggcgcgatggcgccgatcttggtcaggaaggccgactcataggccaggttgcggtgcatgaacttcaaaaacagggaggagggcatcagatcataggtgggggcggagaagatcaccgcatcctgctccagcatcacatccatgattttctgcttgtcgtccttgtccgccagggaacagccggtgttcttccccatggacatgcccatggtacaggcggtgcagccgttgcagtccagcagctcatagtccttcagattgatcatgcggacctcggccccctgctcccggcaggccagaagagcctccttgagcaggatttcacagttgctgtccttgcgtccggcggtcacgcccattacttgaaacgccacgcgcatcactcctcttttataatcgggcaaattgtatcactccgggcgaaaaaagtgaaattcacgttttttccaggattgataaaaaagcgttatcaatttataatacgagcagggagaggagggagcgcaatgaacaccgagcagcttcgctatttcgtgtcggtagcccgttaccggaactttaccgagacggcgcgggaattctatgtgacgcagcccgccgtgacccatcagatctccgccctggagcgggaggtgggcgcacgcctgtttctgcgcaccacgcggaacgtgtcgctcacccgggccggggagctcttcctggaggacgccaagcgcatcctggaccaggaggagcgggccctgggccgcctgcgccagctggagtcctcaggatgttgggagctgcgcatcggctacctcaattccccctcccgccactttttgccccggctgatcgccgcctatcgggaggcgtatccccaggtccgcgtggagctcatccggcgggacgccaccggcatccaggcgggcatcgacgcggcggcttatgatgtgagcttctcggtgctctccgacttgaaggggatgaacggctacgcctgccgcaagctgggggccgacttctactgcctggtctgcccgcgggagcacccctgcctggacaacgccgtgatcgactacgccaagctggccacggagccctttgcctgcctgtcccacaccggcggggcctatatgtataagcagttcctccagatctgccggggactgggtttcaccccggcgtcggtcaccgagtatcccgccctggaggatgtgatctttgccgtggagtgcggacaggcaattgccattctccctttccggattcgggagtacatgcataccaccggcctggcctttgtcccgctggaggggcatgggcagaccatcgagctgggggtggcgtggcgggagcccagtgacaatccggccgtggagtggtttatggccatggtcaaccgctggcttctggagcatccggagctgttttaacgcagacgcaaaaaagtaccgtcaggcggcagcgcctgacggtactttcgggtacggagcggtttgcgaaaggaattagtcgtagatgctgtccacgtcccagtcggtgatgacgccggtggcggcgttgatgtcgcactcatactccatggtgcccgagaccatcttgatctcatagatatagcggccgtcgtcccagtccaggtggcagcgtaccacggaggcgccggagggggcttttgccaaagcgatctccttggccttggcctcgctgatcagattgttggtggaggtgctaggggtggaaggggtggcggcgttgtttccgggattccacagggagaaatcatcccagtcatggtcataggagcgaatggcgcctgtcgtggcgtcgatgctgtaatcgtactccgtgttcccggcgtagaattccacctcgtactcggtgcggccgtcgtcccagtccagtccggccttcacgaagatggcgtcggcggccttcacgccggcgtggttcagggcgatctccttggccttgtctacggagatgtagttggaggcggagggggtggaggcgatatagcggtcgggggtggtgaggacggcggtatagttggcggagtcaaagtccaccttcaggccggcggcctcacagatggcgcggacgggggcgtaggtggtgccgttataagagaacagggggacatccctgcccttggcgtccttgggggagaagaccgcaccattgagggtgatgcggatgttgtcatccacggtgatggtgcggctggccgccatggccgacacacccaggcccaccgtcagggcagccaccagaataccactgcaaaagccttttccaaaaccctttttcatcatcaaaactcctttatcctgtcaaatctgcggcggggtttcccgcccgttctgacagtaaaatgaagcagaggggccgtttattgcacggaagcaaaaaaatattatttttttggaaaggcttgactttttcgctgattcctatataataatatagcttgtttcaaaacaggccatccttgcccccgcacaagggcgggggccatacgtccataaggaggtgcaaagaaaatggcaaaactgagcggaaactacgaggtggtctttatcctcaatcccaacctggatgaggaggccacagctgccatggtggccaagttcaagaccctggtggagcagaacggcaccctggctgaggttgaggagtggggcaagcgccacctggcctatcccatcaacgacctgaccgagggctactacgtgctgatgaccttcaacgctaagcccgagttcccccgtgagctggatcgtatcctgcggatcaccgacggcgtgatgcgttccctgatcgtctgcaaggacgagaagtaagaagggagcggcagacatgctgaaccggattattctcatgggccgtctgacccgtgatcccgagctgcgccacacccagacggggacccccgtggcctccttctccctggcggtggaccgggacttcaaggacaagaccaccggcgagaagtccacggacttcatcgacatcgtggcctggcgtcagaccgccgaatttgtctcccgtttcttcactaagggccgtatggccgtggtggagggccggctccagctccgggactggaccgaccgggacggcaacaagcgccgcactgcggaggtgatcgccgacaacgtgtacttcggcgactccaagcgggacgcggaggcgggcggctatgccgcgccctccggcgggttcggcgctccggccggcggctacgcgccgcctcccgccgcgcccagcggcggctactccgcccccatgggcggcggcgatcagttcgccgagctctctgacgacgacggggagctgcccttctaacacattttgcgcacgacagtcggtgcgcagcaataaaacaagacgggctgaaggcccgtgaaaaaggaggttccctgttatggctatggatagagagcgcccccgcggccgcaagcgccgcaaggtctgcaccttctgtgtggacaaggtggagcacatcgactacaaggacgcggtcaagctgcgccggttcctgtctgagcggagcaagattctgccccgccgcaccaccggcacctgcgccatgcaccagcgtcagctcactgaggccatcaagcgcgctcgtcagatcgcgctgctgcccttcgtgaccgactaattgcagaagcaaacgagaggccagcccttcggggctggcctctcgttgtttgcattgggggacggcgggcggccacaagggccgcccctacaaactggtaggggactttgtaggggcggggtttatccgcccgcctcctatgcgttcgcgggcagctccggcacggcggcctccgggaaggagaccacggccttgaagagatcaccgtcgatatccaggcggaaggcgccgccctggagctcggtgaggctgcgggcgatggacaggcccaggccggagccctcggtggtgcgggactcctccccccggacgaaccgctccatgagccgctcggcggggatgttgaggggctggcgggagatgttcttgatggacaggaccaccttgccctcccagcggcacacctccacatagatgcgggtgccctccagggcgtacttgttgcagttggagagcaggttgtcgatgacccgccacaggtggcggccgtcggccaggatggagcactcctcctccgggaaggcgggtaccacagtgagccggctctgggcaaatttttcctcaaactcccccagggcctgctggacgagctgcaccatgcccagccggtccaggtgcaccgacaggcttccggtggacgccttggacgcctccaccagatcctccgtcagcttcttgaggcgctggctcttgcggtccagcacctcgatatattcctgggccttgggattgtcgatgtcctgctttttcagcagatccacatagttgatgatgctggtcagaggggtcttgagatcgtgggagacgttggtgatcagctcggccttgaagcgctcgctctggatgcgctcgtccacggcatttccgatggcggcgcccaaatcgttgagctgcccggcgtgccgggccaggtcgctgtacattttgtgggtgtcgatcttgaagtccgggtcgccccccacgatgcggccggtgccctcccgcacccgcttccattggatggtccagcggcagaggcagtagagcacaaagccctgaaacacggggatgaggaagatggtcagcgtggtgagcagggtgccggccaggtagagcagaaagagcaccaccacccggcccgtcatgggccagctccgggccgccgcccggcagccccgggcgatcagcttgcacagcatacagatgagggtattgctccacagggtgcgggtcttgatgcgggtggccacggtaaggcagaaggccaggacacagcccagaatggctacggtgatgacacacatgccgaccagcaggtcggtggccagttgggatacgttgaggccgaaggcgatcgcgtcccccgcgttgagaaggagggcgatggcccaaaacgcgccgaaggccagcagatccagcgggatgcggtcgaaccagttgcacctcgggcggctctcctccttccgccagccggcagcccggagcagaaacaccagcaggagtatccctgcgatgtccagcaccagggccagcaccgccagggcggggaggtagctggcgtactgctggtagtcctggtaactgtcccagaactcgtcctggacggtgagcgggtcggttgcgccgtattccagggccagcacggaggtggtcacccggctgtccatctgctcgtcatagttccaggtatagccgtcaaaggtgtagccgtattgggcggcgagcccggcatcctccggggtgacgagctgcttggtgccagcggcgtcgggaagggcgatatagaggaggtagtactgctccttaccgttccagaccacataatcctgctcgcgggcggccccgttctgggtgagggagagctcctcctgctccacagcgtgaacgctctcgtccagggaggccgccccctccaggttggagtagacgagggtgccggtgtcgttgcgccggatggcaaagcggaagttggtccgctccggagagagggcctcctccagcatgtccagccgccgctggtccaggtagggcagggcgccgttccactcctggttttggagcagccgggccagctcgtgcacctgactggagcggttatacaggtcggagtaatagtcgttgctgtcgtaatacccgctgcccagccacagggtatcccactggtagaggataaagacagtggaccagaagccgccggcgcccacggccaaggccagaaggacggcggccgtcttggccgccagactggttcggaatcgtttcatggcattacctcctggaatatgggcggggtgcggccggagcgagcgccccctagaccttttccatcttgtaccccagcccccagaccaccttgatgtaccgggggttggccgggtcgatctccagcttctcccgcaggtggcggatgtggactgccaccgtgttttccgagccgagagaggggtcgttccacaccagctcatagatctggctggtggagaacacccggccggggttcttcatcagcaggagaaggatgttgtactcgatgggggtgaggctgaccccctccccgtccacggtgaccgatttggccccgtcatccagcgcgatgccgccgttggtgagcagggcgggattggcctccccgccgccctgcttgccgcccaggctggtgtagcgccggagctggctcttgacccgtgcgatgacctcgatgggattgaagggcttggtgatgtagtcgtccgccccgatgttcagccccaggattttgtcgctgtcctcgctcttggcggtgagcaggatgatgggcacgttgcagctctcccgcagcttggccgtggtgcggatgccgtccaggccgggcatcatcacgtccagcaggatcagatccaccggctcgcgctccgccaggcgcaggcactccagcccgtcgtaggccttcacggtggcatagccctcgctggtcaggtagatgtccagggccgagacgatgtccttgtcgtcgtcgcagatcaggatggtattcatacagtcacctcagattgtaaagtcagtatagcagacgaagcttaaggggcgagggggaaaatctttaaaaagcgtttaagaccccggaacattttaccccagaacccgtctaaaaagcaaaccatattataaaaggagggggttccatgaagaaacgaaagctgctggccctgtgccttgtgccggccctgctggccgggtgcgccgccccggcgggggtgaccgacctgtcccggcagttcgaggcgggcgaccccgcgcccccggaggccgacccggcggcggacgccgccatcggcagcctgggggcggagctgctgcgggcggcccgcgaaccgggggagaacaccctgctctctccactgtctgtggccctggccctgtccatgacggccaacggagctgcggaggacaccctggcggagttcgaggctctgctgggggcggacgtggaggccctcaatgccaacgccgcctctctgctggctgattacgccgccctggggggctccacggagtgctccatcgccgacagcctgtggctggacgggcggctggaggccaacgaattattcctctcccggtgtacggcgttctatggggcacagctctatcaggccgatctggacaccgacggggcccgccgggcggtgaataactgggtgggggaggtcacccgcgggctgatcccggaggtgctggccgagacgcccgcccccgagaccgtcctgctgctggtcaacgccctctacctgaaaaacgcctgggccagtgaatttgatccgctggacacccgtcccggggactttaccgccgccgacgggagcgaagccgagacggatttcctctccaacggcctgcgcgccgagcaatacttcgccgcggagggggccgccggggtggtgctcccctatgacgacgggcggctgggcttcctggccgtgctccccgacggggagctggacgcctggctggagacgctggacggggataccctgcccgccctgctggcggccgcggaggaggaacgggtgcttctccggctgcccaagttcgaggcggagtggggcggagagctgtccgacgccctggccgccatggggctggagaccgccttcgattccggccgggccaacttttccgccctgggcaccgcgccggacgggccgctgtacgtcagttccgtcgtccacaaggcccgcatcgaggtcaacgagaagggcaccgaggccgcggcggctaccgtggtgggggtagacggcgcggccgcgcccacagactaccgggagctggtgctcgaccggcccttctgctacgccgtggtagatttggagcggggcgtaccgctgtttctgggtacctttgagcggccctagcgggcggggataccccccctacaatgccggaggagggtaagcctgcccgcaggggcggcccttgtggccgcccgccccttcgagccgggtggtgtgcgcggctctgccgattgcgggcggggat

SEQ ID NO: 4366 - DNA, 134954 bp, Unknown
  gut microbiota DNA sequence
tctacatcgggggtctcctctacatcgggggtctcctctacatcgggggtctcctctacatcgggggtctcctccgcgttcaggcgcagcagagccaccggggagggtgcagccgcttccgccccggtggcatcctccgccccgtccggggcaggctcggctggcgcaggctcttccgtgggtgcgccggtctcatccggcggggtctccgtcccgtcggcagcttcctccggcggcgcagttgtctccggctcggagggggcgggctccgcctcaccgccatcctccggcatatcctcatccggaagcgcctgctcctccggcgcgctgttttccgcgccggttggaacgccctcccagctccagtagtcaaatacatagagttcatccggcgtggccgtcagggtgtactgatccgcgccgccggaagaattttcataagtaaatgcggccgttccgttcgtctctgcattcactgtgggaacacggcgctcccggaagtaggcggtaaagttggtgttctccgtcagggtcacggtatacggattctcatagatgggggaactgctttcccccgccagccagtagtcgaacgcgtagccatccgcccccatagcggctagcctgtatgtttcaccgcctatggagaacgctcccgcagttcccttgcctgcgtctttcacatttacggtggcggagtactcccccttttcaaaaacaggcgtaagtacaacggtcgcgccgttccatcctctggagcccatcagagtactcctacttgttcgtgttacctccagcttgctgtcaacaacagtaataacatttttcgttccgcttggacttagcttgatagcacttagatggctgttttcatcatatgtgagatatccgctgtccagcccctctacgttccagctacaggttatgtcctctcccaaactgatcgtcgttgcaagaacatagcctgttccggaaatgacaatttcatttcgtttctgagcctctataggttttcctatcagctttccgcttacctctcctgcataatttgtcagatcaatgacgattgtaacagaacttgccgccatggcggcaggactgcaaagcgataacaggagcgacacggccaacagcaaggaaagaatttttttcttcatcacaaactatggaacctcccaggcaaagccttccaggctttgccgaaaaatacccctggccgccgagcacatcggcggccaggcgcttcgtttctcttcctcatggagtgggcggagctccgcccactccagtcagtcgtgcaccacgtacaggtggttatagtcattgccgaagacagcgtagccgttgtcaatggccatgccgcccagggcgtaggtgtcgcccgttgtgccccaaaccttgctgccagtcgtgccaccgtcatagctgtagcagtagccggcacccttctgggcgttggtgttgaagtacaggtagtcggtgccggtgccgtcgcccatcaccacgatggagctctgaacggggaagccggaggccaccggagcgacagaagggatatagctgctaccatcctcaccaatagaaaccgtgacgcactggacgccgccatcactaaagccagagtagtagcccacatagatgcggtcgcccaccttggtgggggtagatgtagatgtaacattggtatcaggatcaggccccagcttggccttccactcgaccgtcagcccgtccttgtaggagcagcaccacaggtatccgccctgggtggtgaagtacaggaatccgtcttcgtccatcatgacggtggagcgcacattgcccgcgtcgctggccacatcggtcagatccagcacgccgccggttgtgtcaaaatccgcgatgctccgccagtacagcaggccattgtcgctgccgaagtagacgttggtgccgtcgctcaccgcgccggcccagtagaagccgtagctgtcgggggtgaaggtcttcaccgagtagtcggagagcttgacctgatagtaggttcccgcgttgctgccgccgggccaggtgccgaagtacaggtaggtcccgtcggtggtgatgggggtgttgatctggccattgatgccggtcaggacattcgtcacagtgggtttgttctgatccaggccggtaagagccataaccttgctgccggtaccggtaagccactcaccgccctcgtagtcgtcatactggctgatggtacccacatagagggtatcgtccgacgcgtcgttgggggtgccattgtcgtccagatagggggtagacagttggaagccgctcttggcgttcagagaggttccctccgtgccgtagggatcggtagtccagacgatgctgctgccgccgttttccgcgcacctgatcttggctaccagcgcgccgctggctccatagccatcgtagagaacgtaagcataggtagtcccgttcaccgtctgcaatacgggcacgttgtccacgccgtcccagccggagccggtacaatgcagttggatgtagctgtccaggccggatttatccggcgtggtaggagcctccgtcaccaccgcgttgtgattgttgctgccgccgtagacgttccaggacgcgaacgcgctggtggacagcatgcccgcggccatcgccagagacaggcacacggacagaacctttttgccgtttttcatcttttgcatggctttttctccttcaaaattaaacttcctttgctcgaccgccgcatgagcaggattccccgtgcggcatgcacacggactcagcagccataggcgtgcatgctcccatggccgcaatcaaaagacatttcccaaccacccgacctttccagttcgcataaaattcccatatcacttatcgtcacggcctgtccggcctgtgaacgcgcccttgcgcaagcaccggaccccgttcctgcgctcccgtccgccccgacgcagaccgcgttgttcggcccttggcgcgctcctctccccgcgcgcttccccaggccggtatccccttccgatgccgctattcagttgtcggccgcgcttcggccatttgaaacgggcgaaggcccgctggattcctaaaggaggctcgtcataggggtagccccctatgacggaagaagggggtccccttcttcatcaggattactcgctgctgttctgttgctctgtgtatgcccgctctctcgcctgacagcggagctcctccttgaagatctgccgcttggggaggggcttctgcttcttcggcgggaccagccccaccgccgtgaccacattcttccagcagccaaagcgaaccgcgataaagtggcctccgatgatctccccggcgttgggcgtcattccaagccgtgccgcctcaccccggacatagtccagcagctcttcgtcgctggcgtcaccgtgcgtctgggcaaactgaacatttcgctgacgaagcgcttccttggtgcgcccaatgagttttttgctgagcttctgatcaccggtgaaatacttgccgctcacaaaacagcctcctgacttgtggcacaatccggctgccccgcagacctcttggggcaatagaaacaaaaagacggacgcataccgatacgtccgtctttcccccgagcgtgcgaataaaaagcggacgcaaaatatgcgtccgcttttgttcccatttcgggcagaagagggcactcatcccgtgcccatctttctatttggcatttttctcagagcagccccaaggaattgggggtaagctcctagtaggtcttctgactgatgtgtcccgacgggcctaaagcccgcctgcgcatatccgccgccttcccagctaagccattacgaccgccagtgacctgctttcgcagaaaacggatacactccacaatcacagctattgaattgcacgtccccgcagctttcgccgcggctcctgctgcaaaacatgtccaggaatttcacctgattcccttgttcagaaacaaggatgcgtgtccggtccctgacgggaaccgggtcgcgcatttgccacaaaagccggattcatattaaattttacgggaaggtgcatgccgctctgcccatgcaggactcaggaaccattcccttcaaagaactatcttttgtaaaacttgtactttacaaagggctttcttttgagttcattatacaacttttttcttgaaatgcaaggggcaaacacaaaaattttccaaacgctatttaacttatctcgaccaaggaggcaaaaataaattcggcctgtggccgtcatggagttggctccttttcgtggacttacttacaaatagagatggcgcctgttcctattgcgatttttgtcgaaaagtgttataattttggtaatattttcatctgtaaacttgcagctcgcttttgggggcgccgaatcaaactcctaatcatgcaatcacggacaccgtaataggagcagatcttgaatagcgggcttctaaacatctgctggtttggtcgtcgcacacatgaccacggtttcctgtccgtgcatttaagggggggtgattttttacaatattttcaaaagagtaatcataccgaacattgcatcgttttgagatagagagatatgaaacgagaatacattcagaaaaacgtatatgaagcagtacaggagcgctttgattttttgttccgcgagtttgagaacatctacgtttcgttcagcggcggtaaggacagtgggcttcttctgaacctcctgctggattttaagcgcacttattacccacagcggacggtcggcgtctttcatcaggattttgaggcgcaatatacagtgacgacggaatatgtcacaaaaacatttgagcgtttggagtctgaggtcgatccctactgggtatgtctgcctatggctacccgaactgccctgtccagctatgagatgttttggtatccctgggatgacaggcatcctgaactgtgggtgcgtcccatgcccagctattcctatgtcatcaatatggataagccgttcgatcattaccgctaccggatgcaccaggaggaccttgctaagcagtttgggcgtttttataaggaacgccatggcgggggacgcactgtttgtctgttgggattgcgggcagatgaatcgttgcagaggtacagcggatttgtcaataagaaacatggctataagggagaatgttggatctccaagcagttcaaggatgtgtggtgcgcttctcccctttatgactggtctaacagggatgtgtgggtcgcgatttcccggtttggctatgaatataatcgactctatgatctgtattatcaggcggggctcaagatcgaccagatgcgggtggcctctccgttcaatgattactccaaggatgcgctgaatttataccgggtgattgatccggagatttggaccaggctggtcggccgggtgcggggggccaactttggtgcgatctatggtcggaccaaagccatgggctatcgcagcatcactctgccagaggggcatacctggcagtcctacacaaagttcctgctggatacgctgcccaagcggcttcaaaacaattatgtaaaaaaattcaagacctcgattcagttctggcacgaaacgggcggcgggctctctgaggaagtcattcgtgagttagaggaacatggatatcagattcaacgaaacggtgtatccaactatacactagataaaaaatcccgcgtggtctttcttggaccgattccggatcatacggatgatattaagagtaccaaagacattccaagctggaaacggatgtgctattgtattttgaaaaatgaccacacctgtcgctttatgggtttcggcctgacccggcaagagcagaagcgggtcgatctatttaagcggaagtatagggggatcataaatgacaagtgaaccgtttcgcagtccggcctatcgtattattgctgtgccgtttgaaaagatcatccccaatacatataatccaaacagtgtagcgcctccggagatgaaactactctacctcagtattctggaggacggatatacccagccaatcgtttgctattactctgccaaacaggatctatatgccattgtagatggcttccaccgctggcgcgtaatgaaggaacaccgggatatctatgaacgggagcagggaatgcttccagtggcagtgatcgacaagcctctctccaaccgtatggcaagtaccatacggcacaaccgtgccagaggatcccataatgtggatctgatgagcaatataatcaaggaactgcatgagcttgggcggtccgacgcctggatcgccaagcatttggggatggacaaggatgaagtcctacgactcaaacagatcaccggcttggccgcgctgtttcgagatgtaaaatttggacaggcatggcgtccggtcgaggaggatgaatagaaaattgcttttatggtgcccatatagcgtaagcgtcatacaacagtacttcaggctggtgttatgaacaaaaagggtttattctgtaattggctaagagtaacaagcaaagagataaactgggaggcagagggcttagaaatcattgtaaaaccggataatatctagagtccacacgcatttcattagctttccagtccgcgaaaaacattacactaaccaaaagagatgtacgccgtccggctcaggccggacggcgcatttttcatacgggttctcccagtcttccgccctccagagggcggatcgccgtacagaagcgctcacatagagcgcggtcgtgagagataagcaggtagcccacctcccgctcctgctgaatttcctgcaacaattggatcacctgcgcctgagaaatcacatccagcatggaggtcggctcatccagaaccagaaaagaggggtccatcagcatcgcacgggccaaggcaagccgttggagctcccctccgctgagctccgccggaaagcggtccaggtgttcctcataaatgccgtagcgctccagataatcgcacagtccctgccgggtataaggcagatggaacaggcggtaaggctcccgcatactgtcgatcagccgcagcttgggattgaacgtcacctccggatgctgaaacaggatttgaatccgccttcgggcgggcccccggaggggataggacaacctctgcccgtccagcctcacctctccggcggtggctggatagattcctgccaggatctggccgatggtggacttgccgctgccgctgtcaccgaaaatggccagcgtctctccccggtcgatggaaaaggagacctccaccaccaccatggggccgcgggggcggtatcgcttggacaggccctgcacctcaatcagcatagttccaacacctcaccttccgcttccccaccgccatcagcggcggagccttccggcagcgctccgagcgccatgggcaccggccgtaaaagtggcaggcgctctgggcgtcaacgtcctgtcggggcggcgcaaagcccatattggcgcgcaggccgttctccggcagagcctccagcatggccctggagtaggggtgcaggggctcggcaaaaaaggaggggctgtcgccgctctcgatctgctgggaggcgtacataaccaccacccgggaggagatggcgtgtgcaaaacggagatcgtgggtgacgcagagcagggtacgctcccccagccgttggaaggcatcctccaccaaggcgatgcgccggcgatccagccctttggtaggttcatccgccagaaccagatccgccccggcggcgatccccatggcgatcagtacccgctggcgcataccgccggagagctgaaaaggatagctgcggcacagagctgcgccatgctccagcccaaaggactccaacagcgcggccgcctgaaccagcgcttctttccgggtacagggctgatgctttcgaatggcctcgcaaagctggtggcccacggtatagagtggattgagtccattcccgcttccctgcggaatataggcgatctctttcccccggatccggttgaactcccgctcccggcagcccaacagctcgcggccgttgaggcggatagagccggtgacccgggctgaggcgggcagcagccccagtgcggccaacagcaggacactctttccgctgcccgtttcccccaccaccgccagacggtcgccgtcgcctaccgtaaatgtcgtatcgctcaccgcctcagggttgtcgccgaagcggatggaaaccccctcaatttccaacattggctttctcctttctgcctcttccccgcacagggccctcaccgtaatagctcagcaacataaacccaagcacggaaaccgagatgcacaggatgggcggcacataccaccaataggagccgttgatgattccgttgcggaaaaaggcataatggaggataccgccccagctcttctgtccgatcacacctaggcccagaaaactgaggctggcctcggtaagcatggcgctgcccaccgacaggacggcacggatgaatacgatttctcccaggttgggtagaatatgccgtatcatgatataggggccgctggctcccatggtgcgctcaatctgtataaaaggcagggccttgagctgctgcacccggctgcggatgatgcgggccgtagaggtccaggcggtgatgcagatggccaggatgatgttccacacgctggcatccagaaaggccaccagaatgatggtcagaggcagagagggcagcgccatggccacgttggtcacctgcatgatgatctggtccgtccatccgcctaaatagccggagaggatccccagggctgtgcccactactgtcaccgccaaagccgagactacgccaatgagcagggagatgcgggtaccgtaaatcagctcgctgaggatatcctgcccaatgtcgttggtccccagggggtgctccgcggaaggatgcaggtagggcacgcccagctcgtagggatcgtgaggggcgagcaccggtgccagcagggccaccagcagcaccacgctcagaatgaccaatcccgccagcacccgaccgtttaatttcttacgcatggtaaccctcctcccctagtcggggatcaatgagcatattcagcacgtcggccagcagattgaaggccaccacacagatcccgatgaacaaaaagcaggtctgcaggattggaaaatccttggtgttgaccgcgtcgtaaatgagggtgcccattcctttccaggagaacacgacctccaccagcatggagccgcccagaatatggccgaactgcatgcatacggaggtcaggtaaggacaaagggcgtttttcagtacgtggcggcggagcacctgtccctgagagaacccctttccccgggccaccgtgatgtactcctcatcctgaatggtctgcactgtactcttcatcagcatgtaataggaggccgtgcgcaggatcaccaggatcatcaggggcagggccatgtgccacaggatatccactgccttttccagccccgacaggccgccggaggtaatgccgctgatgggaaacagccccatctggaacgcaaataccatcagaaacagaatcgccatgcagttggttggaatggtattcagaaagagcataatgggtgaggcgatggtgtccagcaggccgccctttttccaccccgcccgcaggcccagccctccgcccagtacggaggagagcacaatggcgggtatggtgagcagcagcgtccagcgcatgcggaacaaaaccgtctccagcaccggcagcttggtacggtaggagttcccgaagtccaggtgcagcgtcttgttgagataggttatgtactggaccggcaggggcttgtccaatccatactcccgccgaacctcctcaatcacctccggcgcctccgcctccagacggagatactcgtcctcaccgataatgtgtaccaccgggtcgccaggcataaaccggatgaggatgaaattgatggttatgatacagaagatgataaaaacagcctccaccaggcgttttcccagactcgcaaagcacaaatagcgtacccccttcctttttatatacagagcaggggcgcacgtctccgccgcccctgctcccggcccttgctcagccgatcggatgcagattataccaggtctcgcagttgatgacgccccagccggggaagttcgtccatccctcgtatttgtcggtgcggtaggggtagtaggcggtatcccagcacagggcaatgccgatgacctcctccgaggcaatcctctgcagctcttttaccttggccacatagtcctcatccccctgggcgttgagcatatcgttgtaggcctggtcgaagtcctccagatcgcaggtgccccacatgctcagatcgtcattgaacatatacaggaatggcgtcttatagaaggatacaccctgggtagcataacagatgtagatctcataggccccgtcatcccggagctgctgctcgtggtcggaattgcggatactctcctcatccagggtgcacttgacgccaacctcccccagattggtaacgataatctcagcaatgcgctggtatagcgccgccttggtagcattgtactggggtgtgaccaatacatccataggggttccgtcgggccgctcccgccagccgtcgccgtcggtgtctatataccccgccgcctccagaatcgccttggcctgctcctgatcctgcaccagcttgggaaggctgtcatcgtagccaatacctgcgggggagatgataccctcgccgggtacctgcccgtcctcaccgccgatggtggtggccagcagctcatagttcagggcatagcgcaccgctctgcggaattccaaatcatcggtgggctgtttctgaaagccgaagaggatctcgaacaggcccatgttcatcccccttccggggtctaccccatccacacccgagatggagggcagcatggtgggcgaaatcgggttggagtagtcgtacatggcgtccacttccccggtgcgcagggccatcaccagggcatcctgggagtcgtagctgcgcaccgtcacgctgcgtaccgtcagggcgcggcccatgtaggtctccccaaccgcctcatagtgcatggtctgcgcctcctcatccacctgaacaagctgataggggccgcagccgatgacagcatcctcgccggtgtagccggagggatcctcgattccttcccagatgtgcttgggatacatacgcacaaagacggcggagttccccagggtgaaataggccgccccatcggccacctggaagtccacggtggtatcgtctaccttctccacgccggtgatcttggagagatagccagacttgagtttgttgttcatcaaatcgaccgtaaagatgacatcgtcaatcgtaaatggctctccatcatgccaagtaattccctgatccgtggcaaaggtagcccggatggtgctgcccttgtccagaatctcccaggaggtcatcaggttgggctgcatctcgttattctcatcccgcaccagccaggttccggcgcagaaggcattgtagttcatgcggccgaaggagccgctctctgaggccagcgtccgtggagtgacctccttgcagatgccgatcttcagctcctccaccacgccggcggaggccgtcccctccgtctgcgccggagcgctctggggtactccgctctcctccggcgtctgcgcggagcagccaaatagccccagcgtcaaggccccggccaggagcagggaaagcacttgttttttcatgcggaaaatactcctttcatattcagatgccgcttaacgaacggggcgcaggctataccaggtctcgcagttgatcacgccccagccgggatagttcgtccacccctcgtatctgtccgtgcggtagggaaagtacgccttgtcccagcagagggcttccccgatgtactgctccgcattgatctgctgaaggagcttggttccctcaatgtaggccttctcatcagacgcctgccgcctggtctcatatgcctctacaaactccggcagatcacaggtgccccaattgccatccagggtattgtcaataaagtaataatagcaggaggtctgagacgccattccggaagtgcagtagcagataaagatctggtaggttccctccttgcagagctgatcctcatattcctcattggtaatgctctgctcgtccacatgggccttaaccccaatggcatccaggttttgaaccatgacctctgcaatccgcaggtagatctcgcggcgtgtgctactgttctggggggaaaccagaatatccatggggctgccgtccggcatctcccggtagccgtctccgtccacatccaggtagccgccttcatccagagcggccttcgctgcctccagattctgctccagcttgggcagcgtctcatcatagccgagattcggcggcgcaatgacccccaccccgggtacctgggcatcctcaccgccgatggcggcggccagcagctcgtagtccagggaaagcgtgactgcttttcggaagttcaggtcgtccgtaggccctttccggaaaccgaacatgatcatatagctgcccgtattgtcactcataccgggctccacgtgctccacacccgtgatggaggatgccatagtggccgggatgggactggcatagctatacatggcgtcaatttcgccattgcgcagagccatgaccaaagcatcattgctgtcaaaggaccggagtgaaaccttctttaccgtcacctcgcggcccagataggtgtcgcttacggcctcgtagtagctggtctgagcatcctcgtccaagctgacaaagcggtaggggccgcagccgatgacagcatcctccccacggtagtccttcggggcgtcaatgttctcccaaatgtgtttcggctggacgtagaaatagccggccaccagtttgagccactggtaggcgccgggctccttcaaaaccaccttgatggtgtcctcgtccacctgctcagcatggtccacataggagctgtaactggatttgcgcacattgatgttataatcgaaggtaaacagcacatcgtccatggtcaggggctccccatcatgccaggtgatgccctggttcagcgccaagtcacaggtgatggtagtagagtcttcactgaccgtccaatctgtaacaaggaatggctctacctcgccgttgggccccgtctgccagaagggcgctgtcacaaaggagttatagcacatctttccaaatgcgccgctctccacaaaggtggtaaaggtgtcgtttgcggcggtggtcccgaggtgcagctcctccaccacgccggcggaggagctgcccgccgtttcggcaggagagctctgaggtgcgctctccgccgccggctgcgcagagcagccgaacaggctcagcgccagcgcgccggctaaaaacagggaaagggcttgctttttcatttgaaaaccgctcctttcataccgcgtctattagactgcgggccgggtggagaaccaggtcttgtagttgatcacgccccagccggggaaattggtccagccctcatagtggtcggtacggtaggggaagtaggccttgtcccagcacagagccagtcccaccacctgttcatcggcaagcgcttgcagctccttcatggcggcgttgtacgcctcgtagctgccggcggtcttcttggcctcataggcggcgacaaactccgggagcaggcaggtgccccagcggttgttgtcgttatccccgatcatgtacatgaaggcggtgtcatacatggccacgccgggagaggtatagccgatgtagagctcataggtgccctgcttgcggacctcggtggcgtggtcggagttgcgcacgctctcctcgtccatggtagtctgcacgcccacggcctccagattggtcttgagcacttcggcgatgcgcagatagagggcctgacgggtcttgttgtactggggagtaatgaggacattcagctcgctgctgtcgggcatatcccgccagccgtcgccgtcagcatccacataaccgccctcatccagcagggcgttggcttcgtccacgtcctgagccagctcgggcagcgagccgtcaaagcccttattggggggcgccacgataccggcgtgggggatctggccgtcctcccctccgatggtgacgcggagcagctcgtagtccaacgcggcccgcacggccttgcggaagatcaggtcgtcggtgggctgctcgttgaagccgaacaccagttgatagttgccggggttgtcgctcatgccgggatccagcccctccactccggtgatggagtccaccatggtggcgttcagggagttggagtagtcgtacatggcgtccacctccccgctgcgcagggccatcaccagggcgtcgtggctgtcgtaggtgcgcacggtcagcttgcgcacggtcagctcctgtcccatgtaggtatccgacaccgcctctagggtcatgctctgggcctcctcgtccacgcctgtgagcttgtaggggccgcagccgatagcggcgtcctcgccggtgtactcggcgtattcgccctccaccttggaccacacatgctccggccgaagggtgacgaagttagccatgctgttgagcatggtgaaggccttgccgtcggtcagcgtcagggtggccgtggtctcattcaccgcctccacccctgtcaggccgctgcaatagctggacttgcggtcgatcagatattggaaggtaaacaccacgtcatccatggtcacaggttcaccgtcgtgccaggtgaggccctgatctgtggcaaaggtggcggtaatggtattcaagtcgccgctcagctcccagcccgtcatgaaaaagggctgaaccttgccattctcatcggtgactacaaagggagcggtgaccaccgcgttgtagttgagcttgccgaagataccgttttccgtcataacgttggcgccgtcaatggcggcggtggtaccgatgcgcagttcctccacataggcaacggaggacttgccgctctccaccgcttccggcgggccgctttgggtggaagccgccgggttctgtcccgcgcagccggctgcggtcagcgcaagagcgctggccagcagaagggatgccagtcgtttcatacatgttccttctttccttctcttaaatttctattcaaaacagggacggtcccctgctttggtcttataatgaaagagcattcctgttttgtcgttagaaaacaggaatgctctttgtcctggatatgcaaaaagggcaccgccgtccccagcgatgcccagttaatgccccaatgaccgcgatatccaccgcggcagcatccaattctccctcgccgaaagaatagaatccgatagacatggcaggtcttctgactccagatcatccggcttcgctcaccttcccggtttcccagtggtattaagcgggccgtccctgttacagcagcgggagctgtcgcagacttgcactgcgttcccttttcaatacaaacgtatcaccatatcctgctatatgaaattatggattcagtatacaccgccgtccaaggcctgtcaatatgtgtctaactgcgccgaatgctctccacttacggagcctagcggcaacaggcacattccattcccaccggctcaccgccgcatctgctcttcgccgcctgtaacgggcgaaccaatcaagtataagaaatctcgcgttgagagcagtcacaggagatcaccccccttttctttccggccgggctgtgctataatcccctcatatacgttttcagcaagtggccagactccgtctggttagagggaatcgggtgcaactcccgagcgatccggtcactgtaagcggggagcgggctgcagatcgccattgcatgtttcacatgtgagaaggcgcagcacgtgacgagccgcaagccaggaaacctgcttgctgaatttgtggggacgcttccggtgaaagctgctccacaggccgccggccctgccggtgcgcctgtctgcaagccggctccgcgtcagaatacgcggggccggcgattttgctttttccgggcagagaggagaaatgcgcatgcgacagcctttttttgaagatctgatgaccgcaatgtacccctccggcctgctgcatacctttggcgtaaacgggaaaatctccgggagcgtgggggcggtgggggagatgcaggaggtgcttccgctcctccacagcccacggggctgtgggtttcactaccgctattccgcccggcgtcggcaccagcccttttacagcgtgctgacctccaatctggaggagcgggacatcatctgcggcggggaggagaagctccgccaggccatacgggacgcctggagccgttaccgccccgggctcatcatggtgatcccctccccgatcagcgacattctgaacgaagatgtgcgctccgtatgcgccgagctgcggcgggagggtatttcggtagtgggcgtccagtcggagctcttctcccaccgggacaagaactacacccggaaccgcctgaaggagctggcccgccagaccatcaccggcgacaatcggctggagatggagctaaagggctgcggcttcaccgaggcgctctacgccctggtggagcaggtgatggagccgtccgctcagatcccgcacagcatcaacatcgagacggtgggctgggggagcgagggaaaggccgccctgcgggagctggaggtctttttgaacggctgcgggattcaggtgaacacgtggatccccagcgcccccctctcctctctggtacacgccccggccgcggaactgaatctggtcaagcgggttcgctgggccagacgcatgcgggagaaattcggaaccgcataccttcacatcggcggcgcgggacgctacgccggactggatggaatctgcaccttttaccgggacattggacaggccctccgcatggaggcggcggtggagcccgtcgtcctggcggcgcgggcccaggccctggaggagacggcggaggcccgccgccgcctggggcaggcccgggcggttctcgtcagccgcagcatccagcaggctcccttcgagctcaaatcctatgtgcgggactatggcctgtcggtctcccatctctgtgtcatcctgaccccggagagccgtaaaaacctgaatgtcacccccgcgctggaggacagcctgctggcccgggtacgggaggccgccgccctctacagcccggagacacagctcctcctgaacccggcagaggagacgctgcgcggaatcttcgcagaggcggatgtggtggtgggcaccggcgacttcaccttggaggggatgggcgcgccgctgatccccgcggtcaacgaaaccacctccctctcctttccctcctatgtccgcacggtgcgtaggatgtgccgccgcctggagcacgggacggagcgcagcagtcttctgctggggaaaatgcccttccaaagccgccattacccactgtactgtaatcagtctaatctggccgccaaggaaatgtggtccagaatgtggctcaatcgaaagggggattccgtatgaggccggccagcggctgcaagctctttggagcctatcaggctttgggtggaattcaggacggcattgttctgctccactccgtggtgggctgcaattttggctccatgtccctccacgttgcccaggatatgcgggatatccggcagacctgcaccgtcatcagcgacagcgacgtggtgttcagcggcgaggcttctctggagcgggccgtccgctccgcgctggagctcttccaaccgtccgtcctgttcgtggtcagcggctgtgtgagtgagatgattggggacgatatccccgccgtcttagcccgcatcccccatgaggtgccgctgctccatgtggaggcggcaggcttccgtggggatgcggctcgcgggctggaggctggatggctggcactgctcccgctgatgaagcccccggtcccccggccttatccccggccctatccccgttctgatccccgtcccctggttaatctgatcgggctcgggatggatgacccccacgccgccgacgatgttgaggccctccgggctatgctcgccccccaggccgcactaggcgccgtgctctcccgctgtacgctggaggaagtgcgccgcgcaccctatgccgatgtgaacctggtgctccgtggaaaggggcgtgagctggcgcaagccatgaaggagtacttcggcataccgtgggaggaacttgattacccctatggcgccgccggcgcggacgatctctggagtcggctggagcgccgcttcggtctggattatcatcaggcccgggcggagctggaccgtcagattgcagagggagctggaaaagcctaccgctatttacaggccctctacggcatgccggctgcgatcctcgcctcggggccgcgggccgacggtctgcggcgctttctggagcaggagctggggatggaggtggtgtgctttgcccgccgggaggagctctccgaccaggaggacttctaccgggagctgcgcggctccgaggcggcgcttctgtttggctcctcctttgagcaggacggtgccgacgagctggaaattccgctgatccgcgtggattacccggtgtttgatgaggtctgtctgaccccccgcccccacctgggcgggctgggaaccctccatcttctggaggacatcttccgcggcatcatgaacggccgcatcttgaaaggggcgctctatcagtgaaacgcatctgcgtctatggaaaagggggcatcgggaagtccaccgccgtgtccaacctggcggcggccatggcccaggccgggaaacgggtggcggtagtgggctgcgaccccaaggcggactccacccggggcctgatggggcggcgcatccccaccgttctcgaccagctcaagaccggcgcctccggggagatcgccttcacggacagccggggcgtccgctgcatcgaggcgggcgggccggagccgggcaccggctgcgccgggcggggtattatcgtggccatggaggagatccgcagccgcggcctgctggatgaccgggatgtggtgctctacgacgtgctgggggacgtggtctgcggcgggttcagcatgccgctgcgggagcaggtggccgacgaggtgtatctcgtcaccaccagcgacttcatggcactctacgccgcaaacaacatctgccggggtatccgcaaatacgcccagagcggtagaatccgactggccggaattatacacaacggccgcagcagcgtggacaacgacggcctgctccaagcctttgcgacggagctgggcaccacggtggcgggaaaaattcccatgagtcccctcatcggccaggccgagctggagcgccaaaccgtggtggacagcgcgccggacagcgcgcccgcccaggcgttccgcgccctggcgtccgtcctcctggacaaccgcggcggctgcatcccggagccgatgagcgacgacgggctggaagcgctctgccggaaggcggccccgctttgattccggctgagcacccctgcctctccgcccaggcccacttccgctatggccggattcatctgcccgtggcccccaggtgcaacatccggtgcggctactgcgaccgccgctatgactgcgccaacgagtcccggcccggcgtcacttcggaggtcatctcccccgaggctgccctggaccgcgtggagcgcgccctgcgcctggacagccgtctgcgggtggcgggggtggcggggcccggcgagcccctggccaaccccgccaccctggagaccctccgactggttcgttcccgctttcccggactcctgctctgcctgagcaccaacgggctggttctgtctgatgctttgcccgaactgctggactgcggggtttccaccctgacggtcactgtcaatacccgctccgtcgtctgtgccgggcacgtctaccggacggtgggcggcagcgcggatgccggagccatggcagcctttctctccgctcaacaggagggcgtggccaaggccgcagaagccggacttacggtgaaaatcaacaccgtcgtcatccccggcttcaacaccggggagattgaggaaatcgcctgttgggccgcccgtgcgggagccgccgtcatgaacctcatgccgctcattccccaagccggctttcgggacaacgagccccccagccaagcgctcctggatgcgctgcgcgccaaggcccgtgtccatatcccccagttcacccactgcaggcagtgcagggcggacgcagtgggcgtgcccggagagatgaactgcatcggctgcctctgagattcaaacggcaaagctcagctgtcctataggctgccgtccagatttttctctgcctgtctgctctatggggaacatatcaactgactggtattgacaaaaaaagagacttgcagtaaaataaatcgctcataagacaatggaataacctgtcaagtgcccaactgcggttggggtaaaagggaatcgggtgaaactcccgagcgatccggtcactgtaaacggggagcaagctgcagataccattgccgtgcagacaatgcgcggtgagaaggtgcagcgcgcgtcgagccgtaagccaggaaacctgcttgatcaggagacagacgggtatcttccgcagaaagaactctgtctgaaactgctcacataccgtgggcagcttcagcagcctgctttcgatggaaagcaggctgtttgcgttctaaagcggcagtacatagcgcactcgaaaaacggaaaggagagcccaattatgcatgttggaaagaaaaccctgtcggccctgatggccctgacgctgaccgcgtccctggcggcctgctccgccagtaccccggcggacaccacccccgccgccaccccctctgaaaacctggtacagaccagcagcacaccctctgtcgatgaagagggggccaagcgcaccgagtatcccctcaccatcaccacctataactacaacaaagagccggtagagtataacctttgcaaaggcccctgagcgggtatacgcctatgctcaggacaacattgaaattctgctgtctctggggctggccgaccgcatcgtggccgccagcggaatggacggtgagattgcccccgagctggccgacgagtttgcaaaaattgattaccacgaggacacaggcgtgctgagcaaggaggatctgctggccctggagcccgacttcatcgccgcctggtactccaccttctccgacaaacgcctgggcgatgtggacttctggcacgagcgcagcgtgggcacctatatggcgctgaacagcggctgccgcggcggttccggtacctaccagcagaccgtggccgacgagtgtcaggacattctgaccctgggcatgatcttcgacgtgcaggaccgggccgaggcgctggtggccgagatccagggagagctggacaatatttctacctatctggcggacaaggatcgcctgaccgtagcagttctggaagacgagggcggcacctaccgcgtctatggagaggacactctgggcggaaacgtggccacctccggcggcgctgagctggccgtgggcaagcatggtgacaacggcaacatcagcgccgaggatctaattgccgccaaccccgacgccatcttcatggtctggtacaacggctataccgtgaatgataccgattatgccggagagcaggtggtggagctgatcaccgagaaccctgcatttgctagtctggatgcagtgaagaacggccgggtgttcgccatcaacctgaacaatgtctactgcagcggcatgcgtaccctggacggcgttctggacttcgcgcagcatctctaccccgaactgtatcagtaatgcacggcgcgcccgcccatcccgggcgggcgcgccgctgattgaggcggtgtatccatggatttgaaaaatggtgtgttccatggcaggccggcatactggcttgccattctggttctgctggccggtctgctcctttccctgctgtgggcggtcactttcggctcggtggatctcaaaatgggggatgtataccgggtcattctctataaagtaaccgaggccctccatttcccggtaggggactcagaggtgtacggctccggcagtatgagcgacatcgtgtggtttgtccggttgccccgtctggtactggccatcggcgtggggatggccctggccctcgccggcgtggtcatgcaggccattgtcaaaaacccgctggcggatccctatgtcctgggcgtctcctccggcgcctccctgggcgccaccctggcgatcctggtgggggtgggctccttcctgggcagcggctatgtgggcctggtggccttcgccggggcgttcctggtctccatgggggtgatcgccctggccaacatcggaggcagggctacctcggtaaagctgattctggccggcacggccctctccgccatctgtgccgctgtctcaaactttttcctgtacgtcatcaataccagcagcggcgcgctggaggcggtggtccgctggaccatgggcagcctggccgccgcaagctgggacaccaatctctggatgctggcggtggcggtactcggggcgctctttttctggacccagtaccgcaccttgaacctgatgctgctgggggacgaggccgccgtcaccctgggaaccgatcttcatcaccggcggattgtctatctcctggcggcgtccctgctggtgggctttgcggtctatacggcgggcatcattggctttgtggggctggttattccccatgtggtacgcattctctttggaacagaccacaaaaagctgattcccatcagcgccctgctgggggcaatcttccttctgtggtccgatgtactctgccgggtggtgctcccgggcaaggagatccccattggggtgctgaccgccttggtgggcgcgccggttttcatctacctgatggcccggaagaaatacggctttggaggtggcgactgatggacatccgcaccgagggtgtgcaggccgttctggggggaagcgccattttaaagggcgtggacatccaagtgggccagcgggagctggtagggatcatcggccccaacggcagcggaaagagtactctgctcaaatgcatctaccgggtgttgaagcccaccggcggcgcggtgctgctggatggaagggatctggaccagtacagctatcgggagtccgcccggcgcattgccgtggtagctcaacacaattattataactttgagttttccgtccaggatgtggtcatgatgggccgtgccccccacaagcgggccctggaccgggacaacgccgacgatttccggctggtggccgaggcgctggagctggtgggcatgtccggcttcgccaggcggtccttttccaccctctccggtggggagcagcagcgggtcattctggcccgcgccctggcccagcagaccccctgtctgatcctggacgagcccaccaatcatctggatatcaagtaccagctggaactgatggacattgtcaaatccctggaccggaccgtgatctcggccatccacgacctgaatattgccgccatgtactgcgaccgtctctatgcggtcaaaggcggggaaatcgtgggctgcggcaggccccaggaggttctcaccgaggactttatccggcgtgtatacgaggtggaggccaaggttttttccgatgagagcggacagcttcacatcctgtaccacccagctcaccggctttaaacaatatttgctttcaaacggtcccgagcttcaaaaaagcacatggcccacccctgcatcgggttcaggccatgtgcttctcttgttccggatggaagaacacataatattacccacgatattatgcgcccttttcttccagccggttgctccaaaatgacgcaggacctgcagaagggtcccgtgtctcgtgcggagcagcacgaaataggagggacaagtgaattcggcaacaaaaaaactgtatcctgaaggatacagcaacaaattccacaggttcctactgtggttgaaactgcaccctcccaggtccggggaggcttttttgtgcgttatacacaggcaggtcttctgactcagacgttcaaacacacctctccgtcttcccggaacaaacatcccagtgacatagcagagaggcactccgccaacacagcaacggctttgtgcgggattctcacccggcttcccttttcacccatcacaatcggataggcacctgtgtaccaactatattcacttgttattttgattatatcagggtgtatgcagaatgtcaagcggaagcaaaagagatgcgcgccgtcaccgtccacagcggtacgagcattgatcatcagcggactggtcgcccagttcgtgtcgatgatgatataatcgtacagcggtttgagcggcgtaaggataattcgcagaaagccttcggtccccatttcggtcaacagaacctttctctgctgagccagtaccttactcccaacagggatgcctggcccatcgctgtggatggaatcgtcatggacaggcagaaggtcattgatattattgacaggaaagtcgtctccattgacaacataggatgtggtcaggttcatttgcggatcaagatcgaccgcaaaaacatgtgcccctctttccgtgagggcataagccagattttaacaggcggctgttttccaacaccgcctttccgattagcgacggcaatgattctatgtcccctcatatttgcgtctccttaatagtttcccaagttcgtcttcttttggttcaatcgtttaaaaccctcggcttgcaagaaattatagaaggaattcaccagtagcaagcagatggtctggcttgctctttcaataaaactaaattataatgtaatatgataccttttctacggcttggagtagtaaacaatccaatgaaaaggatacttttcagtctgtaattgagaagccgtctgccctggattcagagcagacggcttcttaatcacacaggtaccggggacgattgtaggccaaactatattgtagtggtctcaattttatttctttgaagcatttcgctcagaaaggctttttatccaactctttggtttttacgcaattttatatgttatatattaggctatattttgtatttagagcaatataaaacaaacatatcccctaaaaatgatgttgacattttttattaactcgttttataatatgaaaaacattctcaatttaaaagagagagggcgtagctctgtgggccgataccacaccaaacagcaaactcttatactcgaatacctggccttgaaaaaggataccgcatttaccgcagagtcggtctggcgcggattgttgggggtggaggaaaaagttggccgagccactgtctaccgtgcgttggaccgcttggtggaggcgggcacgattctcaaaattccctctggggatggcaaccgggcactctaccgctatatgggggaagcagccctcccctccagcgggcggatggtctgcctggactgcggacgggcatttcctctggagtgctcccatctagaggaactgacccggcatattcagagcgaccaccaatttgaagtagatacccggcataccgttttatatggacattgctgcgactgtggaaagtgataatcagagaggaggcggcagagatgaaagcggatattcaaaaaagcagggcggcggccttgcttttggcgctgtgcctaattgccgtgttctctctgtccgccctgttcgttgtcagtcatgccgaccacgactgcaccggcaccgactgcgccgtctgccatgagattcattcctgcctgtccgccctgcggcatatctcagaggggctggggccctctgcccattatggactgggcgcgatgctcctgctgctctgcgctttgctgcctgtttccctgtcggaccggcgttcctgtaccttgactgcactgaaaattcgtctgaacaattaaagcgacctccaagcaaggggaaagtctgcccatttttaaatgggcgcttttgccttgcttttttgcgcccaaaaaccggaaaatacgctgatttggaggttactatagcatgaaaaaattaaaagagttccttgtattttgcttgtccaccgccctgtcgctttctctgctggccgcctgcgggaagccgcagatccccatggccggtgcggaaacacccgcagagccttcatctgccgcatcggagggatctctgagggtcatggcaagcttctaccccatgtatgactttgctcagaaaatcggtggggataaggtcacggtgaccaacatggtccctgccggcaccgagccccatgactgggagccatccccctctgacatcgtggctttggagcaggcggatgtgtttgtatacagcggcgccggtatggagcactgggtggaggacgtgctggcctctctggataaccagagcctggtgacggtggaggcatcctatggcattgcgctgctggaggggcaccaccatcatcacgaggacgaggaagaagcggagcacgaacatgaggatgagcacgagcatgaagaggggggcggctatgatccccacgtctggctctctccgctgaatgccaagcgggagatggagaacatcaagaacgccatagcggaagcggacccggcgaatgcggagtactacgaggccaactatgctgcgtggagcgcccggtgtgaccaactggaccaggcgttcaaagacggactgagcaatctggcgattcaggacatcgtggtgtcccacgaagccttcggctatttgtgcgacgcctacgggctcaaccaggtggggatcgagggaatttcgcctgactctgagccggaccccgcccggatggcgcagatccaggactttgtgacggagcaccaggtgaaggtgatcttctctgaggagttggtcagccccaaggtggcccaggccatcgcggacgccaccggggcccgcgtggaaacactcagccccctggagggactgaccgacgagcagttgaccgcgggagaggactacttctcagttatggagcaaagcctggcctctttgaaggacgctctgtcgtagaaggagcggtcccatgatggcattggaagcagaccggctctccttttcctacggagaggcgccggtactctcctgcgcctcctttgggctgccccagggcggatttgccgccctgattggcccaaacggcgcagggaaaagcacgctgttaaaactgctgctgggggagctctcccccagcagcggcgccgtgcggctgctgggccaggatacggcccggtttcggaattggagaaggctgggttatgtgccccaggacgggctggcccgccatacagattttcccgcctccgtggaggaggtcgttctggccaacctgtccggggagatcggcctgttccgcttcccgaggccggagcaccgggagcgggtgcggcaggccctggaattggtgggaatggccggctatgggcgccggctgattggagccctgtccggcgggcagcgccagcgggtgttgctggccagggctctgatctcccgcccggaggtcatgctgctggacgagcccacctccggcatggacctgcaaagcggggagaacttttaccgcctgctggccgggctgaaccgggatcatgggctcaccatcctgatggtgagccacgatgtggatcggatctgcagctatgtttccaccttgtactgcctggaagaaggcaccctggcggaactaacacccggacaggtgcgccgagagcgggcggggcttcaccgccattcagatatgacgcgggagggacggggggaacgcagtgtccatctttgaatatcccttcatgcagcgggcctttttggtgggcatccttctggcactgatcatcccctgtgtcgggatcgtcattgtgctcaagcggttatccatgattggggacgctttgtcccacacctctctggccggtgtggcggccgggttgcttttcaatatcaatccggtgctgggggccacggcagcctgtgtagccgcggccttcgggattgaggccattcggaagaaactgccccggtacgccgagatgtccattgccatcatcctgtccgccggggtgggactggccggtgtcttatccggttttgtgcgcagcgcggccagcttcaacagctttcttttcggcagcattgtggccatcagcgacggggaactctatacggtggctgttgtcagcggaatcattgtactggcctttttgttcctgtacaaagaactgttttatctggcgctggatgaacgcgccgcccggatgtctggaatccccgtaggcatcataaacagtgtgttcaccgtgctgatcgctgtcacagtgtcaattgccgcccggacggtaggggccctgattgtctcttccatgatggtggtaccggtggcctgcgggatgcagcttggccggagttataagcagacggtactctggtccatcgcctttgcggagggtttcaccgtgggggggctgttcctgtcctattacggagggctgaagcccggcggcaccatcgtcctgctgggagtggcctgtttgctgctgcttttgattctaaaaccattgtttgcccggctgggccgggcggggcgcaaggagctcaaaggagaacatgatgactgatatgtatttgatttccggctttttgggagcgggcaagaccaccctgatccaaaagctgttgacggaagcatttaaaagcaaaaaagtcgccctgatcgagaacgactttggagacttcagcgtggatgccgcgcttctgcgggagggcggttatcaggtccgggagctgaacgccgggtgtatctgctgctccctcacaggggattttacggcgacgttggcctcgctgctgaaaacctatcgccccgatgtggtgctgatcgaaccttccggagtcggcaaactctctgatgtggaacgggcctgccgggaccggcgtttcgcaacctctgcccgcattacacaaaaaattacggtagtggacgtaaagcggtgcgccagctacctggagaatttcggggcgttttttgaggaccaggtgagaagcgctggcaccatcctgctcaaccggaccgagctgtttcccgaggctgttacgaaggccgtggagttggtggagcagttgaacccatccgctcaggttctggcagagccatggaagctcttgaccgctgcggaaattctgcgcctccccaaagaaacggagccgacggatgcgcagccccatgaggagcacacctgttcctgtgggcatcatcaccaccaccacggccatgcctgctgctgtcacccccatgccaggggcggcgcggatgacacctttgataccatgacgctccatctgccccaagtgttttcaccggaaggcctggggcgctgcctccggctcctgggatcggagtgctgcggacaggtcctgcgggcaaaaggcattgtggagacggagacggggtttctcaatgtgcagtttctgccgggggagcatcgttttgaaaagacaaacctccaggagcacgagctgtgtgtgatcgggcacgacctgaaccgggcgcagatcacggcggtttttgagggggtgtgctgattgaggatgccggaatatactccggtctatgtggtcaccggctttctcgacagcggaaaaacttcactgttgaatcagctcctctcccgccgcctggagagcggacactcgctctgctgcatccagtttgaacagggagagcaggcactggaacaggatttaatcgacagagggaatttggatctcctccactttcctgttcggaagctgcaaagcggcgcggggatgcagcaggtctccaaacagatctacgattatctgcttcgcaatgatccggaagaactgtggatagagtggaacgggacgctgccgatctctgtccttcagacactgtttcccccggcaaagaaacaggacgggggtacaccaggggacttctgccaacttcagcgcatgctgtacctggccgattccaccaaactggatgccctgctccagcagaccggaggaatggcgctggaacagatatccgccagtgacgtcatcgtcctacggaattggggacctgtatcgcagtttaagaaccggaaacggatgctgcgggaactgaatcccggcgtcaaggtactgccgctgaactcggtcggtacggtggagcgggccatgctgcgtccggggcggcagccagccttttggtttttgctggggattgcctatttcacagcggcatatctgaccctgcgcatggtgataggtgccggggggaacttggctgatgccgtggtcaatgtatttctcggtattctgttgcaggcgttcccgtttcttctgatcggcgtgcttctgtcctctgccatccagatattcgtttcacaacagtggctccacgagcacttcccaaagcatctggcgggaggccttttgttcgcagccttggccggcttttgtctgcccgtgtgcgactgcgcctcagttccggtgttccgaagcctggttcggaagggcgtcccccctgctgccgccgttacctttctgatggccgcgccggtcatcaatccggtggtcattctcagcacctggtatgctttcagcggggatgtcagaatcgtcctgtgccgggtggggctcggcttgctgtgtgcggtgctgatcggacttaccttttccagagcaggaaagaacggcttgagcccgtccggctccggctggttttcctgcgcctgcggctgttctgtgggtcaggcagcagagggcggaaagctctccctctatctccgccatacgcaaacggagtttttcagtgttgggaagtaccttgtgctgggcgccctggtatccgccctgttccagaccctggacaggtcatttccgtgggggaacggcggggatgggctgttccttcctctcctggtgctgatgggaatggcattttttctctctctttgctcctccgccgacgcggtggttgccaggagctttgccggacagttccccatgggggccctgatgggatttatggtatttggccctatgatggatatcaagaatctgatcctgctctccggcggcttttcgcgtaagttcgtcctgcgcctgtgcctgacctccttttgtatctgcggaatggtcgttttcctgtcattttccaccgggctggaaaggagcctgctatgacaaagaactgctggaacagccaggccctggctgagatcagctgctacctggcctttgcgggggctatgctgtatctggtgcgttcagggcggtacctctcctatgtgacgccaaagctggcgccctatctctgcttcagtgcggcggtgatggtggtgtgggccctttcttccctaggacgcgtgtttcgtattcaataccgaaaacacatcgcccactgctttgtgctggcgatcccgcttctgctgttgctgctgccacacgataccgtgggcctcagagatatctccgattctgccggactgctgaatggaagcatggttagcggcgccgcaggcgggggcggcggcataccggccgccggaagccccataccgtccaatcaggaggatactgaggcggaggggcccgcccaggcagaggcatccgcagacggctatacgaccctggatgcctatggcgccccccttgagctccacggatataactccaggcagcaaaccatcacagtcagcaatgaggagttctacgactggctgtgcgtattttatacggacatagagcagcttgagggctttcaggtaacgatgaccggccaggtctacaaaaacacgccggttatggcggacaacgagtttgttcccgcacggctggtcatggcctgctgcgtggcggacctgtccccctgcggcctgttctgcacctacggcaacgtgtcagaactggagagcgattcctgggtcacggtgaccggtattctatacggggagcagtataaggggcaggaggaaccgcggctcagggtgacatctgttgttccggctaagccgattgagggatacatcttcccatacagctgatctttaaccgattgggacggaggttactggtttcggcaggtggatttccagttttcattgtcattaccactcactttcagttcaggtgggaaacattccgcctctcatcacgcactggtttgccatgaaggcaccgagaatgacttcatgcgttggatggcttcgccacaaatcttgcgcaaaatgaatctaatatacaatataaaacagagtgcaggccaattcttgacctgcactctgttctattttcctacatccacgcgtttgtcggcccaatcaccctttcgtgcagccacacttgaagcaaacgccgctggaacatgtgagtttgacgataattaacttgtctgtcagtcaatcattgacaggttttcaccatcattctctcccgtgattaccggacggcactcgtggtacgccatggccagctccatcactgtacttccccctgtaatccataaaattgatgtgcatatcacggttcaagttgtatgatactcctcgttcggaatctatggtctaaaattattggggagctgttttgcaatgcgacttcatcaattagaagccaccgcttaaagtccaggcagtgagtgtatcatccgggatatcagtgttaaatactttaatattttcaatggagccattatagggatactggtttccgcttcgagctgtcttcccgagataaccggcattgatacccggaatatcggagataaagccatatcctgtgctgggtagttctgcgggcggaatcacctgtaccagttccccgtcgaaaaagagcttgtaccccgtatcgggatcggcagtaaaggctgcgatgtgtttctcaccagaggtcatatccacggcagcagaggactttacaaaatctccgccgttctgccgccggatctcataccccagcacccctccaccaacataaagatgaaaatgagaattggctgtcgtagagttgctgataccgatcaaggagtgtatcgacgagatctgcggggtaaactccacgacaatggcgcccgaatgcatggcggcaatatcggtcacactgtcgtcgtcaatttggaccggttgggatggtgtaatcgttacaccgctgttggagtagacattcgaaccactggacgccacataggttacctgtttcatgtgttccgcagagaacacgccgtcaaatatttggacattatgaatggttcctgtgaacggatattcaaaggctgctggctgcccggagggcgcctgcctgcgcgtcatgccaaggtatccgctgtcaataccgggaatgtcagccatgaagccatagccagaggaggccgtcagttctgacagcggcaggtccagaaccatctccccgttgaggaagagttggtagccgtagtccgggtcagccgtaaaggcggcacaatactcctttccggcttcaatcgccacaggagccgagtttttttcaaagtctcctccctcctgcctgcggatctcaaatccgagcctcgcgttggagtagtagaggtggaaataggagttctggttccccgtctgaccattgctcaccccaatcaatgagtggatgctgtcggtgcttgtgggcgtaaagcgcaccaaaattgtaccctcatgcaggccagcaatactgggcagttccggcccgattggggtgtaggtgccgtcagacagcggcaacaccttttctgaggaggaatataccaaattaggggtatcaggcgtaggtttgatgtccttgatgtagtcgagtgtgtattcaccgaagaccaaggaatggatattgtcaggccgactctcttgctcatagaagcaaacaatattcccattgggctgctccatcaagcaggaatagccaaattcacccgaccgaattacttttttgtacttccaatcaaacgtgtagttgattcgcccctctgaattggtcccgttctcattgatcaggccgattcttatcgtgccgttggagcggctattggctgccgcattggcgaagataacggcgggctttccatcaattggatgactatagttgataacagactgctggcagcctccatagggtgtgggcgccaccagcgtcgggtccctcggcatatcgggcgcccaggtctggccaccatcatagctggtagcgattaatacgccgcctgactggcgcacgaacatctttagctgggtagaaacatcatcaccctccggtggcatttctacgatttgaatttcacccataccgatttttgaaaggcccgcagccgctctagcgtcgtttggagattcacccaggtgccaggttgccccattgtcatcgctgtaaagaactgcgccgctcataccgctgaaagaattgctgttatagtaaaggggcacaaggatgcggccttggtatttgccggtctggatgacgatcccaatgccgggggctgtgccaaagtgcttcatatcactggtcttaaagccgtagttcatcagtttgggatctgaccaggtatagccgccgtcatcgctgtagcacatgatcaggaagaccgtattgatgacccgcagttccgttttgcgcggtactgcggatgcgtcgtaggttccgtagttggtgtaaaaaatgtttccagcttcctgtccatttttataaagggtgaaatcaggtccgactgtgtagtcggttgccgccccatttagatacaccgtcccgtcatcttcgtgcagctcatattgggtgccagccgagtcctttaggatcagatagccgtcagaagtatagccggtagaggccgctgcatagggcgcacggacgtttccggtcatcgcgtcacagaagaagaagacccgcccgttttgacctttgacgaggagcgaatcgcagtaagatgcgctgtccgttttcatggggacctggggttcgttggggtagtcgagaaaattgagcagcattttgggttggctccaggttgcgccgtcatcgctactgacccggatgccgatgtcgcagttgttgggaggatcgttgctcgctccggcggcgtcgccgaaccggatatcgcccgtggcaatgatcgtccccttgtcggtccgcagaatggaggggattcggatgccctctgtgttccaatcctcaaaagagaacacattctcctgcctgatgattccagagtccttctctatgtaggtttctgcctcgagaacatcctgtgccagagccgtatcatagacacgcacgctgtcgatggtgccgtagtagggatatccgaatgacccgttccgataggttgcacccatatagcccacatcggcggaattcactgtggacatgaaccggtagtcgtactcccatagctcataaagggccacaggcatttggaaaaccatgtcgccatcaaaatagaacttgtagccttcctgtgggtccgcactgagcgccatgatatgccgggtattgcgcgtgacctctgccggaccctggagattcacatagcgggtctccccatgattcctgacctccaggcccaggaagccccggttgtcaatgtaaaggttaaagtaggcgtcagtcacgctgctgttgctcaagctgaacaggcagttggccgtggacatcgccgtgggggtgaagtccacgatgattgtgccgctcgacaacccagagagttgcgtgacagcgctctgggggagagcgacggcatccgtgccactggaaaacgtcatatcgctggccgagaacaccggctcagggtcagccaaggcagcagccgcgctggtgaacgacagagtctggatgcaaagtgcaaacaccagcaaaagtgctagcggcagtctcttatgttgtttcatggcaatctccttttcaagtttaagtcactgcaactgtcgataatatgtatgatgccgccaattagcccattggaatcacatccagtttaatgatgtcgttgtaaaaaagaataccgccggccccctcttttcttgtttatagagggccgtgccctatggccattgatgctcctgtacgattaaggatacggcaaaacacccgttcatcccccggcagtgtgaccgtgcagcccatccagtgagagagatacgcgccgtggatgatctggagggatcgcagaccttcctccaagctgcattggattggcccggccccctgagcagcggcaacaaaattttgtatggtggccgcctgctgcgccttgttgttcctgtcgtcgaaagtcaagcgctccaccgtcccggagacctgttcaaagggggacgggcaggaccttgcgaaggtgcgctcgtcctcctccaggcggatgatttccacctcgctatcgtcccggacggaaatccggcccctcgtcccacaaatctccagcaaattggtgccagggcactcatgggctgaagcaataaaatgcccatgggcgccgttgaggtaggtcagaaaaagttcagcctcattttcaacctggatgggccgccctatggtggagcagcgggccagtacggaaaccggcataccgcagatccattgcataaggtctagttgatgggaggcttgggtcatcagcagtccgcccccttctccctgccaagtaccgcgccaggccccggaggtatagtatgcctccgttcggtagaggttggtgataatccagctacagcgcaccagctcccccagttcaccgctctggaccaaattttttatatgacggtaggcctgagccgcccgccgattatacatgacgccgcagaccagttccggccgttccgccagcacgggaaggatttccgccacctcgtcggcgaaaataccaaccggcttctccaccagcacatgcagccccgcctctagggcctgccgggtcatttcggggtgctgtgcgtggggagtacaaatgagtatcgcgtctacctggccagacctgagcatagcgccataatccgtaaatgcggcagcctgaaggccatgtcgctgtgctacctctcggatgtgcgcctcatttcggctgcacagcgccgtaagcgccacatcccggacctttccgcccacaatcaagccgatataatcgccggcaatggcgccgattcccgcaattcctaatctgagcatgcgtcacctcaaatgtggaagaatttcagcagttcattctcaaaaaaattgattcgttcgtgttcatacttagggtagaccaagtgcgtcttgggtccccgtgcccgattgaagatggcatattggcatttgggcgacgccgtctggtccagaagtcccgtgcccaacagcagggggcaggtcagcaatgcggcaaaactgacagggtcgaggccgtccagcacagccctatccgtcccgactgctccatcgcacatggccctcagatcacccggcaatgggttcagggccgcacagcggatcacgccgggtaccagagacgccgcaactatcgccagcccaccgccgaacccttcgccccaagtcatcaaacgggcggggtcggtggacgacaggccgatggccgcgtgggccagcgtcagggcgtccaaatatcggtcctccagagataatgccgcccaatcacgccgccaatcggccacggaggtttggttttccagggctgctacggcgtatcccagggccacaaagcgggtcatgtggtgccagcctcgaaccccccggcccaggtcatggaacatgagcaccgtggggaaggccccctcccgcgccgggcggatgtatctggcccggatctcccggccgttgggggcagggacggaccactgttgataggccgcttgagcattttggaaaggcaggcgctccaccaggacctcccccgccggggcggctttggcccatcggccgcgccatacggcctcaaaatctgtgggtatttcagtcatgccctgatatgtctcacaggctgctttttgctccgcaatcgtcatagctccgccgcctcccttccgaagaagtccaggatcaggtcgtcaaagtcctgaatctcctcatgtccatacccctcaaacagatacctgcgtttggggcaggtcaagttattatagacggcgcactgggtcgcgggtgggcacacttcgtcggccagccctgtgccgaagaggacgggacagcgaaccagatgggcaaagtttttgctatcaatgtaacccagcttggcaaaccactcgtcctgccgcgtcccgtccgggtcaaaccagcgggagtagtagcgcaggccctcataggcaatcaggtctgcccccagctcccacaccagccgatagtcgctcaggaaggggtataggatagccgcccggttcaccaggcccgggttgagggcggcgcaggccaggcctaagccgcccccctgggacgcgccgttgacaaagaccttgctttggtcgatgccccccagctcccgcacgatccggcagaggatgcggatattctgatgcaggcggacatagtacatctcttccacaggcccatccagccccgccacgatatggccggtgacggtggtgcccgcgaccccgcccaagtcctggccgttccccccctggccggggcagtccatggccagcagcgcacagcccatgcccgcaaaggaggactgctccagccagcttcggctggcccctgggtagccatggaactggaggaccaatggaaccgggcgggccgctctgggtttcacatacttggcatagagctgggcaccgcccatcccgcgaaaccacaagtccaggtactcgcaggtatggaagggcggaatttcggatggagtcacggcaaaatccagcggcacttgatccgcctcggccatccgcttgctccaaaaggcatcaaagtcagccggggcgggtgttgcacccacataatctcccagccgccgaatctcttgttctgtcacaggcatggggtcgtctcctcctcgataaaccgggcttggattgctcctccctggcgcgtcacacagatgggtcttgccatcgccggcttctcgcgcggatggtccgcccgataatgggcgccccggctctcccggcgcatcagggcggccttcaggatgcattgggcggtgcaaagctgtccagcccgtctacgtgttcttgcaatctcgtccacattgtctgtgggcgttaagatcaaagcgctgctcagtcccttcacccgctccagggcggcagacagtccggcctcgtcccgctctaccatggcatgatggaacatggtgtcctgcaagtcggcaaataccttccgacagtcagccgccgctacagctttaaaaaggcaggtcttgggcggttcctctattgcggtgcatgcagcagccgctgaactgccggctttaccaccgaacaccaggccgttggccgttgaaaggccgccaatgcggtcggccccgtgcatgccccctgtgacctctccggccgcaaacaggccgggtacaccggtagaggtatcgggggcgatccaaaccccgccattggccgcgtgagcgaacatcccaatttggatcgggtcttccatagttaggcctcttgcctcccggagccaatcaaaataggttttcacaaactccggggggctatggcgcatttcatctgaataggtaaccctcacaccccgtttatcctccagacaggcgcggtagatggccaggtctaccgccttggagggcagacgcgctgtgaaggggccgtgggtagcgcgcagttccagcaacgaagccgtttccccctccagcagtggggccccgtccggacggcgcagatcggtgaatcgaaatgtcttttcgttaaaaatggtctgatacgccggcgacagatagccaggcatgatctgcataaactccatattgaccagccggcagccggcctccagagccaatgcctgccccagcccctccacgtcggaggtgcaaaggtggtgacgaaacaggcttccgtaaccgcccgtcgccagcacaagggccttgcagcccaggtagtgcagttccgccccgtccgtaatcacagcgccgcatacccgaccgtccgcacggaccagttccagcgtctcccggccggaaagaatggtcacacccaactcttccagtctttgtgaaaagatctcccgggcgctgtcaaactcgatcccgttccagtcccggtgcttatggtcgaagcaagggatgtactcctgctgtccgcccttgcccgccttgcggagcctgacacccatgctgcggactttttcgatggccgggtggatgcccttcacaagtgctcttaccaaggcatcgtccgccatgccgcagcccacgtcctcgatggtggagatcaggtcggcctcatccgcttcgtctgcgggtcccaccagacccaggccccaggtcccggggtagaagctggagccggaaaacagcctgcccttgcacaccagaatcaccgaggcgccggactccgcagcggtcaacgccgcagagattcccgcgataccagaccccaataccagcacatcacaggtcgaggccaaattcagctccatatatccacccctcaatcgtcagaacccccggccggggtctggtcatagaggtggcaggcgcagaaatgctcctcaccgttaatcatatggcgcttcagttccggctttttgtgcatgcagatatccatacaattcttgcagcgtggatggaagtggcacccctcgggcggatggaccgggttgggcacatcgccctccagcacaatgcggctgcgcttgttatccgggtccaccacagggatggcggagaggagggcttcggtgtaggggtgcatggtgttttcgaagatctgctccgtggaggccagctccacgatccgtcccaggtacatgaccgcgatgcggtcagaaatgtactccaccacggacaggttatgggtaatgaagatgtaggtcagtttcagctcttccttgagcctcatcagcagattgagaacctgggcctggatggacacatccagcgccgagaccgcctcgtcgcagatcaccatctccgggtggaccagtagggcgcgggcgatcccgatccgctgccgctggccccccgaaaactcatggggatagcgatccatgtactccgggcgcatgttcaccgcctccaggatgtcggcaatgagtgcacgctgattcgtcttgttgactaccccgaaatgcctgagagggtcggccaaagattgataaattgtaaaagaggggttcagggaggaataggggtcctgaaaaacgatctggatgcggcgatgcaggacctgttcgtcctccctgttcaagtgccgcaggtcctttttaccgccgtgctgggggccgaaatcgtacatcatcgttccatcagtagccttgaccagttggatgatggatttgcccagtgtggtcttaccgcagccggactcccctaccagccccagagtctcccccttgtagatgtccaggtccacgtcgttgaccgcctgcacatggtcccggaccttgttgaaaaaaccgccccgaactgggaaaaaggtcttcaccccccgcagctccagcagcacttttttctcgctcatacggcttcgacctcctctctgtgtccggcgtagacctgttcggcgttccagcagcgtaccgcatgtccatcacacaccgggacctctggaggcatttcctgcctgcacttttcacagcagaaatcgcaccggggggcaaattggcatcccttgggccggtcatatgggtcgggtgtggagccgcggatcggctccaacctctgtcccctgcccttgtgaaggatcgggatggagcgcagcagggcggcggtgtagggatgggcgggatacttgagcacctcccgtacactgccccgttccacgatggaacccatatacatcactgccacgtcgtccgccagctcactgaccacgcccatatcatgggtaatgagcatgatggccgtgtcgtgctcccgcttcaatttttccatcagttcaaaaatctgggcctggattgtcacatccagggcagtggtgggctcgtcggcaatgagcaccttggggctgcagctcatggccatggcgatcatggcccgctggcgcataccgccggagaactcatgggggtactggtcaatgcgcttctccggggtggagatccccatctgtgtcagcagctccagcgtccgggcacggcgggatcttttgtccaggtccgtatggtacttcagatcctccccgatctggaatccgatggtgtagaccgggttgagggcggtcatcgggtcctgaaagatcatggctatgtcccggccgcggagggcgcgcatttccttgccgttgcggggcagttgatcgatccgaatgtcacccttctcgctgtggtaggtgatggccccgctctcaatgcgggagagcttgggcagaagctgcatgatggaagaggccgtcacgctcttgccgcagcccgactcccccaccacacagagggtccgtcccttataaagttcgaaggagacgccgttgagaaccttgttgcaccgcttgtcggagtaaaaataggttcgcagatccttgacggtgatgatggcttgctgttccatatcgctccctcccttatccctgctgggtggggtcggtggaatcgcgcagtccgtcgccgatgcagttgatgctgatgacgaacagggacacgacaattcccaccggcagccacagccaccagtagttctgcatgacgtagaggtcctgggcggcgttgaggatattgccccaggtggcgatctcgggcggaacgcccagccctaaaaagctcatggccgcctcatccagaatgaacatggcggtggagagtgtcaggtttaccaccacggggccgatggcgttgggcagcatgtgcttgtacgcgatgacaaaatcacttaggccaaaggcccgcatggactgcacatactcctcctcccgcaaggagagcattttcgctcgtgcctgtcggtagacgccgccccagccggtaagaataaagataaagatcaggttccaaaggccccggccaaagatggtgcccagcatcatcaccagaatcagttgcgggaaggacataaaaatctcggacaggcgcagcacgatcttatcaaatagcccgcccttataaccgccgtagcagcccagcagtacgccgatgacggcggcgcccagggcggaacccagtccgatcaggatagacaggcgtccgccgtacagggtacgggagaacacatcacggcccagcttatccgtgccaaacaggtgctggagcgacggcggctgggtcatggcccgcaggtcggtggtcaaagggtcatagggagaaataagcggcgccagcaagcaggagatcaggataatggcgaaaacaaccagtccaatgacggccagccggttctccagcattttgcgcacggcacggctggtcttgctcttgcccagcttgcccgcttcctcggcgtcccggagcctgtcaaacttccggtccagccgggtacgctttctggtgttggtcagttcagcgttcatgtcgtttcccccttactccagtttgacccgcgggtcaaggaccgccgtcagaatatctaccaggaagctggccatgagcacggcaagaaccgaaaagagggcgatcatcataaccagcgggtagttctgccccgttaccgccgtcttaaaggcgttaccaatccccggccactggaagatggtctcaatgacgacagagccgccgatcagggtgggcagacggaaaccaattaacaccactacaggggtgagggccacccggaacccgtggaccaggttgacccgccactccggcagacccttggcccgtgctgtcttgatgtagtccttgttcattgtatccagcatactggaacgggaatagcgcatgacgccggcggtgagggagattcccagcacgctggcgggcaaaatcagatatttgaagtggttccatatccccgtctctcccggcgccatgcggcctccaatcggcaagatcgcccagtccagtgcaaagacgaggatacacagcataccgaagaagaactgggggatggagacgccgatcatgccgaacaccgtcagcacgttgtctccaatagaccccttcttcagcgcactgaggatgcccaggatgctgcccagcaccgacgagatggccagggccgccagggacagctccagcgtggccgggaagagctggagcaggatgtccttgatgggcacgccgctggtaatggaatagccgaaattaccgtggagcagttcccccagccagcgcacgtagcgcaggaggaagggatcgttgaggccgtaggactcccgcagcgcctccagttgttccggattcacattcgcaagctggtccggcggaatcatatgggagatggcgtctcctggcgtcagttccagcccaccgtaaatgaggaaagtgatgaccagaaccatggggatcatatacagcagtcgtttcagaatatattgagcggtatttctcatgaagctccctcccggatttaaaagaggaaggggcggctggcgccgccccttcccatcaatagtctctcagggctgaacggagagggcccggcccttatgtatttttcgggctcggccggtaatcactgtacgttccagttctggatgtcccagttgatgcaaaactgcggggtgcccttttggatgtcgccgatcttgtcgctggtaatcaggaagatgggctgatagtagagagccatggtgaacagattctcattctcgtacttaatcagctccttgaacgcctcgttctgcgcattcacatcggcggaggcgttggtggcgtcgatcaggcggttaagctcggcgtcctctggcgtgtgagagttggtgggagagccggtacggtagcggtcgtaatactcatgaagggagagggcggcgttggcggcgtagcagatgtcccaatccacagcgcgggggccgttggtctggtcggcgggagcggcccacaggatggtggccagatcgccctccaccagctcaaactccatcttgatgccaacgtcagccaaatacgcctgaacggcggtcatcaggtccacagtggcctggtcggtgtagtaatagacagccttgatgacggtgttggggtcccaattggcctcggccagcagctccttggccttctccgggttatagttgtagtcgttcaggtcgccgcccttgaggttggcgtcgggcgccagggcgttggcggggacagccgagccctggaaaagagtctcacagatggtctccatgtcaatggcgtagcggagggcctgacggacccggacatcagccaagggggcgggggagccgtccttcttgtcgaacttgttgaggtagaacaggcgggtatagcgcacgtcgataggcgtaacggtgatgccgggggtaccctccagggcctgcacgtctgcaaccatcttggtgtagccgtagtccagattgccggacttggcgcgggtgaccacattgggatcggagtcaccggcgctgggcagaagctggatcttgaagtcggccacgccgttatagtatctgtcgaagggtgccaggatggtgtagttcttcatattgacctcttccaccatgaaaggtccgcagccgatggggtgttggaagaagggggcctgctggacctggagggggtcaattccctcgaactcgctcttgggcacgggggcgaactgggtgaaggtcagcagagcgtcgggggcgatcttatcaaaggtaatgatgatcttctgcccgtcgatagcgataccgctgaaggtgtcattgaaagtgtcgccggtcttgctgccggcgatggcggagaaggttgagataaatacggcgttggccaccggagttttggcgacaaactcaatgctccacttgatgtcctcaggggtgaccttttctccgttgtgccagtaagcgtcgtcccgaagagtgaaggtaagtgtcttgccgtccgcgctgtactcataggtagccagcgcgtctgggtggttggggatgggattgaggttttcgtcggccacaatcaggtgcccatagaccgccttgttatagacgtaagtacctggattgagccagggcgtctcgaagaactcctccgggccgccgttggagtagaccagcttttcgccggcgactccgctgtcaggggccacaggctgggtggtctgctgcgtaccgggatcttccggcggattcgtgttgcctgtgggcgtcccgccacaggcggcgaggccgaggaccagtgcggaagtgagcaagagacctgttgcgcgtttccagaggtatttcattgattcatttctccttcctaagcgttgcatagtagacgggccactgggacaaatgcgccgctgggtgactgttgctctgatgctggttctattttattccatatgaaagtcattttcaacaactaataatacacgaaaatcagtttcttttcttgtgcaatcacacaaaaatacttattttctcaaacaaggaattgtcagagttagaaaatgagcataaaatgcttcttggagatgcggcgtgcccctgatattgaaccctgctaccgcgtttacacagaaaggactgaaaccatccatgaatggcgaatcgattttcgatgtcattatccaaggctacagctcactgacccgttccgagatcagggtggccgactatatcctcaagcacaagcccgagctgccctatattatgagcaagactctggcggatgcttgccaggtaagcgaggcaactatcaccaggttctgccgctctgtgggctgcgccagctttaacgattttaaggtacgggcggctcaggccatctcctctgacagtacctccggcccggccagcggatatgacctctatggtgacatccagttggaggactccctggagcaaaaatgccaaaagctataccgcgtcggcactcaggccctgcaacagacgctggacttgctggattacggcgcggtccgcaaggtggtggactgcctctatgaggcggataatgtgtactgcttcggccagggcaacacttccatcatagccatggacgcttgggggcgtttttcctccatcacctccaaatttcattggatcaatgacttccacatgcaggcgatcaccgccgctaccctaggcgccaaggacgtcattctctatttctctttttccggcgccatgcgggagctgtccgagctgggcggcctcgtccagaagacggaggccaagctgattctggtcacccggtttcccaattcccccggcgccaaattttccgacctgctcctgatctgcggtgcggacgaagccccaaaccagcagggttccgtcgccgtcaaactcgggcagttgtttatcatagatgttctgtttcacgaatactgctcaaaagacgccaaaaccgccctggaaaacagagaacgtaccctgaacgccactgctcccatgttgctctgatgctaaagtgcaatatgagaaagcgggagatcatacactgtggccgcgctccgcttggctgccagccgggtgaacccggctctggaaagcggacgggccctcttccggcatttgagggagccgcacatcaatgcgccggtcaggcggcgccatggagcagccctatgccacccagggtgtccaggcccaaacgagggctcttttgattcccggattccacggcatccaggccgtcggcgcccagcctggaaatatggccggtctgtatggtgcggcatatcaggcgctacagaccgggtaaggagaaaattcacatgatttatgacaaacgcgctgagctcgcccggtatttcgggctgtccccaaatttggacgcggccatccgtttccttcaaaccactgacctcaccgccctgccaatggggcggactgagctcccgggcggagacatatactacaaccactttacctacaccacggctctcatatcccaggcctctctttttgaggcccatgaacgttatctggacctccacatcgtcctttccggctgcgaacaggtagccctggccccagtagaatccctagatgaggcggaagttcgtgcagatgaggattctaccatgtacctgggtacgccggaatattcggttacgttggaccagaacagattcctgctggtctttcccggtgaggggcacctgccaaagctctccgatagagttccgatgaatattgacaagctggtcttgaaaattccctgctgacataagggaaaactgtatggatattaaaaatatcaaggtgtgctcccggcgttctatgcctgttgcgatgacgagggcaacacctcccccaagcgcacccgtgctccggcacgttattttctggaaaaaaggaggggcacaggcttctacgtgggcggctctcccggcgagtacgtctgaaacgggctctttatcacgccaaaatgaaagaacgccatcttgccttagcgtttcatttctaattaggcttaaagtaaaaagatagaccggcctcccttttcgggctatccagtctatctttttatgggtttgttttgtaacgcgcccgtttttgttttattgatttcctttgtccgaacgcagggtatgtaccggagccatgggaactgcaacccggacggaatcctgctccacactcaactcggtgaccgcgaaaggccgctgggtggcctccacatctgttccatacaaaaccaggcagagcctccgtcccgcccgaaccgtatgatccatgggtaccatggagaactggtaatcgtaaataacgcctggctcaatggtatccttacagtaatggctgcggcggttctgggcattcatccagccgcgggagatcaccttgaaggcagagggcttctcttccaaccggaagcgcttccagtcccccaacggtgtgttgtttccccatggaatcccgccggcctgtactacctcctgttccggtgtgagccggcattcctctcccagttccaccagcatggcactgagaatggcggtagaggcccggcaggcggcacgaaacgaaacctgaaccgtgccgctgatccgggtatccgtttcaagcggggcggtgatataacgcaggcagtgggcatgtcgttcgctcaacaccagctcggccaaccactcggcggcgttgtcccgggttctgtcatacacagtggctgacaggtcgtccaccaggcggccgctcgcctgggcgggcatgagcaccggctcggtataccctttgaccgccgggaaggaaggcgacgccagccagagatcctgatccagattgctctgcaccagaacattggggatacgctccgccgcaccgttctcaataccgtagagccagtgatccagccaaaggtggagcatctcattgaaccggctgccctgcaaatcatggatgtagatatgcccgccctgatgaagcatcatcttacaggggatccctctggattccatggcggcaaagagattgacgcaatgtgtcggcttgacattccaatccgccagaccatgtaccagaaacaccgatgccttgaaccggtcggccgccttcaggtaattgcgcatgtcccaccagcggctgtagttgccgctgtcccggtcctcatctgccgcaattccctccagccaggcggcatacgcctcccgaacggacgcatagtcctccgggtccttggcacggctgaagcagtatttggccaaaatgtccaggtcgtcgccctgccagccgatggcgggcaggttcaaaccgttgcagcggtagtagtcataccagttggaaatggcggcttcgggaatgatggtttccaatccctccacaccggtggaggcgaccgcgatacacatcgtccccaggtagctcttgccggacatggccaccttgccggtgcaccagtccgcccggatctcaatgttgtccgtcaggttggtaaaggcccggcagcggccgttgagccagtcgatgaccgccttgaatgccgccgtctcctccggggaaccgcagcagttgaatccctgggatccccgggtacccaggccgccgcagaacacggaggcgtagccacgggagttgaagtagctgtaccagtcgctgatgcagtccaacgggatctcctccgttggcgcggtatccgcatagccgacggtggccctggggtatctgggctgggggaaggatactgtggacgggtcaaaggtgatgtccgactcggtgatgtgctgctggggatagggactcacatcccggtccacatcgtgggggacataccaatcctcattacactccagcatgtaggggttggccacatagatcgcgggcaccctcatcccctgagtggtttccagtgggcggcggatgtagactgcgatcagatccagtcggccgtctccgtctgtatctaccggcgtctccacatagaccttctcaaacagacaccttttataatcaaaaaccggctgcgtcaggccgtccttcagcacaataccaggtatatgttgttccacaagaacgttctcctttccgaagagaggcttacttatcctgacttttcttcaggaagcgcttccaaaccaacaccatgcctgcgcctagaagcagcattacgatgaggaaggcaaaatagtagcggtagccggtgacgcccggatagccgtcgatcagcacgcccgccagcagggaacagaagatctccggcagataacctacagtggagataatgccggccgccgttccggaataccgctccgggatcttaccctcgtccatcatggcccaggtcagggcatagttgacattgtagaagaaatagattaccaggaacaggatcacaaacggcagaaccgaggccgtggcctgtggcagaaacaggatggccacagtgcccaccgccatggcgatgaatgaggtgaacagcagggagctggtacccaccttgtcggccaggtagccgccgcccacgttggaaacaggacacaggaaacgcttacaggccgccagaatcgccccgaaggtgacgctcatgcccagaatcgaggtgccgtagggggtgaagtagtacagggacagcgtaaagacatagttgcagaaggtcaccaggccgatgatccagatggcaggcattttaagcaccttgcccagatcccggaaggtaatacgctcactcttctcaatggtggactcgtcccgcatcttccagaacaccagcagtccgctcagcactgtaagaacagagtagaagataatcacatagcgcatgcccatcttgtcatccatattactggcgctcagaccaatccggaaggccacgacagccagaggcgccatgacggcggcggtcacgccgcggccgccctcgaaccagccgaaggacttacccttgtcttccgggcttgacaagacgcggacggctttcacacaggcgggccagaacgcaaacagggaggtgaagccccaaaaggcatacaggcccaccagcatggggaaggtcagggggagcaggtggagaaagccgcccagtccggttcctaccagcgacaccgtcagcagcaggcggatgctgacccggtctgccaggtaacctccgaacaagtaggagatcataccaaagacgccgaagatgcttccgaagacgcccatctgggtgttggtcagatgataaacctccaaataggcgtcatagtagtcataccggaagtagggcaggccgtagatgatggcgccgcctgcggcgatgagcaggatggtaatgaaattccgcgcggtcttttcgcccatcccaagcttcgaaaacagtttggacatttttcattctctccttattgttttttcaactggtatacctcagtatacttctcccgaagatagttgatgaagtaggtggagcggaggggttcccctgtggcccgtttcaccagctcgcccggcggatagatcgctccgaagcggtggatccgcgttgccagccactgatggatctcccggaagcgcccggcagccaacaaatggcgaaggggccccagctcccgctccagtgcggcggcaaattgtgcggccatcaaattggaggtaaggtaaccggggaaatagcccatatagcccgcagcccattggatatcctgaaggacgccctcccggtcgttccggggtgtgattcccagataatcggtgtatttctgtctccacacctgtggcagctccgccacagacagcgttccgcggatcagatccttctccacctcatagcgtatgaggatatggagaatataggtcagctcatcggcattgttccggatcaacgtgggacggacctgattgaccgactgaaagagcgtctcccgctcgcccacagccagtgaggggcagagctgctgcattcttgggaacagatactcccagaatccggcgctccgtccaatgatgttctcataaagacgggcctccgccagctcggtggcaaaggatgccacttcgcccagaagcatccccagcagagccggatcaatatcctgttcataaaggcccataccgccttcgtgcagggtgttgaacagaccggagcggaaatcctccgcctgataggatgtgatcactcggacatcgcccggtgaagctgccagggttgttggatgaggtccctcgtccagacggcctgatgcaaaatcaaatccgattgtctccaatacatattgcgagagggcccgctgttcctccagcgggaggcgaaaccgcccttccgccggttccccacatggcattccacgggcctgcagtgtctgaaacaggtcgatcacaaagtgtttcagctcatccgccagacgatccatctgctgtacagtagtccctggctcatagaagctcatgagggcgtcgtaaggctccgcttcgtacccccaatatccggcgaaagcccggaaggtatccacaatccgctccagatagggagcaaaccgctgaaagtcattggcttcccgtgcctgttcccatacctgctcagcctttgcaatgagggcaatgtatgcctgatattcctcctgcgggatcttattgatataaatgtagttgctctctacccttcgaaccattgcggaaacttggggtggagcgtccttctgccgggaaaaatgatcgaccaggctccgcagctccggcgagcgaaaccgctcatagagctgcgcgcctagaaaggacatcacctcactgcgataggtcagccccttctccggcatgtaggtcatcttgtcccagtaaagcgtggagttaagtgtatatttcagatattcgatctcacggatcagccgccgaagctgctccagcttttgtgcatcggaagcgcaacgtctcacgatctcccctcctccttgttcggtgccgcccggttgtatttccacagaccggccatcaacagcatgcaagccaccacataaataccggaggcaatataataggccgtgcggtagccctcctgttccacaaacagcacattcccggtaaaccaaccgctgagaatactggcgagccccgccgccagattgatcatagaggcaaaggccgggcggagttggcgtggtaccagctccatggacaaagcactgtccaccggcgaactgaggttgatcaagccagaacgcataaacagggcgatgcccacgactggaaccataaattggccaaaccggtcgccgttggcgataagaagcataaacggaacggagagcatcgccacaccgcccagcgtcacaatctgcccaaaccgtctgaccaccgccggggtgaatagcaggaagagaacgatggccagataggacagggagaccagcagtgaagatgtcgcccggtcaatgtgcagatttcggttgaggaaaatcgaataataggaagtgaacagtcccataccaaaagaaatcagcacccagtagatcagatagatcaccgcatcccgttggagcagagcctgccgcatctcccgtagccgctgccgccagggaacctgctctgatatggcgatgcagtggtcttcccgctcttcccggataagaagcacgggaatcagtccaaccagcgcgagcactgcaacaagcagcagcacatcccggttcccctgtaggtagtgttcccgcagcccgggcgccatggtgtcgacgtgttccgtcagtgtttttgccgcctgataggtcacgcccgcccgcagggaaaacatcttgaccgtcagcacgccgcccagataagtagtaagaaaataccccaggtaacccagatagtaggcccgcgtataccagtcaatattgttgctccggtcggtaaacaccgccacataaggcgccagcataatataatggagctgaatgcctaccagtgcaagcagagtggtcagaaagaatacagactcggtctgcatgaataccgcgctcaacagggccgccgcacaggaggccgaacagaacaccaaaagctttttatagcccgtcttcggaatcagcagcagcatcagagcactgataaaggtcgcatacccataaaacgcccaaaaggatgtcgctaccgaacgcgccatttcctgcatgtaattgacataggtatcatagatgatgccgctgaccagattgttcagcgcatagctgatgataaacatggttatgttccagatctttctccgccctgggctcggccgttccatatcgtcccccctatttataccggaactgtgtaaaaaatgggtgcagcatattgagtgaaaacaggtcgtctgtctgttctatcccggaagactccgctccgctctctccgtgcaccgggcggggaacaggcggctcctcgccttccagaatctccaacagagccagcaggatcttggcctcccttttggctttctgtaggttgaatttgtgggcgcgtactgtggcagtgctgattcccatgatctcaccgatctcgtccgtacttttcccctcatagatgcaggatagcagcgtcttctgcacctcggtcagaccgttgagcgtcttatccagctccagcatgggccagaatgtgccggagtggacttcctgcatatgctcccgtatcgcccgctctgccgtcacatcacgcccgcggctgtgatagatgacgcctgtctcaaaagacgcgccgcagaaaatgcaggtgtaagtaccatctctatggatgacgtatccgcggcgcagctcttccagcgagagctccttaaagtcccgcggctcgtttccacctgcccgcttcaattcagtcatcatagctgcgcctccatttactaatcatttttataaaacgtttatttttgattaaatgataatgtcatatcgtttatttgtcaatatccaacaacagagaattccattttcagcagtccgctgaatattttgccctttttttgacacacttccttttctttcgtccccaaacacttgcagtacaacggaaagccccccttcatattcttagtcataatagacaatttttatcagtctatctgaacgctttagccggagagtttgcggacagactaagccccccggaatcccaatgggattccggggggctctcttattgctctttgaatggaactgtgttcagcccacgtgctcgccgaagttcatcagcatctgggccacctcggcgcgggtcgcggtgccctggggatccaggacgccgttccccttgccggagagcacctgcgcgttgaccgcccacgccatggcctcctgcgcccagtcggagatgctggcagagtcgctgaactcccgcacggtcatcccgccctgggtggtgtcatagcccttcacctgggcatagcggtacagaatcgccgcaagctgctcccgggtcacgctgtcctccggcccaaacgcgccggtgtcgtaccccttcacgatgccgcgggccgccgcccagttcaccgcgtcggcgtaccacgcgttcgccgccacgtcggtgaagcctgccgcgccgggtgcctccggccgctcctccaggttgtagagcacctgggcgatcatgctccgggtcaggttcatggtgggggcgaaggtggtgtccgtggttccctccatcattcccttgtcgtacacatacaccacggcgtcatagaaccagtcgccgctcgttacatcggtgaagggcaggccctccggctccaccgccgtgaacacggcctccaccgtgaccttggaggcgggcatctgaaaggtgtacttgccgtcgcccttatcggtcagcttgatccggtcgccgtccttgtccgttatggtcaacttgtccagctcatacccctcgttgggcttcacggtgacagtcaccgtgctccccttggaggcgcgggtggagctcaccttcacgctgccgttgtccgtgtcctccacgctcaccgtgtaccgggttgagccggaggaggagctgccgccgtggctctcctccaccacggtaaaggtattgccgtcgcggctcaggctgtagccggagccggcggtaatattgtccgagtcgaacttttttccgttgatgtcaatgctaaaggtgacctcgcggcttacggtgaccttgctgtcgacatccttctccagcctgatggtctggccgtcctgcacgtcgtccacggcatcctgaagtgtctcatagtaggtaccgtcaatctcagccgctgggctgacctccgccttcaaagtgaaggtgctgaacccgtgacgggtggtaaaggtggcggtattgcttccactactctccgtcactgtcgccttgtagagataagtgcgtccgttgtccttggcgtgctccacatagaggttgtctgtcttaaacccgctgggcaggggcacgcgcagagtgacgttggtagtcacgttcatcggcttgggatcttccataacgaccgcatttttctcgctgccttcaaggataatggttccgtttttatctacgtccgccgttgtcgccacggtacgcaccatgggggtaatgtccagcttcatttccttggtgccataactctctactgtaatgtccagatacggctgcaccacgatagtgacgttcttatccgtgacggtaatatcctctttcttcaaggcttccgtgcccgcttccacggtcacagtattggtgtttgcctcgccattggcctcgccggtcagtccggtggcctcagtcttagcaactgcctgggtcacactctctccaataccatcagcggccttcacctcaggctcgccagccacaacctcagccgcagtcgtattcttgtcctggatgccgtacatgccgtcctccgccacggcgatcttcccctcagtcacatagtcggagggatcgaaggagaaccggccgccggagatgaagctggtcttattttcgctgtatacggccagcgtaccgctgtttgtcgccacaaatgtaccgccagtcacgttcagctcgaccttcttcagagcatcgtcatcatttttctcggggttgctttggtacagcgcggtatagccggaaatggttccgccggagatattgaccttaagagggagcttggtagtatgctgcgtcacggcaatgccagcgcccaccgtggttgtgccgctgccgttgggggtagtggttgtcggtatccctttggcggtgataactgcatccccggagaggttcagtttacccgcgcggatctcaatgccggtctccccgccggtcagccttccgcccgtaatattcagctcgccggactgggggtggtagatggcatagccgtcggtaccggtcagctcgccgccgttgatgttgatcaccgtgttgtgttttgtgccattgcccatgatggcggcgctgcctgtctcgatgcgcgtcccctcattgaccgtgagggtggtgggagcactctcctcgccggctcccatgatggaaacgccgattgcaccgtatgtttcgtcgttgtcgtcgccattgggcagatcacggagcactgtgcccgcatccagggtcagtgtaccgccgtccgacacctcaacgaccttgttgtaataaggagatgccagagtgcgcggctgataggtctggaactctaccgacgaagtcgttaccttcgttgcgccggttacgttgagtgcgatcatattccgcgcggtctttccctcaccgcgcatgtcaatgactgtaccatttttcaccacgccggttcctgctgtgaattggagaccatatgcaaccccagacgtatcgctgacaatccgcagggtatggccgtccaggtcgagcgtgatgcctgcgctggtggtcaccggagcggtggccagatccttgagcaccgtcacggtctggccgtcctgggctgcgccgacggcctcagccagagtgccataataggttccattcacgacagccgcggcgttactctcattcagcctgtccacgccaaaggttccgtcgctgttggcgatcaggctgaagcccttcgccaggtagtcgctcacatcgctggagaacgtgccgccggagatctccatacggctctccttcgtttcatcggatgtccgcaccaccacagagtccacacccgcgccggtagccttgatcacggcgcttccgctgatggaagccttgtctcccgaagcaagggctggatattttgcggcctcatcatataccacgccgctgcaaggaattgcgttcttattgtcgcctacccagccggccgccgtacctgttccggtaatcgttccgccggtaatctcggcggtgcccgcgcgcatcagcacgcccacgccgccgtcggcgtaaatatccacatcgccggagatggtcagcttgccgctctggggatggtacacgccgcaggcaatgtagccgctggaggtaatatgcccgatcagtgtgccgccggtcaggttgatctcggtgccgccggcatttgttgtttcatttaccgtaccgtttccggccaccacggcattgttatctgccacgatcacgccgccgcttacgttcaatacagccttgttcccataggcgccgagaccatactcctccgaattcacatatccgcccttcacggtgaggctggagctaaccacctccccattcggagtctgctgggcaagcacattgattccgttgccttttgtggcgataaccgtaccgctctccagcaccagattaccgccgttctgcacctgaactgcatagccgctcgatgcgctctcaatcttgccggaagcataggtcacggtttcatagtccgcgctgaccacggggccctcagcagacgccttgctgtcccggatcgtaagatcgccctccacaacaagcgcccagctatccgcctttcccgtcagattgtgaccattcaaatccaggatgagcgttttaccagcagataccttaacgttctccgtggtatccctgttcagtgtcacgacctgtccttccctctcaacggcatcaatcgccgcttggagggtggcatagtgctggccgccgacctctgcaacactgttgctctcgtccagctcgcccacgatgaaggtgccgtcggggccttcggtgatctccgttccctccaccacatactcgctcacatcgctggagaaggtgccgccagcaatctctaatccgccaagtgcctcgtctacatgaactgcctctttatcgtcagattgagagataaagctaccgccatagatatggactagcgcctccttcttatctccgccatcgttactatttccaacaaatgctgcaactttacttatagaagtaaattcaccaccataaacattacactctacctcaccggattctcccgcaacgtacagtgcatagaacgcagaactaccattggagtgcttatcgcatgccacggttttaaactcgccgtcccgcacttccgaatagcctgccgatgtggaaaaagccccttgtacaccaataacagtaccattatagaaatacaattccggtttggcactctcttcagaatcctgatggctttgaatggtatatccccaactgctactattacagcttgagcaggaacggcaatcaaaagtaccatcgtatatataagtcttgcctgcgttataaaccgctgtcattgctccgttaaacgttccatcctgaatcttcaaaacactatcagggcgatttttaatggaagcgccacttgcatcaactgagccagtatatgtaccgttttcgatagtcagtgtaccataattgtcaatcgcgccatatccgcctgtcttagatgcagacgcatcgattgtgccgttccccgttaccgtcagggtacctttgttcacaatcggcctgcccgtaaagtccgacgccacggtaatactgtggccctccatgtccaagataatattcttgttttccggaatggtgatgatctgctccgtcgtcatcccggcgatatcacctgccagtgtaaccgtagtttctttaccatctgatgcagcttcaatcgcctgcttcagagcgctgtaggctccgttatctggctcggcaggttctcctaccggctccgtttcctcttccactggggcgaccgcttcctcgtctaatccttctgctcctacttccggcccaatagctaaggcacttgcaggaagaaaggttattaacatacatatagacattaatgccgccaatcccttttttgcccgtttcatgttgttcctccttttttaaattgcgccccggctccactgctgtcagttgttattgtcttttgcatgcaaaagacagaagtgtgccggcacacttggcattcttactgtatcacattgtcccaatattttcaagagggcacgtccacggagtcctcttatgcgttgtaggggtacagtacatattgaatagttgaagttgcgcacggcaactcggcaagagggtcctatcctttatgggaaagggtataacacaggatatggtgtgagcggagccatcaggaaatgcaagtaagatccggtcatatatctacttctggaaagccatccggagaggaacattggagtctttcgtctgctggtttggccgaagaaaagcgggccaaaaccactgttcagacggttttcacccactttcttattgtacctttctattttgtcctaaacactgtattttgtaacggactgcttttccatttcactggtctccgaattctgcccccgggggccagggggatcttttcaaaggggggttccacgcctggcggcggcggctcaccaccggttggaccgcaggccggagcgacaccggctgtatttctggaatagccattgcctccagtgtttcctccggtatcacctgacttggatggtactattcagggcgtaaaacagcaatttgctttttctgaaaggtatgcttttccagcagattttttactctgccgtaataaatatgcaggaacttattggaaccgctgtcatgtaaaccgggtaaggcctccctcagagcgtttcacgtccatgactcaggaaagggctttcgtagtgcgggtggcccacttttagaagtcctattagtatattgcgcccacagcatctttttgaaaacaggttgatagaggccgctgcgaggaaagcctcagaccgttctctgcggaaagtgtcaaaatatatcccagtccgttgggagcctcgatctgtggccattgctctggtccccagtggttcagcgctgtgaccgctgttttaatcagtccggaatgtgtcaccaccgtagcgctttgacttccctgagccaggcaatccctcatcaagcctgctactgcctccagaaccctccggcgaaacgccttatatgtctctacatcaaggatggggtgccctgccagccaagcccggaaaaaatgcataaagtcctcctgtgtaccaggacggttttccaatgagccaaaacagatctcgcggaactccgggcgcaggccgtccagtacgatgtgcggtccgtacagttcctgaaacgtctccctgcaacgggaaaggtcggagctgaagtagcgtcccgtcctagggtagcggattacctgccgcagctccctcagttcccggcgccccctttctgtgagcggtacgtcgctccacccgctgaacaggcttttttcgttgcccagcgagtagccatggcgcaccagaaccagttgaaattccatcagggcacactctcctcccgtttcagggctggcagttccaccgtcatcagtgtctgtgccaggcgcacttctccgttccactgggccttcacctggtccaccagcagatgagggtccccatacagcggcagatgactgagtagcagcatgcctggcgcagccttacgccccagttgggccacgtccgtactggtcatgtggccagcacgggctccatccgccccggcatacaggctgcactctgcgatcagaagatcggcaccctctgcaaactctgccagttggggcgtataggcgccatctgccgtatacaccagagtggactgcccacattttacttttaccgcaaggcactccaccggatgtgctgttttgtgaaaggtgcagcaaaatggcccgatctgcagcttatcatctgccccaatagtctgcgcataggtatacggctccatggtcaaacgttcaaaatacggttcgaccggcaacccataaaaatgcagtggttgctgtgcagccccagtctgcatttggatcagcctgccatagctcagtgcccccgcgtcgctgcagtggtcgtaatgatagtgggacagcagcacatggtgtaactcctgaagaggcaatgcgttctgcagcatagacgccgccccgctgccgcagtccagaagtagatgttctccttggcaactcaacagataagcactacaggcttcgtttacccgacagcaccccccacagcagccgattaccgtacaccgcatacacagccctcccccgttgaacatgagcttgcaatcagccgttttgtatagtcgtctttcggcgtacggatcaactggctcccctctccctgctccacaatgcggccacggttaatcacaacgataaaatccgacatatagtggatcacgccaatatcgtgagagataaagagatatgctgtagaaaattccttttgaagatccttcaacaggttcaggatctgcgcctgaatggacacatccagcgcggacacacattcatcgcagataatgacctcgggcgagagcagcaatgcgcgggcaatggcaatgcgctggcattgcccgccgctgagttccgagggatatttgcccagggtggaatccggcagtcccacacggttgagcatctcccgcaccgtttcccgggctttatgcggtttaaagccgtccaccaggatcttcataggctctacaaggattctctccacagtataataagggttcatggattctttgggattttggaaaatatattgcacattgcggcgaaagcgccggtactccttttctcccagtgagcggatatcctgccctttgtatcgcacgattcccgatgtaggctgctgcagatcgccaaatatctctcccaaagtggattttccgcttccgctttctcctaccacgcccagagtctgtcctgagtacagtgccagatcgatcccctgaagcgcctgaaacgtgtccctgcgtctcagcagcatctgttgcttgacgggaaaccgcttttccatgccgattgcctccaatactgccgtcatgccctgcactcctcccatgctttgctgcaccgcacaaaatgtccatctctccgggagctcttaaccgagccgccgcactcctgccggcatgcactgcagcggggctggaacaggcagtggctggtatcccttccatgctccgggacatagcctggaatctcattgagccggacgttgcggtcctggtccagccgggggatcacagacagcagcgcctgtgtataggggtgctgcggctgtgaaaatacttcgttgcttccgcccgactccactatctgtcccgcatacattaccgccaccttgtcgcaataccgccgaatcaggttcagatcatgagaaatcataatgatcgccacatgctgctgttcgttgatcgagtggaatagttcaatgacctgctgctttacaacgcagtccagcgcggtggtgggctcatccgcaatgatgacctgaggctcgcacatcagcgccatggctatgtttaccctttggcgcatcccgccggagatttgtgcgggatagctctccatcacgcggtttacgtcgcggatacccacccggtccaaaagcgttttcgcccgttcctgcgcagcctttttggacgtctggaaatggatgcggtacccatccgtcagttgattcttgattttgatcaagggatgcaaataagccaccgtgttctgcggtacaaaaccgattttcttgcccagaaatatacgccgctccttttccggcaggttcagcagatcctcccccaaaacccgcagatgtgtcacagaggctgtcagatcctgcggcagtagatggaggatcgcttttgctgtgattgtttttcctgagccggactcgcctgcaattcccagacattcctgccgtttcagacagaggcccacatttttcaccagagcgtctccctcagcgctgcgcaccgtaagtccctcaatttccaaaaccgcatcattcatgttttcgatctccttttcaccagccggtcgttcagcccatcccccaaaagattaaaccccaacaccgtaatcaggagcaccacacccggggcaatagcaatatacggatagttcagaacaaactgccgtgcctcgttcagcatcatgccccaactgggcgtcggaggctggatccccaatcctaaaaaggaaagagaggactccagaagcacagcaccgccgatgctggagctgaattgggtaatcagtctgggaagcatatccggcagcatatgaaacaacacaatatatcctccactgcatccatagctgtgcgcggccttgatatataggcgctgtttattctccagcaccatggagtataccagcctggaaaatgtaggaaccataaaaagccctatggccaacacagcgcccaaaatccccttgcccaaaaccgtgaccagcatcatcgcaagcaaaataccaggaaaggacatcatgccgtcaataaaccgcataataactgcgcgcaccgcgcctttgagcatggccgccgatgcgccaataatgctgcccgccagcgcgcccacggtgaccgagcacacgcctaccagcagagcccagcgagacgcctccatgattcggctcaggacatcgcgcccaaattggtcggtccctaaaaggtgtgccgcactgggcagcgcaaaccggttcagtgtatccatcttttctggatctgcaggcatccagaaaaacgaaatgatacatatagctgcgatgctggccgccatgatagcacctgcccagaaagatacgctctgttttttcttcatccctgtacggtctcctctccggtacggatagtggggttggcggccataaccgccagatccgtgaccagcgataccaaaaccaccatggaggtaataaagagcacgattccctgcaaaagaatgatgtcccgctgctccacggcagtcagcatcagacggccaatgcccggcagagcaaaaattgtctctacaatgaccgttcctcccaatagttttgccagctgcatacctgagatggtgatgggggcaataatcgccgagcgcagagcataatgcacaatggccctagcgggaggcaggcctttcacatttgcgctcatcataaaatcctgttgcagggctgtcagcatggatgaccgcacaatgcggatgagaattcccagttccccgatagccagcaccagagaaggtaatgcgatgcatttcaaaaacgcgccgaaattttcaccgggagcggtataccccgtgaccgggaaccatcccaaataggaggaaaacagcagcataaacagcatagccagccagaaagagggcaccgcaccgccaatctgcatcacggtacgcgacagtagatccataggtgaaccctttttcagcgcggccaagattcccagaatagcggatacaacaagtgcggctgccatggacagcagcgcaacggagaaagtaacgggaagccgctgacaaattagcgtccaaacattttcaccgtacagatatgaagtgccccaattcccggtaagtaccccctgaatccaatgcatatactggacgtaccaaggccggtccagccccatcgaggcacgcagggcctcaaccttttccggcgtggcctcaaccccaagaatcaactgcgcggggtcaccggggatacataatagaaccacaaatgtaataagcgatacaacaaacagcacggcaatggcgctgagtagacgtctgaccaccagtttcagcatagagaactatccgtccttcctgaggttactctcccttatctaagaagtgcgtgcaacatcaaaatccttcaaagcaggcgggccctgcatccggcaggacccgccccctgttcttattgtccgagagatatatctttcaattcataaatatcgatgggatacaactgaaaaccggttactgcgctgtctgtcacataaatggtaatagggtcctgaatataataggcaggcacatcctgagccaggatctcttggacccgctgcacgatttccgtacgcttgtcctcatcggtttcgctcttataatctgcaagcagctgatccacttcttcattggaataattgaagtagttctcactgctgtcagactgataacgtgccaagagcacatacgggtccagacgccccgtgtgtcctaccacagtcagatcatagtttcttccgttgtacacgtccgacagccacgccgcccattccacgatagtgatattacaggtgattcccacttctttcagcgagtcagcgatgacctgcccggcgctgacatatgctggataactcttgggcagatacatttctagcgtgagaccgtcctgatatcccgcttgagacagcagttctttggccttttccggatcgtaagggtatcggtcattcatatccacatattctttcagaactgtggggtaatgcgaaccgatcttctgaccatagccccaccataccgtgtcgatcagcgcctgcttgtccaccgcatagttgatagcctgacgcacccgtacatccgacagcgcctcgttctgcaaattcatcgccatcagctgaagaccattggacggcgtggtgattacattgaactgcgggtcattttcaaaggcagccacctgatcaccgctgaccgagataatgtccagttctccattacgcaaagatgcaatctgcgccgttgcatccggcatcatcttgaagttgatcgtatccagattgaccgtgtcataatagtccggattttttgcaagcgtcagggattgctgaggcacccactcttgcaaacgatacgggccggtgcctaccggttgatttttcaacgtatctgcggccttgacatccacaacggcggaccatggataggcaaaattggagagtgctgccacatctagtgcttcacaggttactaccacagtatccgcatcctgaacagaaaacgtataattggcatagtccgcagcgcgggggctttcctcttccttcagacgctggaatgaggctactacggcctgtgcgtcacagatgtcgccgttatggaagcgaacatccggccgcaagtgaaacgtcagtgtcagaccatcctccgatacctcccacttctgggccagcccttccctcagagaaccatctgtattgacccgaagaagcgtatcgtatagattattggtaatctgaaatgtactggcagctgttgtgcgctgcggatccaagccatctggatctactgagagcgccatactcaactcccgtccagcagactgcgattccgccgtttgagatggcggagcgggcgtctgaccgacagaatccttgctgttggaagtaccgcaacttgcaagagacagcgtcgcggcaaacgtcagtgctgcggcaagcaatcgtttcatcctgttcattttaaattactccctaaaaagtattgcgcatattgcacaaattaagtatagcaaaaatgtcattttgaataaatcaaatgtatgaaaaaaacgagtgcctaatgtaatggtttatatagtctaagtaaaaaacgtgctgaaatgatttgacaaaatcattggagcagtggaatccattcttccaaattagcaggaaaaagccgggtcaaggacaagatcgttttcgtgagaaaaggcaatgtcccggatagcgatattgttgacaattaaaagcgcaagaaaaaagcaagaatttgtttggagaaaacccatggataatgtgctaaactatatttaaatatactctgcaaaatggaggaaacctctgtgggcactatacatatttctcctcatgagcgtttgaaaaaatacgcattaaaagatatagacgagctttataatgattttcatataaaggaaggcggcttaacccaagaacaaatagagcagatgcgaaaacagcatggcagcaatcatgtcggctattctttacaagtccattctttttttcagcgtataaaacgggcgtttatcaatcccttcagtgtgatattgtttgtattggctattgtctctttcatcaccgatgtctgtttgaaatccaactccggcagaaacgggaccagtgtggtcatcattttgtctatgcttataatcagtgggatggtacggctgatccaggaacgaaaagccggccatgccgcggatactctcattcagcaaattaaaacgaccgtttccgtctaccgacagggacagcagcttgaaatttcgtcggaggaattggtagtaggagacaccgtgtcgctttcagccggtgagcgagtccccgcggacctgagattgattgaagcgcaagacctgtttgtttcgcaggcccttttaaccggagagagtaatgtattagggaaaaatacaaatcgtctggcctctgctactcaaattccactggatcgcttttccaatatagccttcatggggagcagcgtaatcagcggagagggaaagggtatcgtcttggctgtgggcggcagcaccgtatatggaggctatctctccgaactccaacggaacaagcacagctttgatacaggagcaaattcgattgcctgggttttgattcgctttatggtggccttggttccggttgtatttgtcgtttccggcatcaccaaaggcgactggctgacctcgtttctattttctctttctgtggctgtcggcctgaccccggagctccttcccatggtgatcaatgcttgccttgcaaaaggaagctctgccatgggggaaaaacaaacgattgtaaaaaacataaatgcgatgcagagctttggcagcatggatgtcctgtgtgtagataagacgggtaccctaaccggagatgaagtgatactggaatactatcttgatattttgggggaggaaagcagggaggtattggactgcgcctacttaaacagcttttatcatacaggcgttgcaaaccatttagaccaggcaatcctgaaatgttccagtatgcctggaagggaaaaccattttctctcgttgggcgaaacgatccaaaaattagacgagctcccttttgattatgaacgtaagtgcgttagtgtcctcttatctgttccagaaaaggaaaactatattatcacaaaaggcgatgtcgacagcgtatattcccgctgccagtatgtccaacacaagggacagacactaaagatagataccgctgactctggcggcatccatgctatcgttgacgaaatgaccgaagatggaatgaaagtcctggctgtggcctacaaacctgtatcaagccagagcaggcttcagatggaggatgaagcggagcttatcttgctgggatatgtcgtgttttttgacgcgcccaaaagctctgccgccagtgctttgcagaaattggagcagctccatgtccaggtaaaggtactgactggcgatcaaaaaagtgtaaccctttccatctgccggaggctgggaatcgagacagaacatatcttaaccggagaagaaatggaggagctgtctgaggatgaacagcttcttgccgtagaaaagacaaccgttttttcccagctttcccccggacagaaatctcagatcatccgtatgctgcgcgagaatggtcatgcagtcggctttttgggtgatggaatgaatgatctagccgccatgacagcggcagatgtggggatttccgtagacacggccacacaagccgcaaaagaatctgcggatgtgattttgctgaagaaagatttgaatgtgctggaacagggtattttagaggggcggaaagcatttgccaatatgttaaagtacatacggattaccgcgtcctccaatttcggcaatatcttttcgattgtacttgccagcgcctttttacccttcctgccgatgacggcacttcaacttcttttgctgaacctcctttacgatattctgtgcatgactttgccgtgggatcgcgtcgatgcggatgtctatgaaaaaccaagcgagtggtcaggaaaaacattggggcgcttcatgcgctttttcggcccgttaagctccctgtttgatctggcgacttttgcttttctatactttatcctgtgtccagctttactgggagacaattttacagaattgtcctctgcgatgcagagtcaatttgcaattctattccatacaggatggtttttagagtctatgtggacgcaagtgcttattctgcacctgctccgcacaaagcagctttctattctaaggagcagggcatccggggttgtatggctggtcacctctgccgggcttttgatccttactgcgattgtctataccccagcggcccacctgctcggcctggctccccttccgctttggtattttggatttctggcggtcaccattctggcctatatgctgctggtaacggccgccaaacggtggtatattcagaaataccatacattgttgtaggggaggggacttgatgaagagagtaaactttgtatcattggatttccttaccttacagtggttttgcaatacgctccaaacccagcatccacagacacaggcagcgaaggaactgtatgacgccttggaggcgttgtatgcaggaaaatccgactctctcatgctggagttgggagaggcaatcccagaagcggccagcacctctttggtttgcggaaatcttctgattgattccaaaagccgccgtgttatccgggacggcgcagagatccagcttactcccaaagagtttgacatcctctatttcttggcccggaatcgtggagaggtgtttacaaaagagcagatctatcaggcggtttgggcggaggaatactatactgcggacagtaatattatggcctttatacgcaaactgagaaaaaagatagagccaaatccggatgcgccggaatatatacttaccatttggggaattggatataaatttaatgataagctctgacaatcagaaatttagatgtaaacagagcaatcgtatgaaaaagggtttaaaagtcatcgttaaaatatgtaagcagtcaccagatggtgactgcttattttcttgccgaaaagcaagggaatcgcaaggatttagccataggcttaacagtaaaaaacagttatactttgccctgtaaaaaaaatttgagaatgggggcgaccctatggggtattgaagtttatgggccggatcggtctttcggttctattgggattcttgatcggattagagcgccagattaccggccatcccgccggaatccgtatcaatgttctgatttcaatgggggcctgcctgttcctgatgtttccgctcatgtccggctcggatgaggtgtaccggattgccagttacattgtgtccggcgttggattcctgtgcagcggggtgatttttaaggagggcggaaccgtccgtgggctaaatacagcagcaactctttggtgtacggccgctgtcggtgtactgtccagttccggcagctgtctttttgcggttgccgcagcggttattctgattctttcaaatctgctgttccggccgctggcggtaaagatcaagcccattacctgcggtgaagaaacggaacgaacctaccgcatttctgttacctgtcaggaaaatgcggaaacagaaatacgcgcgcttctgatcaacagcaattcgtgtaaaacattgtatcttacgaatttggagagcagcgatgtaattggcggcaaggtagagattcaagcggattttctttccgttggtaaagcaaaggctcagatggccgaggcgattgtaaaccgacttttgacgctctccagcgtagtcagcgccggatgggaattggtataggagggacagatatgaagtttgaattgctcttatcgcattggcttagagtgacaaatattatttatgcggcgctgtcctccggtgttttagcggcagttcttgcctttccagaattccgcaggattctctttcaaagctggctggttgtaactgatgtgtttcagcttttcctcattatcctgctttttatacttctctctaaaatagcccagttgaacaggattagaaatgggtggagaaatgaaaaaaggaaggagaaggacctatgaatggcgcttgccttttccttggcattctttttctcgctgcgggtatttacttctattccggtaaggcggttaatcatattacagcatggaagacaatgccggaggaagaaaaaagaaaaatccacattcgtcccctttgccgaaatgtggggatgatgatcgccacaagcggtatcatttttttactcagcggagcatggtacgcgtttcgtaaaagcgggtttttatggtgtatggtcggctggatggtcctatccggcgcggatgtgtactggatcggaaaatccggccggtaccagagttcaggaaaatagccggcagcgttccttacggtaaaggaggtggttttatggatgctggcccttctcgaagtagatcgagcaaccgcacccgtaagactatggatagattttgggggtggctgatgctcatttaaaaagtaaaggaggtatcgaccccaatgtatcaaaaggaaaagaaccaaatcacggttcataaaacggctgcggatatggttcgcagggatgaggccaacaaaaagctggcctttgcagcaggcaataaaatcaaaccggttttgaagcagcttgatactgcgctgaccggactgggtgataaggcggtgatttcccatcggatcgcttttgggcggaataaagtaacgcatgaaaagaaaaaatcgcttgttgcaagattggcaggggcgtttatcaatccatttaccgcaattttgttctgcctggcagtcgtatctatttttaccgatattgttgtaccgatccttcagcatgcaccggaggatgtggctccgcttaccatcattataattttgacgatggtatttatttccggtacacttcggtttgtccaggaatcccggtcggggaatgccgcggagaagctgttggcgatgattaccaccacttgcacggttacaagaaagaacaacgggaagcaggagatccctctggaagatttggtagtcggtgatattattcatctctccgctggcgatatggttccggcggatgtacgggtgctggaggccaaagacctgtttatcagccagtcggccctgacaggggagagcgatcccatcgaaaagattccggttgtctgtgagcaggaatacgattccatcacagattacccgaacatcgcctttatgggaagcaatgtcatcagcgggagtgcaacggcggtcgtggtagccgtaggtgatgatacccttttcggctccatggcggtgtctgtcgcgggagaagcagtggaaaccaattttacgaaaggcgtaaacgcagtttcctgggtcctgattcgcttcatgctggtgatggtaccggtggtattcttcatcaatggtctgaccaagggtgactggctggaagcgtttctgttcgccatttccgtggcagtgggcctcacccctgaaatgctgccgatgatcgtcaccacctgccttgccaaaggtgcgatgtccatgtcaaagaaaaagaccatcgtgaaaaacttaaattctattcagaactttggggcgatggatgtactctgcacggataaaaccggcacattgacccaggacaaagtggttctggagtaccacatggatgtgaccggaaaggaagatattcgtgttttaagacatgcgtacctgaatagctacttccagaccggatataaaaatttgatggatatagcgattattgagcggacagaggaggaagaagcggccaatcaccagttggccgatctctccgcagtttaccacaaggtagacgagattccgtttgacttcaccaggcgccgcctttcaacggttgtagaggataccagcgggaaacggcaaatgattaccaagggtgccatagaagaaatgctctccatctgttctcatgcggaatatcagggagaggtgcagccacttaccgatcaaattcggcaggcgattctgaaaacagtagccgatttgaatgaggacgggatgcgcgtaatcgccattgcgcaaaaacgggcgcttcctgccgctgatacatacagcgtcaaggacgagtgcgatatggttctgatgggataccttgcatttcttgatccgcccaaggaatccaccgcggaggcgattcgggcattgaaagcccatggcgtcaccacaaaaatcctcaccggggataacgaccgtgtgacccgctgtatctgcaagcaggtgggcctcaaggtaagcaatcttctgctcggctccgatgtggaacgcatgagcgatgacgagctgatccaggtggcagaatctacggatgtatttgccaagctctcgccggatcagaaggcacgtgttgtgacggccctgcggagcggcggccataccgtaggctttatgggggatggcatcaatgacgctgcggcgatgaaatcggcggatattggcatttccgtggacactgcagtagatattgcaaaagagtcggcggacattatcctgctggaaaaagacctgatggtactggagcagggtatcattgagggccgcaaaacctatgccaatatgattaagtatatcaaaatgacggcctcctccaactttggaaatatgttttcggtattggcagcctcggcactccttcccttcctgccgatggagagcgtccatctaatcttgctgaacctcatctatgatctgagctgtaccgccatcccttgggacaacgtggatgaggaatttatcgctgttccacgcaagtgggaagcatccagcattgggaattttatgatctggatcgggcctacgagttctatcttcgactggacaacatacgcctttctgtacttcgttttctgcccgatattcgtttccggcggcgtgctttataatgacctgtctgctcattacagaggagcggaactggcacaaatgcagactacttatgcggccatgttccatgccgggtggtttgtggaatccatgtggagccagacgctggtgatccacatgatccgaaccccgaaactgccgtttatccagagccgcgcctcggccccggtgacgttgctgacctttaccggcatcgcggtactgacggtcatcccctttaccgcattgggaaaaatgctcggatttgtcgccctccccgcagcttattttgcttacctgatcccctgcattttgttgtatatggtgttggcgaccagtattaagaaagcctatgtgcgtcattttggggagctgctgtaacaggaagggagtgtgcatgatatgacaatcaattggaacacaatatggatgaatttgttcggaagaacggagctgttcggaatcaatatggggttttgggcagcgataaccgtgacgggacttattgtgatcctgatgaatgtggtcttttggacacggaaaagatttcattcatacggagacagtttatagctattgaaccccctggagagctccttcctgatccacaaggccatgcgctttgacagcaagggcgggagaatcctggatgtgatttccgataactatgaaaagctggcgccctccgcagacacccggctgcgggtcaaccgtagcgggatccagcaaaaaatcattatgaaattcttgcacatataacgtaaaacaagaagcccgttgcagaataaaacggttctgcaacgggctccttttcacaccaaaatgaaaaaatgctataaagttgtgggcaaatatttaaaggaagggtaaaaggggcagcaacgcaggccctggggcaagtgacgggccaccttctcccgtcacgccgcctcgaactggctgcggtagagggaggcgtaaaagccgttccgggccatcagttccctgtgggtgccccgctccacgatgtcgccgtcccgcaccgccaggatcagatccgcgctgcggatggtggacaggcggtgggcgatgacaaagctggtcttgccctccattaaacgtgccatggccttctggatctccacctcggttcgggtatccaggctggaggtggcctcgtccaacaccaggatggccgggtcggtgagcatggcccgggcgatggtcagaagctgcatctgtccctgggacacgccggtggtctccccggaaagcggggtgtcgtacccctggggcagggtgcggatgaagtggtcgcagcaggccgcccgggccgccgccacgatctcctcccgggtggcgtcccgccggccgtaggcgatgttctccgcgatggtgccctcaaagagccaggcgtcctggagcaccatgccgatgcgccgccgcagctccccccggggcagggcggtgatgtcctgtccgtcgatggagatggagccgccgtccagctcatagaagcgcatcagcaggttgaccagggtggtcttgccgccgccggtggggcccacgatggccaccatctcgttggggcgcacctccagattcagatcgtggatcagggtgcgctccggggtgtagccgaagcgcacgtggcgaaactccacgtggccccgggtgatggcggaggcatcccccgccgcatcgggccgctcctcctcctcgtccagcagggcgaacacccgctcggcccccgcgatggcggcctggagggaggtgatgacgtaggaggcctcggtcaccggctcggcgatctggttgacatactgcaaaaaggcctgcacagtgcccagggtgatagccccgcccagggccatgccgccgcccaggacggcggtggcgatgaagccgagctggcccagcacgcggatggcgggatagatggcgtagtcggcgaactgggcccggcgctgggcgcggaactgggcctcgttgagggcctccgcctcctccagcatggccgcctgccggttgaacaccttgaccacccggttgcccgcgtacagctcctccaccttgccggtcagcgcccccatggccgccatattgccgccgtaggcccgctgggccatggcggagacgtagccggtggccgtcatgctgagggccagggagaccagcaccaccagaaagagcctgggactgagcatcaccatggccgccgcagccagagcaatggtaaacaccgatgacaccaactgcatcagtcccacctgcatcacggaggacaccttttccagatcgttggtgacccggctcatgatgtcgccggtcttgtgtccgtcaaagtagcgcaggggcaggcggttgagcttggcgctgacgtcctggcgcagggagagggtcagctcctcccccacggtggcgatgatatactgctgcacataggccatcaggctgctgaacagcgccgcggcagccaccagcagcacgggcagccccagggctccggcggcggtctccaccacgccggcggagccgtcaaaggcccggatggcgtccaccagccggtcgatgcccattccaaccgccaggggaatggcggtgaaggaggcggagctgagcagcgccgccccggccaccagcagcagcttccaccactggcgggccatccggcccaacagccgccaggcggtggccctggtgttgcgggggatgtcctcatgggagagctcccgcttttcggttttctttctgcgtgccatactcacgccccctctctctgcatctgactgtccgcaatggcccggtagaccgggcaggtctccagcagctccccgtgggtgccggcgcccaccagccgcccctcgtccagcaccagaatcaggtcggcgtccaggatggtgctcacccgctgggccacgatgagcttggcggggcgcaccacctgctcccgcagggcgcggcggagggcggcgtcggtcttcacgtccagggcggaaaagctgtcgtcaaagaggagcaccccggcatccttcaccagcgcccgggcgatggacagccgctgccgctgaccgccggagaagttggtgcccccctgggccaccggggcatccagccctaaagggagccgctccacaaagtcggcggcctgggcaatgcccagggcccgccacagcgcctcgtccgtagcgttcggccggcccatgcgcagattctccgcgatggtgccgctgaacaggaacgccttctgggggacgcagccgatgcgctcccgcagctcctgctgggtgagggcgcgcacatcgacgccgcccacgcggatggccccctcccccacatcgtggagccgcagcagcagatcggccagggtgctcttgcccgagccggtgctgccgatcacggcggcggtctggcctggatacagggtgaaggagatatcccggagcacaggctcctccgcccctgggtaggagaagctcacgtggtcaaactccaccgccgggcggccgggcccggccacagtggcggaagcggccccgtcctccacgtcgggccgggtatccagcagggcggtgaggcgggccaggcaggccctggccttgggcagcgtggtgagcaccgacaccgccatgagcaggtagcccatggtcaggatggagtactcggtaacggcggtgatctgccccacctccatgccgccgcccagggtgagcacgccgcccgcccacagcaccacggccatgagggcacccatgagcatccacaccaccggaatggccacggcaaagagccggttcaggcggatcatgttgtcggcgtaggagcggtaggcgtcgctggagcgggcctcctcataggcctcgttgccgaaggcccggatcacccgtacgccggtgaccgcctcccgcaccacacggttgatgcggtccaggcgcacctggatgctgcgggagagggcgttggactttcggagcaccacggcggccaccgccgccagcgccgccataaagcccacctgtatgacggccatgaccggggtgaccatggccgtcatcacgatggacgcgcctacaatgaggggagcgggcaccaccatctggagcaccatccccatggtctgctgcaggttggtgatgtcggaggtggtgcgggtgatcatagatgaaacgcccacctcatcgaactggtggagggagagctcctggctcttgcgcaggagcagggagcgcatttcaaagccaaagcgggcgcccaggtcggcggtcacccagctcccggcggcggccaccgccgccgacagcagggccacggccagcatctgcccgcccgtgcggagaatggcgtccatatccccaggcaaaatgcccaggtccaccacgttggcaatcagggccgggatgagcagcgtgcccaccacctggcccagcagaaggagcagggccagcgccgccataccccggtgccgcttgtaaaaggatcgcaggtatttcatgagggcctcctttgccgtcttgctttttttaccggcaagaggtatcataaaccttagagggacttcaatgtcaagaaaaaattaagagaaccggaggcccgccatgaatcagaaaaagcagctctccatcctggagttctcccgcctgacgggcatcagccgggacaacctgcgcttctacgaccgcatcggcctgctctgcccggagcagcgtggtgagaacaactaccgctattacgcgcgcagtcagctcaactccgcctacctcatcagctccctccgcctgctggaggtggggctggaggacatccggcgctactccgccggccgcacaccggagcggatgcttgccttcttcgctcaacaggaggagcgcatccaggccgagatcgcccgcctgcgggagaccagcgagatcatgaagctgcgcgcctccttggcccaggaggccctggcccacgcggaaggcgcttatctgctggaggagcggccccgggaacgcatctttttgtgtccccccgccccggacggcctcagcggcgaggagagcgaaatctttgcctacgagtatgccgccgtgaagggcgtccatctgggccacccggccggagtactcatcacaccggacagcaccgccagtggagagcccgtttggcgctaccgcctctattttaaaaccggcggccgacggggtaacgcctggaagccggctgggcggtacgccgtcgcctatggacgaagcattccagacgatttcgagcgggcttgggcaggactccacgcctttctggcgagccggagcctgcgccccaccggcagcgcctacggagagctgctgctggacgagctctccgtccaggatacgggggactatttcggacggttggaggtcccggtgacggttgattcctgtttggaaagaggaatctaactttttttgtgaagaccccccataaatcttgtgttttccggccattcctctccgtctgtacccttgacggagtatcgcaggtctgctatgataatggattggaaaagacagatttcgcctggtcccgccgggctttcccgcactggcgccaggccccgtttcaaaggagaatgccatatgtattgtacccgcaagctgacagagcaggtctggtgggtgggcggaagcgaccgccggctggccctgttcgagaacctctttcccatcacccgcggcgtctcttacaactcctatttgatcctggacgagcagaccgccgtggtggacaccgtggactcctccatctcccgccagttcctggagaacgtgctccacaccctggacggccgcccgctggactacctggtgatcaaccacatggagcccgaccactgcgccagcattgagacgctgctgctccgcttccccactctcaaactggtgggcaacgccaagaccttcgcctttatggggcaattctacgatttccccctggacgggcgcaccgtcaccgtcaaggagggggataccctctccctgggcgggcataccctccacttccatatgactcccatggtccactggccggaggtcatgatgacctatgagtccagcgagaagcttctcttctccgccgacgctttcggctccttcggcgccacgggcggcaatctgtttaacgacgagctgaacttcgaccgggactggctggacgacgcccgccgctattacggcaatatcgtgggcaagtacggcctccaggtgcaggccgcgctgaagaagctctccggactggacattgccatgatctgccccctccacggccccatctggcgcagcaatctggactaccttctggacaagtacgacaagtggagccgctacgagccggaggagcgggccgttgcggtgctgtacgcctccatgtacggcgacaccgagaacgctgtcaaccttctggctgcgggtctggctgacagcggggtaaagaacatcgccatgcacgacatttcctccacccatgtctccacccttatctccgaggtcttccggtgcagccacctggtgctggccgcccccacctataacaacggggtctatcccgccatggccaccttcctccatgacatgaaggcccttggcctgcaaaaccgcacggtggccttggtggagaacggctcctgggctccggtcagcggcaagctgatgcgtgagatgctgggtgagctgaagggtttccaggtgcttgagcccgtggtctccctcaagtccgccctcaaggacagctctctggaaccgctcttccagctcagagaccgtattctggactctctcaacgggtaagtcaagcagacaaaatgcggcccatcggtcaatgaccgacgggccgcgttcgtttttcagccgggccgctccgtagccggaatccagtcctccagagacagaagccggctccccaccagttcctcaaactccgccgcaaaggtgtcctgatccacctccgcgtcgtccaccagataggtgaatacctccgtgccatcctcctgcgtatcctggtgtaccgccagggaggcgcactcctccgtctccccatcgggcagatagcggaacaccgtgtagaggtgggaataccgattgggcccggtgcccgtgtcatactgccgtaccatggcgccgtcctccagggggtagtcccgacagctcatctccacgatgtcgtactgccagcagctcagctccccgttcccatagtggaacacggcgttgaactgttggggctgctctaccatctgcaccaccagctccgccccgccgtccccgtccagatccagcagcacatactccagctcctccgccgggggcagggtgacctggtgcagctccagcccctccggcgggcgatccagcgcccccggctcccctgccagcagggcccggtaggccgccagggcctcggccgacacaggcgtgggggacaacggaggcgaaacaggcatggagttggcgggttctttcagagcttccagcggggcggacgcggggctgctggacggtgccggcggctctccgcctcccgcgcaggcggtaagggcaacggccagcagacaggccagccccgttatggacgtgcggttcacagcggtattcctccttcgggcggttatgccgtcatgataccacccccacagcccgaaaggaaacccctacgcggtttcaaacggtgaaaatttggtaacaggtcctcagaagtccggggcggaggccagccggagcagccgcttccgcaggcaggccgtcagctccacctttttggtgccaacctcgtcgaaggcgatcaccgccaccgcgccggagcggctcaccaccatgccgggcccgaaggcccggtgtaccaccgccgtgccgggcaggtagtccttttcccacgccgccaccgtggcggcgtcaggctccgccggggccttgcccggagtcctgggtctctgggacgcccactccggcgtgcccaggaactgccccacgaaggaggccgggggtgacggctcgccaaagcggttgtcacaggtgagcagaacaagctgccgccgggcccgggtggcccccacgtagaagagccgccgctcctcctccagggccgcccgctcctcgtcggacaggtcgttccccttccggggattcaccgatgggaaaatgccgtccaccgcgtcgatgaggaacacccggtcgtactccaggcccttgctggcgtggatggtggagagcacaaaggggcaggccgggtctccaccccccgtctccaccgtgtcccgcagcgcctccaggcggcggagaaagccctccacccccggctcctgccgggccagggccagcagcagctccacccggctcttgtcgcccccctggctggacaggtagtccccgtagcccatgtacttgacgatgcgctggagggcggcaaagctggagagctggggcagcttggacaggtgggtgcgcagggccttgagccgccccgtctgccagggctcgaagccgcccccgtcgatgagggcgtccagcaccggcgcgccctccggcccccggcgaagcttctcctggaggacgctccgcttgacgcgcacctccagcttgtagtaaatccgcagaaaccgctcccgatccgtgccatctaaggcaaagcggagcacgtcggtgagatcccgcaccgccgggctggtgaagaagaagctctcccgctggcggcaggcgtaggggacgccccggcgctccagcaggtcgatgaggggcagggcgctgtcgttgttgcggtagagcacggcggtggacaccgtgcagtccgccgccgcctgggccagatagtgggcctgctgcccgaagtcgttgagattcacgtggcgcaccggctccccctggggatggctggcccgcatgtgcttggggtggcggctgccgttgcactggatgaaggcgtccgccttctccacgatggccccggcggagcggtagttggtctccatcagcagcacctccccctccgggtagatctgccggaactccatcagcgcctggggccaggccgcccggaagccgtagatgctctgatcctcgtcccccaccatgaacaggttgcggctccgggcagccagcaggcggaggatggcgtgctggattttggaagtgtcctgggcctcgtccacgcagaggtaggggtatttgctctggaagtgggccaggatgtcgggataccggcggagaatccgcagggcaaagaccatctgatcgtcgtagtccatgcggcggttgcgctccaggtactcccggtagccgaagtagacggcggggaaatccaccccatccatctcaatggcccgcacctcctcgtcccgcagcatcccgttcttgcagcaggtgatgcgggtgcgcacctccttcacctcctgctcccccggccactcggccccgtgggactgcatcagccagcgcaccagggcgttcagctccccctcgttcgtccacagggcgaagggctccgcccccttggcccaggcgtagtaggagatgatggactggcagatgccgttgatggtgcggaaggccagcgcgccggcgtgctcctccccaaagagggcggcaaagcgccgcttcatgtccccggcggcggccacggtgtaggtgacggtgaggatgcgccccggctccacccccaggcagtggatgagatagcccagccgggtcaccagggtggtggtcttgccgctgcccggcaccgccagcagcagggtgggcccctcggcccggaggatggccgcctcctgctggggatcgggggtgagggcgtatctggctttgaattcggggtaggtcatggtgtgtcctctctttctgtgcgtactgttcagagtaccccagccccggcggaaagtcaagcggcagttacggcatggtctggggcgtgctatactgggtaaaaaggaggaatgtcccatgcccgccaacaccccccgtctggagaccgaacgcctggtgctccgccggtttaccccggcggatgtggagccgctgttttccctgatgcgcgaccgggaggttaacaccttcctgccttggttcccgctggagaccgaggcggacgccgccagatatctggaggagcactacctggactactaccgccgcccctccggctgccgctacgccgtctgcctgcgggagaacgacagccccatcggctacctccatgtggacgacggggagagccatgatctgggctacgccctggcccggccatcctggggccgcggctacatgaccgaggccgccgccgcggtggtggagcatctgcacgccgacggcctgcccttcctcacggccacccacgacgcggacaatcccaagagcggggcggtcatggcgcgcatcggcatgacctaccgctactcctacgaggagctgtggcagccgaaaaaccggctggtcatcttccgtatgtaccagatggatttgaatggcacgtggcccacctaccgggcctactgggactgctggccccgccactgggtctgaaatccgcccttgcaatttgcggaaaggcgtgctatagttgccacagaaaagtctgcacaactgaatgctggggggccggatggaatccggctgagagttaggctgttctgcctatgacccatggaacctgttgggtaatgccatcgtagggagcgcggttcacgccgttttgccgttttttgcaaagtcgctcagcgaaggctgtgcggcttttacttttgcctaaaacggaggtatctgcaagaatgagacgagaaccctggaaactcaaggacgtggtcatgatggccatactgggtgtgctgttcgcggtggtctacatggccgtgttttacggcggtaccgccatttcggtggccctcacccccctgggcctgtcggccttcggctttgaactcatctacggcgtgtggtttatggccgccaccattgccgcctacatcatccgcaagcccggcgcggccctcatcaccgaggtgctggcctccgccatcgagctgctcatgggcaactccggcggcgccaccgtggtgctcaccggcctcatccagggcgtcgggtgcgagctgggcttcgccgtattccgctaccggaagtacaacctgctctccatggccctgtccggcgtctttgccgccgtgtgcatcttctgctacgagctgtactacctgagctactatctgctggcccccaccatgctggccgcccagttggccgtccgctttgccagcgccgtggtcttctccggcgtcatcgccaagctggcctgcgacggcctggcccggacgggggtactgcgcagctacgccgtgggcgcccggcttgccccggtatccatcgacgatgaggaggaataagcaatgggtaaactgaatgtggttctggactggtttgcaaataccaatcacaccggctttctgctggcggagaagcggggctacttcgcggaggcgggcctggaggtgcacatcgacggcgaggttcacggcgttatggatctccacggcgccgatttcgtgctgggcccccagatttccatgctggactgcatgtcccggggggtggagctcaccggcgtggccgtcctcacccagcgttccgactccggcatcgtctccctgaaggagagcggcatcacctccccccggcatctggagggcaagcgccttacccactgggccccccgctggttccacggcgtgatcggcgaggccgtgcgcctggacggcggcgactacggcaaggtggagctggtgcccatggacgtgggcgacatcgtcgccaccctgggcaccgtggccgacgccacctgggtctacgccaactgggagaacgaggagcttatcgcggcgggcaaagagatcaacttcatcaacctggccgacgtggaccccctcttcgacttctgcgcccccgccgtcgccgccacccaccaggttctgcgggaccggcccgccgaggtgcgggccttcctggccgctctggaccggggctatcaggaggcggcccgcgatccggagggggccgtcctggcggtgaaggacggcctgcccgccgtgtccgaggccatgctggtgcgcagccagaggcacctggcccccctgctgctggatcagcggggccactggggcgccatccgcccggagcgctgggagcggatggccaactggctggtggccaacggctactacgaccgccgccgccccaccgagtacaccaatgacttcctccccgtctgaggtgggccgcatcaccttggagcacgtcaccttccgctacctggagcagagcaagcgcccagtgctggacgaggtcagcgcctcctttgaccggagccgcatcaccgtcctcaccggcccctccggctgcggcaagagcaccctgctctatctggcggcggggatctatccccagaacgccgggttcctccaggggggcacggtgcgggtggagggacaggagcccgccgccctggggccgggggagcggtgcgccctggtgggcatgctgttccagaacccggagctccagttctgtatggacacggtggagaacgagctgttcttctgtctggagaaccggcgggtgccccgggcggagatggaggagcggctgagcgccgccctggacttctgcggcatcgcccacctgcgccgccgccccctccgctccctgtccggcggggagaagcagcgggccgcgctggcctgtctggccgccctgcggccggcctgggtcctgctggacgagcccttcgccaatttggacgaccaaaccgccgccctcctctgcgggcagctcgcccggctccaccgggaatgcggcaccggcattctggccatcgaccaccggctggatcactggctgtccatcgccgacgagatccgcctcatggcccaggacggcacgctggacggcgccgcctatgcccccagcgccctctcccctcaggcgtgggcggagcggggcgtcagcgtccccggctgcccctaccaggccgcccggccggtcaagaccgggccggaggaggtggtgctctctctgcgtggcctgcgggtctcccaggatgggcgcgaggtgctgcgggacgtgaacgccgacttcttccgggggcgcatccacgccatcgtgggccccagcggcagcggcaagagcaccctgttcggcgccctcagcggcctttaccgctatcagggctccgcccggctggaggggatggagctgtccaggcaccgccgccggctgaccggccgcatgggcttcgtcacccagagtccccaggaccagttcgtggcggacaccgttctggacgaggtgacggtcagcctgcgccacagcgccggggcgggcgatcccgccgccggggccgaagaggtgctccgccggatccagctctggcgcttccgccgcctgtccccctatatgctcagccagggccagcagcggcggctgggggtggccgccctgctggcctacgactgccaggtgctggtgtgcgacgagcccacctacgcccaggatcgcggccgcaccgccgccatcatggacgccctccagcaggaggtggtggagcggggcctcaccctcatcctgtccacccacgaccgggcactggctcaggactacgccgacattctctacgagctgaaggaggggagcctgtatgaagtcgctcaatcccgcctgtaagctcatcgggctggtggtgcccacccttctgctggccggactccatcacccggcggtcaacctggcagtatttgcggtatgtctggccgccctgcttctctcccgcgccaacgtcaaggtgctggccggggcccttctccccgtgcttctggtggcggtgggcatgttctccaccggctaccactttcacgccggggcgggcatgcccatcaacgccgccgcccaggccctcaccggggcggcggtgtggaacgggctggtgctgggcagccgggtactggccttcgccgggctgggcctgctctttgtcctcaccaccgaccgcatcctcctagtgcgctccctccagcagcagctccgcctccccccggtgttcgcctacggcctgctggccgcctggggcatcctgcccaatatgatggaggagtacaagcgcacccgcgccgcctttgccgcccgcggtatccgggtttttcccgtctcccccgccctgctcaagcccctgctggtcaagtcggtgcgctggtcggaggagctgtccatcgccatggagtccaggggcttcgacggccgcgtcccccgcacgtgcagccagcccctgcgcctgcggccggtggacgtcctcttccccatcctgtcctgcgccctgtttctggccctgttcttcctgctgggacgctgaaaaaccgccgcggagcgaggctccgcggcggttttgctttacggcttgcactggccgcagggggaatagccctcgtccagcagggcctcccggcttccggtgtagtccgtccggttctccggcttcatgtcctccacgctggcgcaggtgggcaggtggaatttcttcgtgttggtattcagcacgtaggcggtacctgcgggggttgggctggactggatctccccctgttccccttccgcccagctcgcgccggtggcgtagtcgatgccgatgcccggctggacgttgtagacatagacgttgaagcagatgccctccctctcgtcctccacgctcccggcctccatcagcactccgctggccaccagattgtccccctcatagagcggggtgacccggtagaggacgtggttggaggtctccttcacatagtcggccaccaggttctcaaagggcagcatgccctccacattcatgtagcgggtcccggtgatcaggttgcgctcgttggcgttctcgccggtgagctggaacccgatgaggtggcagcggttataaaggtactgaccgccgtactccacgttgatccagccggagggcttcaccgagctgatgctctcccgctccccggcaggcatcagctcctctcccacacaggcgtaggccgtgccgcagcggcccagcccgtccagcgcactgtaggtctcaaaggcctcggtggtatattcctcctccccaaagaagggctggttgtcattgatgaccacatagggctcgcccgcataggcgggcacctggtccagatcgtagctgaccgccggggcggcctccccctggcagccggccagcagcagggccaggagcagcaggagcggaaagacgcgtctcatcgggtgtagacctcctttgtaatgcgctcgtgggagtggccggaaaactcctcccggcgggccagagtccatcccggagggccgggccgcacatccagccaggcgtcggcggggtagcgccggttccagcggtagagcaccagcccctccagccggtccagccagggcaacaggggcggctcctccacaaagcagagctcccccggcccggcctgggccaggaaatcctccgccgcggtcagatactccggatacggcgcctcaaacagccggagcgtgtcccgactcatccacagccggcggcccgccgcatcctccaggatgcgggcgcacaccgcccggtccctgctctgccgccgcccgtggaacgccatcccccaagcctcgtccacgcagacaattgctgtcatccggctacatctcctctcggcataaaaagaaaagcacctgtgtaacacaggtgctcttccgttggtgcgcgaggcgggacttgaacccgcacgtgcgtaatgcacactagaacctgaatctagcgagtctgccaattccaccactcgcgcatgtccttttgttcagaacaggttgtattttaccatcttctccccaccttgtcaacccctttcatcaaatttatgacctctattttttcttatttcaaaatctgtgcagcgattctctttttagcttgattcttttttccgtctttgatataatgcttttgagataaaaattctcaatatattattctcaagagtggaggatcgaaatgaagcggatgtttacaaagagcaagaccaaggcagatatcctgtccatgctggacaggatgattgcgcagcacggggatgcaatgtccattcccatgctccgtgtggatcagagcgaccacctcaaactctacacctgcgctctcaccaccggcttcctacaggctatgatctgccgcctcccccgcagcctggaaaacccagagggcattcagcgcgctctggtcatgaaaaaggtctctgaaattgaggagcgcctctccagcggcccgtatggctttcccaacgccattgttatcaccctcagatgccaggacagcccctatataactgttgcccctctggagagccgcaccagcgactcctccggcattgtccttttgaccgtcgctctccaccgttaccgtgagcacatcgcagcctgtgcggcagacgaggcgggctatcttctagccccagagcaggaactgctgggctatatgatcgacggccatcaccgcaccgaaggggcttatgcggcgggcaagctggactaccccttcctcaccggcgtctacttggatctggatctgcgcaagatggcggcctcctttgctgagatcaactgcaaccaggagaagccctccgccatacataccaacgccatccgcaacctctccggcctgatgtccgaccgggagaacaccgcctttgacctgatggacgagctcaatggccgggccggcctctttcatgaccggatcaagatgttcgacggcccccgtgcccgctctctgccccgggcttatgtcaactccagcaaaatgcagaagctgctggagcattggctcgagatcaacctgcagaacggctttaactacaccactttttccgcccgggtggaggccatcgagacttatttttccgcctggaaggcatgttacccgcaggcctgggacagttccgcgcacgttctgaccaaaacaatgggaatcgacatcctgtttgatctatacggactgctgtcggagttcatgcgttcctccattctcgcccccggcgcccttccggaacgggaggacttcattaccgccattcacaggtgctttttcgaccttcaggagcaggacggcacggccttctatcttcccaagcggctcgagctcgatgcccagagcggcgaatctatccctctgacctgggagagctccaccttcggtggactgtccagcggcaagggaatccacttcctgaagggaaagctgcgcgagatgatcgccctcacacggcacagcttccccgtacactgaccactccaaagcccccccgccggactgctccgggagggcgctttgcatggtatgatacgcctcagcgggcggctccagccccggctgtttgcccgcacaatgacaaactcccggtagcagatccatattccccagggcacgcgccccccagtcgtactgaacgttggagaacttcgtcccctccgcccaccacaggaatttcttgttcttactctcggcaatgcgggaaccgatgaaccggtctgcccttaccacttctttcccatattgatgatttaattatcgcagtctaatgatcaatatatcagctctgccctcttctatcaaaaagcatgcatagaagaagcgcaccagccggcggccggtgcgcttcttctatgtattttgggggttagtcctcccggtccagggtgatgtgggggaccatggtggtggtaaaggtcagctcaggctgggaggtgtcacagtggctgaactggaccggcatatccatgtcgctctccacaaccacggcataaccgacattcatgggaacgggctcacccttgtcgttctccatcaggtcgaaccgggcatgcttggtccggcgggcaggcaccacgctggtatagccggtcatgggctcacgatcctggaagtagaaggtgaagcgcacatgggcgtcccggtcggtctcgttgatgaaggcgcagccctcatggctggtgaagtagccggtgccgcgggaatgaaggtaggcgtcgggaatataccacttgtacttgtactccatattgatccactcactttctattgtaattgtttgttgcagttcactcagaccggcgcggggccgtaggctctgggatccgggtcgtccacccagccccaggaggggcacacatcgtgggccacgaagatccgctccttctggatgcccagcacctgactcagatcattcatgaactcctcggagagcatctcgcagttcttggggccgatgtcatagtccccatgaattttaaagttcacaaaggccgcgggggtatccctgccgctgaagaacatctgctgcttgtcctccatgacgatcatgagccagcgctcccgcttggtgggcaccttctcccatgacacggccagggcagttttcagctcctttgctctgtcgctgggaatctccacattggtcctgatgatgatacagggcatatgcaataccttcctttctgtaatgttcagttcttgacccagccccaggagggacattcatcgtgagccacaaagatccgctccttctgaatacccagcacctggctgacatcggtcaggaactcctcgttcaggatctcgcagttctccctgccaaggctgcctagaatcttgaagttgacaaaggccgcaggggtatctttgccgccgaagaacatggtggtgttgtcccggatggtggtcatgagccaccgctcactcttacccggaagcttctcccaggaaaccaccagggcttttttcagttcctcggccttctccttgggcacctccatattggtatacataacaatacagggcatgtccgtatcctccattccaatcaatttatcagcaagggcggtccccttctctggccgccggattaaaacgcctccagatagatctgctttacctcgtcccgggtaagcgccttggtatgattccgcatgcttccggcaaagacgttgatgcagttgtccgtcatccagtcgattccggactcctccacccccagctcccggagcttgcagttcagatcaatggacttgaggaagcgctccaccgcctccgcgcagtcggtctcgtccttgccgcccagcagacgggagatggccgcgtaacgctccggcttggtgttgtaagagtggcggaagagggggggtgtcagggccgccagtccctttccatggaccacgttatacatgccgctgaccggatgctccatcccgtggccgccgcccacgccggcggtgttgatgacaatgccgcccagcaggctggccagggtgatgttctcccagtcctcctgtgtgccctcaccgtggtacaccttgggcaggctcccggctgtcaggcggatggcgtgcagggcaagctggtcggtaatgggctggcttcgggtggccaggtagccctccatgttgtgggagagggcatcgaagcccaccgaggccagcacctccttgggcatggtcttcatcagctcagggtcgataaaggacactttaggatagatcaggtctccccacagggacttcttgtccttggtctcggggttggtcagcaccgcaaaggggttggcctcgctccctgtgccgcaggtggtgggtacctccagaatgggcaggcagccggtaccctgctttccaccggagatatagtcattcacgtcaccgccgttcaccgcgcagaaggccaccgccttggccgcatccatcatggagccgccgcccatgccgatgactaggtcgcacccctgctccctggccagggccgcgccctccataaccgtggtggtcagggggttgggctccaccttattgaataccgtggcgcggacgcccgcggcctccagcagggcgatggagcggtccagcagaccggagcgtttcgtgctgctgcggcccgtcacgatcagggcgtgggtgccatagctcttggccgtggcgcccagttggtcgatcacattggcgccaaacagcagacggaccggcataaagtaagagaattccatacgattacctcatttctttgatttatatcagcaggtatagagctccgggcggcggtcccgcaggagcgggccgttgatccgggccctatccgcgtcctccagctccatctctgccagcaccaccacgttctccgcctcatctgcctgggccagtacggagccgtccggccccaagagcatgctgtggccgaagaacgtgtattctccctcctgcccggagcggttgcaggccgcgagaaagagctggttttcaaaggccctggtcttgagttccgtctcgaagacgggcagctcggaaaagccccccggcataatgctgctggagatggagatcagaatcagcctggcccccttcttcatcagctcacggcaggtctccgggtagcgccggtcgtagcaaatggccaatcccaccttcccgtaccgggtatccgccaccacaaactccggtccgggtgtgaaatagtagcgctcatagctgcgcgtacagggtacatgtaccttccgatagaccgcaccgatcgtcccctccggcgtcagcagaaccagggaattatagtaggtaccaatcagactcttttcaaacagcggaagggccaagtagatccccagctcccccgccagggaacgaaagcgccggacggttggcccgtccaactcctccgcgtaggcaaagtagcgggtgtccttatacagcgggaaaaactcatccagcgccagctccggcagcacgcagagatcggccccctgcctggccgcctgaatcagcagccgctccgcgcgctccacgtttgcctcccgccctccgatgtccgccgacatctgtatggcggcaacctttaccttcattgttccgccccttctctccggccggtcatctctgcaccacccagtcgatcatgttcttccagaacaggtggatatactcccattcacagaaagcggggggcatccagtggggcgcgcagtccgaggcccaagcgaagcttctgccctttccgtactcatagaaggacaggatggggtctccctggtattccaccgccacctgtgcccccggcttggctacggccttgttgtaaccaagcagatagggccattcctcgggcagccccttcagtgccggatggcgctgggggtccaccttcagatcaatgccttccgggtgctcctgccggtcgtcataggggagaaaatcgaccgggagtgccttctcgatgggcgaaccgtggtagcagcccttgccgccgatgccctggaaggtcatgtagcctcccatcatccccagggcgccgccctgctctacatagtccgccaggagctgtaggcggttggggaaacggacgctttgggtaaacaccagggggtggagcaacagggtattggcccccacatcgctgagaatcaccacatcatacgtcttcagctcctccatcgtagaggggaatttctctcccaccagatgggagggcaggtgggtgatctctgcaaactcgtccatcgcggcatggattcggccgatctccgttccatacccgccaaccgagaagtcgtcccacccctttacctccatgttatgggtcagccaggactccccggcaaacagcatcttgtactttttcatatcaagctcccttccatcggttcaatcggttgattctgtgcggcgcagcggtgacacttcacgatgtggtcccgtcccaccaaggcaggcgccggaatatgcttggagcagttctccgtccggtacgggcagcgggggtgataccggcagccggagggcggcctgatcgggctgggcagctcgatcggcggctccctgttggccgtacttaggcgggcgtctccgctgatctggggaatggagcgcagcagctccttggtataggggtgcctggggttgtgatagagctcctcggaggtgctgtactcaatgacctcgcccaggtagagcaccgcaatatggtcgctcatgtactccactacgctcagatcatgggagataaaaataatcgaaatgccgaactccttctgcaggtcgtgaaacaggttgagcacctgcgcctgcaccgacttgtccagtgcggacaccggctcgtcggccaggatgattttaggctccattgccagggcccgcgccaccgccacgcgctgtcgctgcccgccgctcaggctgttggggtatttattgaggaaggacttctgcatcccaaccgcgtccaggtagcggtatgcccgccggcatgcctcatctctgggcacctgattggccgtcaggccgaaggtgatgttctgcagtacattcatcttggggttcagggaggagtaggggttctgaaagaccatctgcatattcttccgaaaggtctgcacatcctgccccgtggcatgggccatgtcgtactccttcccgcagagcttcattgtgccgctgtccggccggatgctgtgaaggagcagccgcgcaaccgtggattttccgcagccggactcaccgacgatgcccagcacctccccctcctccaggccgagggaaacgtgatttactgctgaaaccacgtcgttttcgcccagcaggcgcttttttaccacaaaggacttgcacaggtcgttgacctctaaaatcttgctcattgtacgctctccaatcacggcgcgccgtcataccgcgcgggcttagctgttggcctccatggcttccttcaggccgtccgagatgatattgacactcagggctgtgacaaaaatgaacaggcccggaataatggtaatcaggggattgatgtagatctgctgccgcagggcgttcagcatggagccccattccggcgtggggggagaaatgcccaatcccagaaagctcaagccagaggccgacaggatgctgacgctgaattgcgtggtacagtagatgaagatccgcccaaaggtgttcggtatgatgaaaaacacgataaccttcagcgggctggccccggaggtctgcgccgcctcaataaagtcctccggcatgatatcctgcacggtggattcggccacccgggcgatgggcggaaccagaatgacggcgattggaatgatgatgctggacaggcccgagcccagaaccgaggacagtgcgatggccagcagaatggaggggaacgcatagaaaatatccagggtgcgcatgatgatctgggcataggccttgccgaaatagccggaaatgatccccaggatactgcccacgatggtggccaacgccaccggcaggaagcccatcagcaggctcaggcgcccgccgtacaggcagcgggtcaggatgtcgcgcccctgctcgtctgttcccagcagatggccggccgtgccgatgccctgcagccgctccgccgcattgccctcaaagggggtatactgggtgagcagcggcgcgccgagggcgcacagcaccacgatcacgaacaggatcagcgcgggaaaggccgccgggtaacggagaaaggtccgcacaaagcggctgcgcgcctccctgcggaaatggagctcctccggatccgccgcagctctggagccaatggatgacagcaaaacaatcactcctttgtatcccgcaggtctttattttctcaggcgcggatctgccacaatgcggagcagatcgatgagcaggttgatgctgacaaagatcgccgccacaatcaggatggccgcctgggtcacgggaaagtcgctggtgaagatgctctgatagatgatcaggccgattcccggccaggaaaaaatggtttccaccatcgtggagccgcccatcaggtagccgaactgcaggcccgccacggtcagcagcgtgggaaagctgttgcgcagcacatgccgcatgatggccggctcactgagtcccttcgcccgcagggtagtgacaaagctccggctgcgcatctcggagaccgagctgcgcaccatccgcgtcataatccccagtgtcatggcgccagccgcgatagctggaagaatcaggtgctgtatgagggaggagaaggtatagtccccactggtatacatgcctgtagacggcagcaggcgcagggtgacggagaagataccgatcaggatcaatgacaggcagtagtttggaatactgataccgccgatgccgaataccgtgccgatccaggagaagatggaattcggccggtacgagctgtagacaccgatcaggatactgagcaggaacgcgaagatgctggcccccagcgccagaatcagggtattgtggagggcctcgctgaccacgctgagcacgagccggttgtcgctgacagagttcccaaaattgccgcgcaccgcgttgcccagccacatgaaatactgcatatagagtggctggtcaaaaccatactggtcgatgatcacctgccggagctcctccgaagcatccagaggcacaatgctgtcaatgggtcctcccggcatcatctgcagcagggcgaatacaataaccgtcacaccgaagagcgtgaggaacgccaggcctattcgtttcaagataactcggaccatactaactccccttgtatactgcggcctgcggccaggtttcactggccgcaggccagagtcttttgccggaaatgacagcgcttatgagacggggttctcttactcgacggtaaccgtcgtcaaatcgacataccatgtctgggactggacaaaattctgcacattgggggccagaacccgcaggttccggtcgttgcagacgatcacccagggcaactcctcggtaaaaatcttctcggcttcaatgaactgctgggtggactccgcctcgtccgtggccgcataggccgcctcgatacaggcatcgtactccgggttgctgtacttgccggtgttgaaggagccgcccgtacccgcaaacttctggaacacattggggaacatggtatagaaggaggtgttgagcgcgcccacatcggcgtactcatccttgaagcccaccttcattacgtcccacacccgctcggattccgacatatccagctcaatgtggataccgacctcctcggcgcacttctggatgtactcattcataatctgggggaacatgttgccggagccgctggtggggcagacaaaggtcgtggtaaagccgtcgggatagccggcctcggccagcagttctttcgccctctccgggttataggtatactcctccacaccctccgcataccacggagaacctggatacattaactgcgccagcggtgtgcccacaccctgaaggatgtcattgcacagtccctcccggtcaatggacatgctgaaagcctgccggacgcgggcatctgcaaaggggccggactccgtgttcatgatgtaaagccacgcatgggggtagtcgttcagcttgacctgatagccctgggacttcagagactccagggactccacgggaactacctcggcccagtccacctcgccggactggagggccgccaggcgggccgacgcgtcggagatgggcttgaggatcagtgtcttgatctgcggcacgttcccccagtagttctcgttccgctccatgacgagctcctggcccgcgatcttgctgacaaaccggaagggcccggagcctacgggggcgtcggcaaagccgtcgcccttctccttcaccgcctccatggagggaatcatgatatagggcagatcgtagatcagataggcgttgttgtcctgcacagtgtcaatggtgatcgtgtagtcgtccaccttggcataggattcgatattggccaagaagctgcccaccgatgcggcgcaggtggtgctgtagtactcaaagtcaggattcatcacgcggtccagcgcaaagatcacacagtccgcattgaaatccgttccgtcgtggaacttgactccctcccgcagatggaacgtccaccgcttggggttttccgggttctgctcccaggaggtggccaggcctgggataatcttgccggcctcagtttccgagctcgcatcccacttcaccagggcgtcatagagctggaagctgacgaagcggtaaccctcctgcccctccgtgggctcggaatcggtattgggcagggccgcgcaggtcatcgcaatccgcagagtgccgccgtcgccggtactgtccacaccggaaccgccgccggtgggcgaggttttctcatccgaattgccgcaggagacacagcccgccaacagggctgccgccagagagagcgccaggaatcttttcacgtgtttcatgtcctcatttacctccagacgttactaaattcatatgacacgccgtcatatggtgctcatcgatgggcttgagctctggaacgctctgccggcacgcctcggttgcgtaggcgcagcggttggaaaaggggcatccaggcggcatatggacaatggtgggcggctgtccctcgatggcaaccagccgctcccggttgccgctcttggggagcgcggcgatcagcgccttggtataggggttcgccggcgtctccagcacctgcctggtggcgccgcactccagaatgataccgccgtacatgatggcgatctgatccgccacctgggccgccacaccgatgtcgtgggtcaccatcatgatggacatgcggtcgctctcctgcagctccaagaacaggttgagaatctgtttttggatggtgacatccagggccgttgtgggctcgtccgccagcagcaggcagggattgcagcacagcgccatagcgatgaccgcccgctggcgcatgccgccgctcatctcgtgtgggtaggcgttcatccgctccctgggcgaagggatacccaccttgacgaagagctcttctacccgctccctggcctctgcctttgtcaggctggagtgcgcccggatggtctctacaatctgatagcccaccttatacatcgggtccagcgcggacagagagtcctgatagatcatggccatccggttgccccggatatcccggaattccttctcactcattcggaacaggtcatttcccagaaactccgcctgtccctctacggcggctgtcttgggcagaatccggagcagcgccttcatataggtgctctttccagagccggactcccccaatatcaccagcgtcttgccccgctccaggctcagggaaacccggttcaccgcccgaaccatccggtccttgatcttgaaatctgcacacagcccggtggtcttaacaatgatgtcgctcatccgcattcactccatgcgcttcttaaaatccaatacttcttcatacgatgggatagaatcctgtgcccctaccctggacaccgccagggcggacgccatattggcgaagacgatcgcctcctccgtggagcggccgtccgccagctcccgggccagcgccgcgttgaaggtgtctcctgccgctgtggtatccaccgcctgtaccttgggcgggcggtaaagcgtatgcccctcccggttgacatgcagggcaccgcggcttcccagcgtaatgatgatattccgcgttcctttctccagcaggggtttgcagtgaaccgcaagctcctccacttcatcggtcgggcagccggtcaggcgcttgaattcgctctcattgggggtcagatagtccagtcccgcatatacttcatcaggcaggctgtccggtgcgggggccgggttgagaatgacggttttgtgcagcccactggccagctccaccgcgtagcagacgctctcaaaggggatctccatctggagcagcacaatgtcgctctcctcaaaccgcgcccggttccgcctcagatagtccacatcgcagaggttattggcgccgggaatgacaattatggagttgtttcccttctcatccacacagaccaccgccatgccggtggataccccgtccaccgtccttattgcgcgggtgtccacattggcctgttgcagatttcgcaccagctcaccgcccagggggtcatctcccaccgcattgaggaacgcggtgtccccgcccaggcgcccgcaggcatacgcctggttggcccccttcccgccgcaggtctttcggaaggagcggcacaggatggtttcacccaactccggggcctgccgtactccgatcacaaagtcgacgttcgcgcttcctaccaccaaaatctttttcaatgagaacacccctacgtcttcctagattctttcccccgccggggcaccgatgccggatgatccgctgtgcttatacatatagaatccgttcgccatagatggtcttgactgagcctctcaccaccagcttgggctggaggtggatatttttggtttcaatgggcttacccacgattgcccggatcagcgtatccgccgcccggcgtcccatttcgatggtcggctgctgaatggtggccagaggcgggtcacatagctgagaaaagccgatgttgtcaaagccgatgatttccacatcctccgggatagcgtaagtcagctccttgagcgccttaatggcgcccagcgccatggtatcattggccgctaggactccggtaaagcgggtgccctctcgctccagctccatgatggcccggtatccgctttcaaaggtgtagtcgccatatttaatgagccgctcctcaaacggcagacggtactgctccagtgcatcccggtagccctgaatccgctccaccgaggtggagatgtttcgcggaccggagatcaaagcgattttctcgttacgatgctgaatgagcaggctgcacgccatgaaaagggcgtaggagttgtccacaaagattcccgccgtatactcggcgcccgccagcatacggtccaccagcacacagggcacgctgtacttcttcagcctctggtagtgctctccggcggtctgggctgttgtcactaaaataatgccgtctacccgcttggccaggaagatggagaggtaacgctcctccttttccatggagaaatctgtgtttcccagcagaacggtgtacccttgctctgtggcctccccctcgattgccttgaccagctcaccgaaaaaggggtttatgatatccgggataatcagcccaagagtcttggactggttctggctcggcaggctgtaggagcggtagttcgtctccttcacaatttgcaatacgcgtctgcgtgtttcagggccgactccctgttcaattccgtttacgactctggaaaccgtcgcttttgatactccggccattcttgcgatgtcttccatcgtaactctcatgtatgcgatccttccatacaggggccctgccctgcggtgtcatctggtactgttttgtttgttaagtgaattgtatttgagtaacaaagtttcgtcagtatgtaaacatagccgaaatttatagtacaaaataaacaaacagcacaaatcttttaagacacttttataacaacttgagagttttttgtaactttactgcttaattgacctctgattcagagaaatgaatttccctcccgtcccttctgtgcacctcaaaatattctctatcgttttttatggttttaaatattataaaaaacggttgtcaaaacgcaataaagaaacttcaaaagccaaactgcttttaagcaaactgccatttttgtctagagtttggacaggatgcgggttttgtctattttccttttgcaaaaacggcggtatagtagcaacgatgaatggtatgacatgccgtgaaaggggaaaaccaagatgaagattcctgacagtttgaagcgctacggcctggccaaggtgtatgattatctggacaaggacccgatgaacaacatgggcaaggtcatggatctggtcaacaagtttgccggcgacaccctgtccctccagcgggaggcatttgataaggtaattaacgacaaagactcctgttggcaccagctcattgagaaggtctggacccagaccgaccccagtgtgctcaagacgatattcaacaacttctttgtcaatgcaaacctggtgggctggcccaagcaggaggaactgcgcaagaagtacggctgcaacattccctgggccatcctgctggatcccacctccgcctgtaatctgcattgcaccggctgttgggcggcggagtacggcaacaagctcaacctgacctttgatgagattgactccatcattactcagggcaaggagctgggcatctacctgtacatctacaccggcggcgagccgctggtgcgtaagaaggatctgatcgccctgtgcgagaagcacagcgatgcggccttcctctcctttaccaacgccaccctgatcgacgaggagttctgccaggacatgctgcgtgtgggcaactttatccccgccatcagtctggagggcttcgaggaggccaacgactcccgccgcggagagggtgtgtacgacaaggtcacccacgccatggccctgctgaagcagcaccacctgcccttcggcatctccgcctgctacaccagcgtcaactacaaggacatcaccagcgagaagttctacgatctgatcatggatctgggcgcttacttcgtgtggttcttccactacatgcccgtgggcaacgacgccgcccccgagctgatgcccaaccccgagcagcgggccgaggtctaccgccgcatccgcgccatgcgggagaccaagggcatctttgccatggacttccagaacgacgccgagtatgtgggcgggtgcatcgccggcggccgccgctacctgcacatcaacgccaatggcgacgtggatccctgcgtgttcatccactactccgactccaacatccgggagaagagcctgctggagtgcctgcaatcccccatgttcatggcctaccatgacaaccagcccttcaacgagaacatgctccgcccctgccccatgttggaaaacccggagttcattgagaagatggttcacgagacgggcgcccactccaccgatcctcagtctcccgagagcgtggagcatctgacggccaaaacccacccctatgccgacaactggactcccatggccgacaagctgtggtccgagtcccatcccggctgcgccgggtgcgcaggctgtggcagcaccggctgcggccagtaacaacggtcagaaaaaagcgcgtgtacgtagttttcgtacacgcgctttagcctgtggaagaagtcttttcgacaggctgagggactttttgaaacttgaaaaaagttgaaaaaatggcccgccggtctcccggcgggccgctgtcttattcggtggtataattgtcgaaatagccctgaatgtagacgatgggggtacccttgtcgccagagccggaggtcaggtcgcacagggagccgatcaggtcggtcaggcggcggggcgtggtgccctgggcggccattttgcccaccagggagccgtccttctttttgatctcgtctttgatggcatcccgcagcgcctcgccggacagggcggcaaagtcgttgtccgccagatacttgagcttgagctcgttgggggtgccctccaggccggcggtgtaggcgggagagaccaccggatcagccagctcccagatcttgcccacggggtccttgaaggcgccgtcgccgtagaccatgacctccacgtgcttgccgctctccttcaggatgcgggcctgaatggcctccaccagatcctggcactcccggggaaagagcttcaccttgtcctcggtggacttgttggagcccagcaatccgtacttgccgttgtagccactgccgtcgatggaggcggtcatgatctcgtccaggcagaagaccttctccgccccggcggccagcaggcggcgcttggtgcgggcgcgggtgtggatgtcacaggccagcacgttcttggtgtagggcaggatggcccgggggtcattggcgaagatgacctccacctccgcgccgctctcccggatcaggttggaatagtagtccacatagtccacgcccgtgaaggggtggacggtgtagccgaacagctcccggtaacgctccagggtgaggacatccttataggggtccacccccttctcgtccatcgcatccacatcgatgaggtgattgcccacctcgtcggaggggtaggacagcatcaggacgacctttctggcccccttggcgatgccccgcagacagatggcaaagcgattgcggctgaggatggggaacaggacacccacggtctccccgcccagcttggcgcgcacgtcggcggcgatatcgtccaccgaggcgtagttcccctgggcgcgggcgacaatggcctcggtcatggcaatcacgtcccggtcgcggatggtgagcgctccgtccttgacagtctccagaacggaattggtgacgatctccaccaggtcgtccccacttcggatgatgggagcacgaattcccatggatacggtgccgaccatgcggctcatgcaacaacactcctattattattatctttcatttcggtgcggcacttccgccgcaacggatgtattatactataaaggagacagcttgtaaaacaaaaattttgcaagccgtcccttttttggctcacaccccgtctccctgctccgccgggaaatgctcccccacccattggcggacgcactccaaaaagcgggcagttaacggcgaaggggaacggccgcggcgtatcgccagggcgatacgccggtagtgtctccgctccagcgggatggcggcgaaggcgtagctggaggcacgcagcaccagctccggacggatactcaccccaagcccctgttccaccatggccaatgcggcaaagtcatcattgacggtgtaacggagattgggccggaatccctcctcctggaaaatgaggccgatctccaaatcccgctcctccggtgtgttgatatagggatcctcccggaaccgctccatgggatagtagggggcctttgccaaagggtgatccaggggaagtaccgccatcagctcgtctcgaaaaagggggtaggtttccagccccggccccgcgggcagtcccaaaaagccgcagtctgcctgaccctgccgcagcagatcctccacctccgcgaactcccagttgcttaccaggtcaaactgaatacccgggtagcggccgaggaactccttcatgatagcgggcagccagtggatggacacgctggcgaaggtggccacccgcagggttccccgggtcaggccgtggagctccgccacctgctcctccagctccctgcccgcattgcacaccgcctgaacatagggcagcagcgccgccccgctgctgctgagcaccacccccgtccggctgcgggtaagaagctccatgtcccactcccgctccagatcggcaatcacacggctcaccgccgactgggtataccccagcgcctccgccgcacgggtgatgctccccagctccacagttttcagcagaatttgatacttgttaagattcacaattaccattccatttccgcatattcagcatgaaaaagattcgcttgtctcatatctcatattattgtatactgaaaccgtaaggaaggcaagagcttgtgatagaaaggagttatcacaatgaaaaagacgatttggaccaccgaccaccgtacgctggagcattacagggaaatgagcagcatgcccttctctgttgatcttatgcgtgcttactggcagggcagcccctggcgggccctccgagtgctgtttcccaggggttgacaccttgtcctgcaagggtttcaccatataacacgcctcatggagcggcgggcatgcctccctccttgatctgcacaaggatttgtccccctccagccacagaaggccccccgcccggcggggggccttctgtgcgtttcaagcgccggttaaacaatcatcgtacgttccttggaactattttgcgtgtaaccatccttgttttcccctctacaatggaaatactatgcctcacagggcaaaaatgctctgaaaaccgcaaaagaggtgtgtcttatgaagaaggctcatggaacgagcaaacagcttcctgcgctggacgagcgcagcgatggaattctggaaaacaggggctggtccgccgaggccaagcgccgcttctggcccaagcactcttggaaggcactcatggactgttatcgccacagccgctgagctggtgtgcacaaggaaagcctccggcacagccggaggctttcctttgcctttccgcacagagggacgctctcagttcccggcccgccggcagatctcatggcgcttggggccggtggagacgatggtgatgggggcctcgatgtgcttttcaatgaagtccacatagtcccgggcggcctggggcagcttgccgtagtcagtgacgccccggatgtcgcacttccagcccggcagggtttcatacaccggcttggcccggtccagcagagcgggcacagggaagtcggtggtcaccttgccgtcgatctcatagccggtgcacaccttgatctcgtcgaggtagcccaggcagtcgatggcggtgagcgccacctgtgtggccccctgcaccatgcagccgtatttcgtggcaacggcgtcgaaccagcccacccgacggggccggccggtggtggcgccgaactcaccggcgtcgccgccccggcgtctcagttcgtcggcctccgcgccgaacagctcgctgacgaaggcgccggcgcccacggcggaggagtatgccttagtgaccgtgatgatatcggtaagggccgtgggaggcaccgcgccgcccacggtgccgaagcccgccagggtatgggaggaggtggtcatggggcagatgcccaggttggggtccttcatggagcccaactgcccctccagcagcacctgcctgccctccttaagggcccggtgaacgaagctcaccgcgtcgcccacgtagggctccagcgccgcgcggtagcccatcagctcgtcaaacaacgcctttggctccagcagaggcttgtggtagaggtgctccagcaggacgtttttcagggtacagatgtgctccagttgacccatgagccgctcctcattgtagaggtcggccacctgaatcccgattttggcgtacttgtcggaatagaagggtgcgatgcccgacttggtggagccgaaagcagcccccgccaggcgctcctcctcatagctgtccagcagcacatgatagctcatcagaagctgggtacgctgatccacgatgatatggggggcgggcacaccgccgtcggccagatgcttcagctcggccagaaacttcttcacgtccagggccacaccgttgccgatgatgttggtggtatgcgggtaaaagacacccgagggcagttggtggagcgcaaatttgccgtagtcacagatgatggtgtgcccggcgttggccccgccctgaaagcggatgaccacatcggacgcctcggctaggagatcggtgatctttcccttgccctcgtcgccccagtttgcgccaacgattgctttgaccatagttcgttcctcctgccgcggggattcgcgcattggccttttcccgcgcgcaaccgcccgggagggcacctttatttatgaaggagtctctcccggaacgccctttattataacgccgcggcggcagggctgacaaggtaaaaagtgcaaaaaaacagctattcctccggggtattttctttctggcccgggattgcgagagaaaaggccggaatcccctccgcatagggcgcgatggagtaaagtggaaagtagatcacaggccccgcctccgtcaaatagaaacgctccgggtcgaagctgcggggcagccgcgcctcccagtcgggcgcgaaccaggactcccccgcggacagccgagcccggagctgccgctccacctccgccagcgcccatgccctccaccggaatcccggcggaaacagctcccccagcgtcagggggctcccccccggcagcgcccaggcgcttccctgccgcagggtgacgccgtgggggcccccggtccgctccgcggcgtcataatacaggctcaggcactccggggtgtggagggtcacgacgccggtgagggatgcctcccacggccggaaggggtgggagacctccctggcctgccgggcggccgtgcaggccctgggatagagctcccgctcccagcgggccgcccacgccccctccaggcggcggcaccagcgttccagccgccgcaggccgggtattccctccggcagctccagacggacaccggagaccgcgagcaccggctcctcctcccagcagaattcccgcctccactccttccaagccggcgcggccttctccgtccctgtgtgcagccccttcatcgcgggcacctccctctctcagaatccggtgctccatcctatgaaactccgtaaaatcggtgaaaaagaggtttacttctatacttcactttggtaaaatagatacgatttccgcagagactgacgaggaggtcattgatacctatgacgaaaaacgaaaagcgggagcatggggatgtgctctatgaggccattcttaccctgaaggatctggaggagtgcaagaagttcttttccgacctgtgcaccgtggcggagctgagggctatggaacagcgctttgaggtggccatgctcctgtccgacggcatgatctacaacgacattctggagcgcaccggcgcgtccagcgccaccatcagccgggtcaaccgttctctccagtacggggccgacggctatcaggcggtgctcccgcggatcaaggagaagctgggcggcgatggcatatgaattcctggcggggtgctacgacgcctttaccgccgacgtgcactatgcccgctgggccgactatctggagaagcacttcgcccgcagccggctgcccatccgcacggtgctggatctggcctgcggcaccgggagcctgacccgtgtcctggcggagcggggctatgagatgatcggcgccgacctgtcccaggagatgctggcccaggcggcggagaaatgccggggcgcaggccccatcgagccgatctttctgcatcaggccatggaggagctggatctctacggcactatcgacgcctgcgtgtgctgcctggacagcatcaactacgtcaccagccccaaaaagctggcccgggccttccggcgggtgcacaccttcctcatgcccggcggcctcttcctctttgacatcaacaccccgcaaaagctccggggcctggacggccagatgtttctggacgagagcgaggatgcctactgcgtctggcgggccgactggtcggagcgccggcgcatctgcacctatggaatggacatcttccggctggatccaggcgggctgtggagccgctgggaggaggttcacgaggagtacgcctacgaaccggcggagctggaggagctgctccagcaggccggtttccggcaggtcagacaatacggcgagctgaggttccgcgcccccagggagggggagcagcggattttctttgccgcacgaaaggaattttgacaagcatggcagacaagatcattcgcgttttggccaaggacgcgccggtgaaggcatcggcgatcacggccaaggagatggtggagcgttcgcggcagattcacaagactctgcccgtggccaccgcggccctgggccgcagcctgatggccgcctccatgatgggcaaccagctcaaggagaaggatggctcggtaaccctgcgcatcaagggaggcggcccgctgggcggcatcaccgtggtgtccgacagccagggcaacgcccggggctatgtggtcaatcccctggtggacctccccctgaagggccccgccaagctggatgtgggcagcgccgtggggcgggacggctccctcactgtcatcaaggatctgtgcatgaaggagccctatgtgggcactgtccccctgatatccggcgagatcgccgaggatattacctcctactttgctgagagtgagcagatccccaccgcctgtgccctgggcgtgctggtggacgtggaccagagcgtgcagtgcgccggtggatacctcattcagctcctccccggcgcagatgacgccaccatctccgccatcgagcagggtatcgccagggtaggcccggtaaccgaggcgctgcggggcggcctgagcgccagggagctggtggagcaggtgctttctgaatttcagttggagatactctctgaggagccggtggagtaccgctgctactgtagccgggagcgggtcacccgcgccctcatcagtatggggcgggaggagctgaactccctcatccgggagcagggcagggccgagctcacctgccagttctgcgacaaggtatatcactatacaaacgaggagctggaaggacttctggcctcactgtaggctcgagagaaaaaaagcaaaaaattttggctgaaatggttgacaactgggggaagctttagtataataaccttcgccgcgtgaccaagagtgatttacaaactggtctgcggcgaggacaagggagcatagctcagctgggagagcgcatgccttacaagcatgatgtcacaggttcgagccctgttgttcccaccactcccgtgagggagctcccgtaccccctaccgtctggcgcggtagttcagttggttagaacgccggcctgtcacgccggaggtcgagggttcaagtcccttccgcgtcgccattcgcctctgtagctcagttggtagagcaggggactgaaaatccccgtgtcgctggttcgattccggccggaggcaccatttctccggtggatacccaaggtatccaccgggggaatctttcaaaagcaggtatcaagcgtgtgtgatccgcatagaatggatcagggcatgcaggtgtagctcatctggtagagcgccaccttgccaaggtggaggtagcgagttcgagcctcgtcacctgctccatacaaaagataacaggagcaaatcttgctcctgttatccatacggcgacatagccaagtggtaaggcagagctctgcaaaagctccacccccagttcaaatctgggtgtcgcctccaaaaaagaagcacctgctttgcaggtgcttcttttttggagtctgtggaaaaaagtcttaaccatagcctgccggcctttttaatggcgtccggcgggaaacgcgggagaaaggaaggcgccgcaatgatctatctcgaaccgcccggtacggacccctattttaatctggcgctggaggaatatgtctttgagcagatggaccggagcagggcctattttatgctctggcagaacagcaacaccattgtggtgggcaaatatcagaacaccgccgaggagattaaccaggcttttgtggatgcccatgggattcgggttgtgcggcgcctgtccggcggcggggcggtgtaccacgatacaggcaacctgaattttacctttatcgtggaccaggacaccgcccctggcctcaacttcaagatttttgtccgccctgtggtggaggccctggcccgcttcggcgtccacgccgaattcaccggccgcaacgacctgaccatcggcggcatgaaattctccggaaattcccagtacgccaaacacgggcgcctgctccaccacggatgcatcatgctggactccaacctgaccgatgtggccgacgctctgcgggtgaagcaggccaagttcgactcgaaggccgtgaagtcggtgcgcagccgggtgaccaccatcaacacccacgcccctacccccatcgctatggaggacttcaagtcggcgctgcgggcgtgcgccatggccggtggagcactggagccctatactctgaccacagaggacatgctggccgtacagaagctgcgggacgggaagtatgccacatgggcgtggaattacggcttttcacccccttatgacatgcggcgggaggccaggtttcccgctgggctggtcaccgcccacctgcgtgtgaagcagggatgcattcaggccgtccggttctacggcgactttttcggcagtgggcctctggaggagctggaggcggccatggccggcctgcctctggacgcacaactggcggaggccctggccccgctccatgtggagcactatatgagcggcattactgcggaggagctcgcccgtcttctgcgggggtgaggcgcggggagctgccggcggtggtcagccctccgcccagagggacagcagctcctccgggtcggcgtacagggcctgatacagcgcatggtactgctcctgtaccccctcccccgcctcccgcaggctgggcagcggggcctggaggccatagagatagagccagcagccctcccggccgcccagcagggtatcccggcctgtgagcacctccaggggttccgtctcaatgtgcagctgcgcgatgccgccgcactccggccccaaggcccggcaatagagcagcagaccgccgccgtccagcgcctgcaccgccccgaggtccggccagggctccggcagggccagggaaaagcccctggcgtccacatagaagtgctcccggagcagggcccgcaggtcgatgctcctgccgtgcagggcggcgtcataggttcctgtccggccgccgtggggcggccacacctccatggtcagctcggtgagatccgccgcctgtcccggcgacagatagatgccataggtcttttccgctgtccagtcctccccgtcaaagtagtggaggctgattccccccagcgcctctgtctccgcccggccggcgatgtgaaggttccactcctcctccgggccgctgtgctccggcaggcgaaaggaaatgcagtattccaactcgccgggacctatgtcatactcccgcacctcgatgctctcctccagcgcgtccatggcctcctccgccgtgaggagccgctgttcacaggccgccagtgaggtgacggccagggcggcagccagcacgaggccggccgccgccgccccccttcgcctgtgctggaacagattcgccagccgcgcccgcagcagccgtcctcccccgccgaagcgggtggacaggaccggcccccgccctcctgcggccagatgcaggagggcggtgccgtagcggcggcggaacgcttcatccctcccccgcaccacacgggcgtcgcagcacagctccagggtgcgccccgcctcccgggccatccaccacaccaggggattgaaccagtggactgcgcagggcacaaacagcagggccttgtgggccagatcatgccgccgcaggtgggtcagctcgtggaggagcaccacctcccgctcgtccgccgggaggggcctgcccggcagcagaagcaccggcctcccaagtcccaccaccagaggggcgtccgcctcccctgtccttagcaggcggggcgtacggcggagtcccagctccgccgccagggccgccagttgggccctctcctcctccgtgcccggctgcgcgccccggagcagacggcggcgcgccaggagataggccgccccctgatagcccgccagggccagcccgccggccagccacacccaggcggccagctccaggagcggcaggggcctcccctccggcgcggctgccgggggtaccgcccggggcggttccacgctctccggcccggcgggctcaggcccttccgccggcgcccgaggggcggccggcagggtcacagacgagagggcggacacatccaccgtcaccgccgtccacggcagggaaagcgggacgggcagggccatccgcagggccagtaccagccagagcaccgaaagggtccccgcagcatagcggccccgcaggcggggcgccagcagcaggaggggcagcagcaccgccgagcctgtcagcgacagggtgagcacccgtacaaacagcgactccatcctactcctcccgcctcagcgtgcggaggtactcctccagctcccgcacctcctcttccgtcaggctcccgccgtcgtggagggcggcggcaaaccgccggagggagcccgcatacagtctgtccagcaccgtccggctctcctgctgctcatactccgcccgggacactctggcccggtaacggttggtctttccctccttgccgcagctcagaaagcccttttcctccaggcgcttgaggtagctgtgcagggcgctggcagtcaggggccgctccagccgcgccaggatgccgggggccgtggccccctcctccccggcctcccacaccgccagcatgagttccagctccgactccggcaagcgtccattccacttcatggccgctcctccttttctgcatttgcaaatctttctgtttccattgtaggatcagggcaaagctctgtcaagcattattttgcatttgcagaaaataaattcaaaaaaggggcggcctccggccgccctatggaatgtccagcgtcaccacgtccagcccccgtttcatggcataggagatggtatacatggtcccccccagcatgccgtcgtacaccgcaatcagcatggccgagtggtccaccaggtagcgattccgccggagcatgcacccccggtcgtagtggtgctggagcatggtctcattgtcacagcgctccaccagggagaaccaccgttcccggtcccgctcccgccagcgggcggcctgctcctcgcaggggatgaccgcctccaccgtcacgccggggcgccgctcccgcagggccagcgccgcctcgcaacagtaaaaatccgctccccgggccataccgcacaggaaatgccgcatccctttttcgtaggcggcctccaccgccccggccagcctggccttcagctccaggcacctgggatccccctcgtcctcccgccagggcagcttctccggcctgtggccggtaaagcagcaggttgtctctcggttcattccgcccctccgtcctctgaatgttgttcccattgtagtatatccagaacggcaagtcaatgtttatcgaacatttgttttttaaattggggcttgcatttttccacttcgtgtgtataatagggattggaacaactgaatgagatgtcttcagggcagggtgaaaatcccgatcggcggtacagtccgcgagccggaaacggcagacccggtgcaactccgggaccgacagtgacgcgcatatcccagggcgcgaagtctggatgaaagaagatgtgttgaaattgggcacgctccttttgattttaacacctggaaggcatacgtctttcgggtgttaccaaatcaaagaggagtgttttattatgtccgccaaatccgcccgcgtcaagaagctggccctgttagccatgttcaccgccatcggtgctgtgctcatcacgctggtgcacttcccccttttccctgccgctccctttctccagtatgatcctgccgatgtccccatcctgatcgccgctttcgccttcggcccagtagcgggcattcttgtgaccgtgttggcctcgtttattcaggctttctttttgggcggcgatggtatatacggatttttaatgcatgttattgccaccggtattctggtcaccgtagccagtacactctaccggaagttccataccagaaccggtgcgataatcggtttgctgctgggcacatttgctatgggcgtaggcatgatgatcgccaaccatttcattactccattttatatgggggcccccactgagatggtggatgccatgctggtaaccgtcattctcccgtttaatctgctcaaggctggtatcaactctattgtcaccttcttggtctacaagtctgtgtccaagtacatcgtccacggcgaggagtttgccaaggctcccaagaaggccgccggcgagatctgagcagataccaaacgccccgcgcctcccaaagaggcgcggggcgttccgctatttcgcgatatgaaccgggacgccattgacctccacgccctcgtcggcgcggatgaggatgtacttgaccccgtcgatcacccgtgtgtccaccagatcgctccgctccgggctgaccttgatcaccacgtcaggagtacacacctcgatctgcttctccaccagattgcgggggctgagggccatatcggcgccaaaggcgtcgtcatagcggagggcgaactcctccacatgggagtcggacacgccgcaggacttgaggacgcacttgaccgcccctttggagagggtcaggggctccgcctccttccgctccctgtgctcctccaccagctcgcagagctggtcgtggaccgcctgtaccacctcacagctgcactcgtcggccagggtgtcgctcaacagggtctggaacgtctccttttgcgcggcggcgggcatgggtgcctcccgccggaacaccgcctccaccagctccgggtggttctcgccgctgtccctggtgtagtagagggcgttatacaggttggtgctgcggtcgtcaaaggcgggaaagaggaagcccagctccggcggggacaccagccagtcggcccgccggttgtggaactcgttctcccgcacgtggtagctcagggcgggcttggtctgcttcaccgggcagatggagcacagcaggtaggagtacacctcggcggcgtcctcctgccgctccccgtccttggcgcggtagggcacgtcgtagcggtcgtacaccaggaggatcaggtagttgccctccagggtaagggactggcgcaccagttggaagaattcctccaccgcctcctcgtccttcagggcggtgtcccgcaggcgcatgagccggcggtgctcctccccctccaccacctgccgggtctcgaaggagaggtccagcaggttctttcccagggtccccgacagggtgcggcgcagcagggccagcagggtctcggtctcctcctgggtcatgagggccagagactggtcaaactgggccacgctctcccccatctcgttgacatagcacccccggatgtgggtaatactgtttttctccgggcggagccgccggcgcagctcccccacctctttttcattcattgcaatacctccggtcaaaaaagaaggggcaagccgtccggcggcttgcccctttgtctcttgggcttatcattacatgaggcgcacggtatagtataccgccaggatcagcagccaggccaccagcacaccgtacagcacggccagcccgcccagcagcaacgcggcgatcaccaccgcggccaccacgccgcaggtgacgtagagcagggcgtagttggcgctcttgggcagcacctccacccagttccccttcaggcgcagcttgcccccggcggcctgcatcacgcggaacaccaccgcggcccccaccagggcaacgcccaggacgacggcgtagccataggcaatggccgggaagccgaagtggtagggcaccaccttcacacccagcaggcccagggcgctgagcacggcggcaaagaagaactcccgctggtagaggtagtagatcagcgccagcaccgccacggcgggcacagccacatacagcagccggataccgctctcgtcaaagacgcggattaccacggcgcagaccgccagggccagcatcacgccggccagcacggaggacaggcgggtgaatttgccggatttgcgggccgcgaccgcccagatcagcaaaatgacaaagcagatgggcagggcgatcatcagcacggaaaagacatcccgcagggacttggccagttcaatctgctcgacagtgtaattggcatataccttgttcagaaggagaagcagcacctccaacaccacggcccccacgatccaccagaggaccttgttcaaaaccacgtcttcctgctttgcgcgctgggcttgttgttctttcttgttcatgtatccatctcctgtggccgggcgcccggtttctataaaagtgcccctccgctggggctgagcgcctcagagtcatcaatcttctatattctagcagaaaattcgccgcattgcaagtgaagaatccctttcctctttccagcggcgcggaactgtggtaaactgtccttaatcaacatcatgattattaggagtataccatgaaacagcgtatttctttcctccttgcctgtgtttttctgtgcttgcccggctgccgcgcctccggggcggagcagacctttttcgccatggacaccgtgatgtccgtccaggtgtccggccgccgcggaccccaggccgtggcggccgcccgggaagcggtggagcggctggacggcctgctctcccgcaccgactcagacagccagatcgcccggctcaacaccgccgccggggacggcgcggccgtggcggtggaccccgacgtggcggaactgctggccttttcccaggaaatcgcccggcagctcccaggcgactttgacatcaccatcgccccggtgatggacgcctggggcttcaccaccgaggagcggcacgtacccgcgccggatgcgctggccgccgccatggccctggtggacagcgcggagctctccgtggacacggaagcctctgccgcctcactggcccgtgcgggcatggaggtggatctgggcgccgtggccaagggcttcgcggcccgtgaggccgaggcggccatccgggatgcgggagggacctccgccatgctggatctgggcggcaacgtcacggtcatcggcgccaaggaggacggctccccctggcgggtggcggtgaaggacccccgggacaccggcagctacctgtgcgtcctcgccctgactgacgtgaccctctccacctccggcggctacgagcgctatttcgaggaggatggggtgcgctaccaccatatcattgaccctgagacgggctatccggcggattccggcctgctgtctgtcaccgttgtctccaccgaccacctgctggccgacgccctctccaccgccctgtttgtggcggggccggaggaggcgctggacttctggcggagccgggacgacttcgagctggtgctttgcaccgaccagggagagctcctggtaaccgaggggctggaggacgtttttacctttgccggggcagacagggggtatacctatgagatcgcccgccgctgagcgccgccggcccacgctgccggacggcgtggtggccctgctggtggccgccgccgccgtggcgctgcttttttttcttcagccggaggagagcaactttttgaccgcctccgtcgtcttagagggtgagaccatcgcggagtatgagctaagcaccctcaccggtcccgtcaccctggtggtggacgaggccccctatcccctgacgatccaggccgagccggggcgcatccgcatcgcggagagtgcgtgtcccagccaggactgcgttcacaccgggtggatcagccgggccggacagcagatcatctgcctgcccgacaagctggtgatctccctgtccggcagcggcagccaggagtttgacgcaatcagcggctgaaaagttcccgctgttttctcattctgaaaggaggcgctcccccttgtcctcatccctgcggcggctgacccgctgcgcggtgcttaccgccctggcgctggccctctcggtggcggaggggctggttccgctgaccattctcttccccctgcccggcctgcggctgggactggccaatctggtcaccgtttatgccctttgccgcctgtccgggcgggaggccctgctgattctggccgcccgctgccttctgggcgccctgctggggggcaatctaatggccctggccttttccctcaccggcgggctgctggcctttggcgtcatggccctgctgctgcggtgcagcttcctctccctctttggggtgtccatcgccggggccgccgcccacaacaccggccagattctggccgccatggcagtactgggcagccgggccccgctggtgtacctgccgcccctgctgctctgctccctggtcaccggggccgtcaccggcggcgcgtccatgctgctggttcaccggattccccttccgggtgacataaaatcgtaaggattttgtcatccttttgttgtttccttttgccgcccggtgtcgtaagataacaactacagagatattatgtgggaggaaccataccaatgaaccatatcatgccaaaagccgttgccctggcgctggcctgcgccctgacacttcccctggccgcctgcggcggggacaaaaccaaccagccgtccccggacactacccctgtagccgcggccacaccggaacccacccccacccccgcagccgacccctacgacgcggtgcgcacctactggagcgcggaccagcttacccaggcctggggccccgaccaggcggtggagcacctgtttttccaccccgtcatcgcctatcctgagtatgccttttccgacgcggtgccctacgaccgccaggtggggctggacgagtggatggtgaccgcggacgagtacaaaaagatccttcagagcgtctacgacaagggctacattctggtcaacatgggggacgtgtggagtgaagtcaccggcgaggacggcgtcacccgcatggagcggaacaccctcatgctccccgagggaaaaaagcccctcatcatctcctttgatgatgtgaactattacgactacatgctggctgagggcttcacctccaagctggtgctgggggacgacggccagatctgggcccagtgcaccgatcccaacaccggcgagaccttcctcacccaggatctggacgctaccccgatcctggaccagttcgtgctggagcaccccgacttctccctcaacggggccaaggccatcttctccctcaccggctaccagggcatcctgggctaccgtacccagaacgacatcgacatcgccgccgacgatccccgccgccccgcctttgacgccaaccgtcaggcggagatcgaggccgtcaagccggtcatcgagcggctcaaggagaccggctggaccttcggctcccacacctggggccacatccgcctggacagccgccccctggagtccgtgcagcgggacaccgtccgctgggcggaggaggtgggctccctggtgggccccaccaacatcctgttctacccccacggcggccgccccgacggggacgactggcactccaccggcccggtgttccagtatctccagagccagggcttccgcatcttcgccagcgtgggcatcaactccttctcctacatcaagaaggacatttccgccgtcatctgcgaccggctccaccccgacggcaccaccctgcgcaacggcaaggccctggagtggtacagccagttctacgacgcgcgggagatcattgatctcgatgtgcgccccgacctgggcgtgacctggtaaggaaacctacagcagcgcccccgtccggccgatgccggacgggggcgttttttcggcttgactttccccggataccgtggtagtataatcaccctttaccgcggctgggaaaggaatggaacgctatgataccacactggaagcaaaaattcgccctcctctggacagggcaggccctgtccatcctcagcagcatgatttcgcagtacgccctcatttggtacctgaccgacctgaccggctcccccgcggtcctctccctggccaccatggcggcgctggtcccacagggaatcctgtccctcttcaccggaacctttgccgaccgcttcgaccggcgctggatcatgataatctctgacggggccatcgggctggtgtccctgatgctggcggccgccgcctttgccgctcctcttccggtggcccctatcctggcggtggccgcgctgcgcagtgtgggcggcgcctttcatgccccctgcatccaggccatcacgcccctgttggcccctcccgatgccctgacccggtgtgccggttggagccagggcatccagaccgtctccatgctcctctcccccgcgctggccgctgttctttatgcccgcatccccctggcttggatcctcctgctggacaccctgggggccgcctttgccatcgccggagtacaattggcccggctgcccgccctgcgggccgaagcacagggccggccgctccggctctggcaggacacccgcgaggggctcgctgtgctgcgttctcaccgctggctgtgggagctgtccctcatctgtgccctgttctccgtggccttcctgccggtatccgccctgtttcccctaatgagcatggagtatttcggaggggactccgccgctgccgctctggtggaaaccctgttttctgccggaatgctggccggatcggtgctcctgggcctgtggggaggtacccggaacaaaatcatcaccatgacggcggcagtgctgggactggggctcaccctggtgctggccggcttgctgcccccctccggcttccgggcgtttgctggcctgtccctgctgatgggcctgtccgctccctttttcaactcggtgttcatggccctgatccaaaccaaggtggagccggagtacctgggccgtgtgctgggcctcaccggggccatcatgaccctggcctcccccctggggctgggactcaccgccctgttcgccgatgccaccggcgttcccctctggttcctgctggccggggtaatcactctgacctgcggcgggctgatgttcctgctcccgtcggtgcgtacctgtggccgtccgtgattgcgctgacacggaaaacgtggtataatggcttacaccttttataccacgttttgataaggaggtttccctatgaccgaccaggaactggtggagctggcctttaccatgctggagcgctcctatgtcccctactcccatttcccggtgggcgcagccctggagtgcgccgacgggacggtgttcaccggctgcaatgtggaaaacgcggcctacggctcctccatctgcgctgagcgcaccgccttggtgaaggcggtgagcgaggggcaccgggacgatttcacccgcatcgccgtggtgggcaactccacggagccctgctggccctgcggcgcatgccgccagatgctctatgagttcgcccccggactcaccgtactggtggcgcagagggatcacagcttcgtgaagctgcccctgtcggagctgctgacccacggcttcggccccaagtctctggggtaagttccgcgcccctcttgacagaggggcgcggctgtgctattttaaacataccgacggtatgtatgcaaaggagggggccccatggcccgcaacaagcatccggaggagaccgtggccaaaattctggacgtgtccatgcgcctgttcaccgagcagggctacgagcacaccaccatccaggacattgtggacgccctgggcatgtccaagggggccatctaccaccacttcaagtccaaggaggatatcctggaccggatcaacgaccgctactacgaaaacctggagtggttctccgaccccgccaagcttcccggccggaacggcttggaaaaactgcgccacgccttccgccactttctcaccgacccggccaagcgggaggtagaccggctggcgatccaccacattgtaaagaaccccaagatcgccctgctcacgctggaatccacctttcgggacgccgctccctatgtggaggggatgatccggctgggcatggccgacgggtccctgcccggcgtgacccacccccacgagatcgcggaggtgctcatgcttctgaccaacgtgtggacgggtatgttccccggcagccgggaggaattcgccgccaagctgcgcttctgcggggaatttctggaccgcttcggcctgcccgtgctggacgaggccctccaggccgacgcgctgaattactatgaccaggtgctccaggacgattgagccgcccgctcctccaccgcccctgcgggggcggtttttccgggtaagatacataccaaccgtcggtattaaaaagaaaggtggatctctatgaagaaaacatggcttctccccgccctggccctggcggccctcgccgcctgcgttctgctccggacgcgccgctcagacggcgcgcccgccgcccgaaaggagccgccctatgcgctctgaccgcctgttttcccgcgacttcaccctcatggtcgcgggccagatcatctccctgttcggcaacgccatcctccgcttcgccctgtccctctatgtgctggacaccaccggctccgccgccgtcttcggcggcatcctggccgtgtccatggtgcccaccatcctctgctcccccctggggggcgtcctggccgaccgcgtcccccggcagcgcatcatgtggggactggacttcttcaccgccgccctggtgctggggtacggcctgttctttgccagccggggcacggttctggccgtcggggtgctgatggtgctcctggcagccattcaggccctctaccagccctcggtgcaggccagcatacccgccctggcgtcggaggagcacctgcccgccgccaacggcgtggtggcccaggtacaggccctggccaatctgctgggccccatcctgggcggtatgctctacggctgggttggcctgctccccatggtggcggtgggcggggcctgcttcttctgctcggctgtgatggagctctttctccgcatccccttccagcgacgaaccctcgccggcccgccgctggccgccctgtggagggatctccgggacgcgggccggttcctgacccgggagcagcccggcctgctgcgggtgctggccctggtggccctgctcaacctcttcctctccgccctgctggtggtgggtctgccctatctggtgaaaatcagcctgggcctgtcctccctgcactacagctttgccgaggccgccctcagcctgggctccatcgtgggcgggcttctctctgggctggtgctccgcggcgcggatatccgccgggcctggcggtttctgctgggcacctccctgctgctgctccccatggccctggctctggcgctgggaattccgtccctggccgcctatggagtcatcctggtctctgttttgctgggcatggcctgcgccatgctgtttaccgtctccgcccagacctatcttcagcgggccacgccgccccacctgctgggcaaggtggcctcctttgtggcagctatttccacttgtgccatgcctcttgggcaggccttgtacggcctgctgttcgatgcccttcaggcccacgtctgggtggttgtggcgctgggcatgggggccagcctgctggtgaccttttcctccgtccgggccctgggccgcctccccgcccttgacgaagccccctccggcgggtatactgaacagagtttggattcctaggaggggtttcatggagggcaaccgggtctatctggccgcctgtccggactacggacaggcggaggcaaagctgcgtgaggcggtggccgccttgggcgggatggagcgcttcgtccggccgggggagcgcatcctgctcaaggccaacctgctccgggccgcgccgccggagagcgccatctgcacccacccggcggtggctgctgcggcggcgaagctggtggcggaggcggggggcacggcggtgatcaccgacagccccggcggggccctccacaaggaggccgtcctgcggggcctgtacgaaaagaccggcatggcccaggccgccgccgcttccggggcggagctgtgctatgacgcctccacccgcacggtgtccctccctgcgggacgggtgctcaagcaggcggaggtgatcgccccggtggcggaggccgacggggtgtttgacctgcccaagctcaagactcatgtgctcatgagcatgacgggggcggtgaaaaacctgttcggcgtactccccggcctgtccaaggtgggctaccacgccacccaccccagccaggagcagtttgccgacgtgctgctggatctggcggagtacgtcaggccccggctgagcatcatggacggggtgctggccatggagggggacggccccggcgcctccggcacccccaggcacgccggagtgctgctggtgtccgacagtcccctggccctggacgcggcggccgccgccctcatcggactgcctctggcctccaatccggttctgctggccgcgcagcgccggggcctgcggcccagctacattgaggaggtggagctgctgggcgagccgctggaggccctgcggatggacgactaccgcttccccagccgcatcaagggcaacctgatggagtttctggggcccctggccgggcccgccggcaagctgtgcaaaagggtgctctcccagaccccaaagatccgcaccgacgcctgtgtgggctgtggcatctgcaagagcgcctgcccggggaaagccatctcgatggacggccccggtggaaaggcccgcatcgaccccagggcctgcatccactgctactgctgccacgaactctgcccccagaaggccgtggccctccggcagaactggctgggccgttatttgaaataaaatggttttgtatgattttcttctcaccggagatactagtcacggtatctcaatgtgaggaggcagtacaacccatgattttagataagattgccctgattctcgccattatcggcgggctgaactggggcagcatcggcctgttccagttcgatttcgtcgccgctctgttcggcggacaggacagcgctttcagccgcgtgatcttcgcgctcgtgggcctggcggcgctctggtgcatttcgctcctgttccgcgacacccacggcaaggaataaaaagccaaggccctctgaacaagagggccttgactttttttacgctttgccatatactacaccccaggggggtgttaaccgcatgatggcagatgaaaagaaagtcctccgcctcctcaagaccgcccgcgggcagatggacggcatcattaagatggtggaggagaaccgctactgcatcgacatatcccagcagctcatggcaaccgaggccattctcaaccgcgccaacaaggaaattttggccgcccacctgaagcactgtgtgcaggaggccgccagcgatgccgagcgcggacagaagatcgatgagttcgtggccaccctgggccgtattttgaagtaggggcggcccttgaaccctcacgcacattagaaagtctggtgaaccctatgaagcagaaattcaatgttacaggcatgacctgttccgcctgctccgcccacgtggagaaggcggtgcgccaggtggagggtgtggacagcgtcagcgtcaacctcctgggcaactccatgctggtagagtacggcggcaagaccgggccggaacagatcattcaggcggtgacggacgccgggtacggcgcctccctccccggccccgccgggaaggccgccccggccgcccggcccgccgacgccatggaggaggagctggcagggatgaagcgccgcttcctcacgtccttagtgtttctggcgcccctgttctacatcgccatggggcacatgatgggctggcccctgcccgccttcttccaccagccgtccaacgccctggtggtggccttcctccagttcctgctcaccctgcccatcctgtatatcaaccgcaaatactatacggtgggcttcaagaccctgtggcaccgcgcgcccaacatggactcactcatcgccctgggctcctccgccgcggtgctctacggcgtggcggccctgttcctcatcgcctggcacctgggccgggcggcctatggcgcgggcgacgcggccgccgagctggcccaggtggaacactgggccatggatctctactttgagtccgcgggcatgatcctcaccctgatcaccctgggcaagtggctggagacccgctccaagggcaagaccagccaggccatcacccacctgatggatctggcccccaagaccgccatggtgctgcgggacggcgcggaggtagaggtacccgtggaggacgtggcggtgggcgacctcatcgtggtccgccccggcggccgcatcccggtggacggggtggtcacagagggggcctcctcggtggatgagtccgccctcaccggcgagagcctgcccgtggagaagctgcccggcgccaaggtggccgccgcctccatcaacaagtccggctcctttaccttccgggccacccgggtgggggaggacaccacgctggcccagatgatccgtctggtggacgaggcggcctcctccaaggcccccatcgccaagctggccgacaaggtggcgggggtattcgtccccgtggtcatcgctattgccgtcgtcaccgccgctgtttggctcatcgccaccggcggggacgtgacccgggccctcaccgccggggtggcggtgctggtcatctcctgcccctgcgcccttggattggccacccccgtggccatcatggtgggcaccggcaagggcgcggagaacggcatcctgatcaagtccgccgaggcgctggagaccctgcacaccgtccagaccgtggtgctggacaagacgggcaccctcacccagggcaagccggtggtcaccgactgccgccccgccccaggtgtgacggaggaggagcttctgtgcctggccgcctccctggagaagccctccgagcaccccctggccgacgccatcaccgccgaggctcaggcccggaacatccccctggcccctgtggaggactttctggccaccccgggccggggtatccgcggcgtcatccagggccagcagctcctggcgggcaaccgggccatgctggaggaggccggcgtcccgctggacggcttcgacgcggtagcggaggggctggcccaggcgggcaagacgccgctgtacttcgccggggacggccggatgctgggcgtggtggcggtggccgacacccctaagcccaccagcgcagaggctgtccgcgccttccaggccatgggcatcgacgtagtcatgctcaccggcgacaaccggcgcaccgccgaggcggtgggccgccagctcggcgtgaaccgggtggtggccgaggtgctgccccaggacaaggagaagaccgtggcagagctccaggcccaggggaagcgggtggccatggtgggcgacggtatcaacgacgcccccgccctggcccgggccgacgtgggcctggccatcggcgcgggcaccgacgtggccatcgagtcggccgacgtggtgctcatgaagagcgatctgctggacgcggtcaccgccgtccagctctccaggaaggtcatccgcaacatcaaggagaacctgttctgggccttcatctacaacattatcggcatccccctggccgccggggtgtggtatcccctgttccagctccagctctcccccatgttcggcgcggcggccatgagcctgtcctccgtgtgcgtggtgtccaatgccctgcgcctcaagttcttccgcccggagcgccgggagtcccccgccgccccggtttcagaaggaacccccaaatctgtggaaacgaaaggaacgagtgctatgaccaagaccatgagcatcaacggcatgatgtgcgcccactgccaggcccacgtggagaaggccctcaacgccatcgacggcgtggaggccaaggtgaacctggaggccaagaccgccacccttaccctgtccaaggacgtgtccgacgacatgctcaggggcgctgtcacggaggcgggctacgaggtggtctccattcagtaacagccctcccaggaaaagggcccggtgcagactgcaccgggcccttttttggtattttcatttgcttttatagttcctggtatgtgggcacattctcctgttttcgataaaataaaagtttcagatcaaaaaaaggaggacggaacgtggctggaacaatctacggctatatccgagtcagtacccgggaacagaacgaagaccggcagcggctggctctggctgccctgccggtgccggaggagaacatctatatggacaagcagtccggcaaggactttgagcgcccccagtaccgacggctggtgcgccgcctgcggcgggatgatcttctgtatgtcaaaagcatcgaccgactggggcgcaactacagcgagattctggaacagtggcggatgctcaccaaggaaaagggcgtggacatcgccgtactggacatgccccttctggacacccggcgaggcaaggatttgatgggcacctttctcagcgacattgtgctccaggtgctctccttcgtggcggaaaacgagcgcgacaacatccgccagcggcaggcggagggtatcgcggcagccaaggcccggggcgtacgctttggccgccctccccttcccctcccagacaatttccacatgctccatcaggcctggcggggccaaaaaataacactccgacaggcggccagggcctgcggaatgcccacagggaccttctattccaaggcaataaaactggaaacaccggactaaacaaatggaggtatttccgaaaatttgaaaacctgtac

SEQ ID NO: 4367 - DNA, 158 bp, Unknown
  gut microbiota DNA sequence
agcaacaagttatttaaatcataaaatgaagctgaaaaagtacactttttcaaacaattaaagctggttttgagattctctgttctccaatctttaatcggagcaatctgggttcaaattaagcctttgctacaatttttttaattttaaaaggtaca

SEQ ID NO: 4368 - DNA, 38900 bp, Unknown
  gut microbiota DNA sequence
gatagagaataaaggagaacataccttatgagaacacaggaaaagcgtgcaacacggtttcgctccatccagacctcacttctattcgttatcgtaccggcagttattatatccatggcagtcctctcgctgatgggatacctgagctccaaggccatcatccaaaccagcgcgggcaacgaaatgtcccagtgcctttcggtagccatgggttccatcgaaatgtcgctgtccaataaccgcatggttgctgaaactatggcgcgcggcgtggaggctatccaaaggcaggctgtaaagggggatcagaccgcgtcagattgggatgcggcagcctatcaggaaattctgacctcctttgtggggagcaacccggagacgttcggcggcgggatttggttcgagccctaccagtaccgaccggagcagcggtatttctctccctattgcatgcgccagaatggagccgtcacttatgtagacaactattctctgggggagggcgtctattataccgaccaggattggtacacaaacgccgccaataccactcaaaagtccgtttggtctgctccatattacgatgaatttgcccagatttccatggtgacctcctccgcaccgatctacgacgagaccggccgcctgctgggagtcgccacagcggatattgacctgactcagatgcagcagatggtgctctcgctggacgttgtggccaacggccgtgcctttctgattgatgatactggggtatacattgcagacgaggacagcgagaagctcctgtccgccaacatattggaggatgacaacccttcattcgccgcgcttgggcggcagattctgagccagcaggagggctccggcagctacacggcagacggtcaaacctatctggcctggtaccgccagatcccggacagcggctggtatatcgtcaccacagcctcggagcaggagctgatggcggacgcccatacgcttggcatcacgctttccatcctgtgcgcggtatttgccgcccttctgtttttcatccttctggcctatctccggcggagcatcgtccggcccctccacaccctccaggctaccacacagaaaatcgcggacggaaacctgtctgtggagatcccgcgcaattccaaatatgaatttggggctgtaagcctttccctggagcagatggtggagcggttaaggctgtatattgattacatctccgagatatctgctgttctgacccaaatggcggacggagacttttcctttgccctccagcatgattacgccggagaattctcctccatcaaggaggggctcctcaacacgagaggccgggtatccgatgcactgaaatccatcgcgtcgtctgcggaccaggtgagctccggagcagaacaaattgccatcagcgcccagtcccaggcgcagggagccaccgagcaggcatccagcgtccagcagttggctgccatgatgtcggaaatggagcacgatgtcgatctgaacacggaaaaaatcactgaggtcaaccaaaaaatgcaggaggtttcacaggaggttcaggagggcggccgcaaaatggagcgcatgctgacggctatggatgagatcacctctacctccaatgaaatcgggcagattgtcaaaaatattgaggatatcgccttccagaccaatattctcgccctgaacgcggcggtagaggccgcccgtgccggcagcgccggaaaaggctttgcagtggtggcggacgaggtacggagcttagccggcaagaccgcagcggcatccaaggaaactgcggagctgatcgccaatgccctctcagtggtggagaagggcaaggctctcgccgatgaaaccgccgcttccttccgactcgtcacccaaggggttaccctggcgtccgacagcgcccaggtcatcagtgagctctcccaacagcagaagtcttccattcaccaggccaaggcaggatttgaccagatctccagtgttgtacagaccagctccgctacggcggaggagagcgccgccgccagcgaggagctgtccggacaggctgagctgttgagggagcaggctgcgaaattcaggctgcataccgaggaactgtaaccgtccttcccccgccggagtcttgtggcaggctgtgcagaccctccctccccttccagaacttctgcattgaaatgctcctactgttttagtatgataacaccacagcccgcgccggacgccggccgggacgttcaacaaaaaggagcatcatctatgcgaaagattcctgccgccctgctctccctggccctgacggcctccctgaccgccccgctggcctcggccgccggaaccggaagcactctgccggaactggacggccactggagccagtccgccttcgagcgctggcacgcctacggcattgtagagggtgacagccgcggcatgcgtcccgacgccaacatgaccgtgggcgagtttgccgccattctgagccgcgcgatgggctacaccgagacggtggagaacccctatgccgatctgaagggcaccgagtggtacgccccctacatcctccagctcaccgccgccgggattctccagggcgacggcaccaactgcaacgccgaggagcccatgaaccgggagcgggccaccgtgctctttgcccgggccctgggcatccgtcccaccgcccagccggatctgagcggctttgtggacggcaaggacgccgccgactggtcggccgggtacattgacgccatggcgaaggacggcatcatccagggcgtgggcaaccagaccctggccctcggatccagcatcacccgcggctccgtggtcaaaatactggacagctccgtggccgaatatgccgtggaggagggcgccaccatcgaccaggatgtggacggcatcctgctggtggccgccgatgatatcaccgtggacggcgccgccgtgtccggcaatctgcttgtagcccccaaagccggcgaggccaatctgaccgtgaagaacgccaggctggagcgggatctgcgggtttccacccacggcgccaccctgactgtggccgattcccaggtggagggcgacgtggccctctccggtgaccgcgccagcctgaccctgggcagcggcgcgcagcttgcccgtctggctgtggacggggccggcagctccgtgtccgtggagagcggcgcctctgtggagaccctgaccgcccgcgccgccgtcaaggtggacaaccagggcgccattaacaaggcggaggtacaggccgacaacgtggtgcttgacggcaagcgtcccgcccacgtggaggtcgccgacgatgtggccccgccccagaacagtgagggcgaggaggtcaccggctccgaggacagccaggaacccggtcagggtggcggcggttccggcgggggcggcggctccgtgtctgaggaggccgtagccggtatcgtaggtgtccgccctgtggatcaggacggggtcgaggaggacatgccctccgtcaccgccaaggccaccaagaaaaccggggagaactttgtccgcatcgccctgtccaccgacggcgtggtgcccatccaccagagcgagggtgccggcaagggcgcctgggtaggcgtggccatcgaggcccccgagggctatgagcagggcaccttccagtaccacttcggcaccgaggccagcgccgaggccacccaaagcgcggccatcacggaggactcctccatcggccagggcaagtatgcggtgttcttcctcaacgcctcctccaccgcgcccaagacccacatcaccgtgaagtgggagggacaggaggccgtgcagtacgtggtggacctgtccggcgtgcagacgcccgccgtcaagctgaccggcgtgaccgtctccacccacgagatgccctccggggtctcctccaccgccgagggcctgagctttgacggcagcaccgccctggtgcagaacggcggcagcggcaccctgacccacacccaggtggcctctatgggcggcggcggcgagtataccgtctactacaccgtgccccaggccatccccggcggcaccctccagtttgacaaaattgcccgctctgtcaacggcggcaagtggaacacctgggccatgcccagcaccaccgaggccgatgccggctccggctggtggacccgtgacggcgagaactactacttcaagtggggcgccgtcttcgccgaggaggcggaggggagctaccggctcaaggacggcggcgtctttgactacaccctctgctttatcgacaccgacggctcccaggacaatatcatcgccacctataccttccagatcgacctgagcggctacaccatcactgccgacgaataatctccgaagtgccccggacaacgtccggggcactttcttttcccgtgggcctgtggtattattaaggggtgaaaggaggcgctgccatggcgtcacgcagaaaacttccccttgtactttttctgatcaccctcgtccttctggccggggcggtcgttctgctcctgcggggccggcccgtcacgctggagcgcatcgcggcccggcagggctacgccatcaccggccaagaggaggccaccgtcaccctcaccctttccagggagcagatgccggagggctttcccgaggaggttcccatcagccagtctgagggagagctgaagctccccctgctccaggacggggacaccaccttctatctcaccgcctttgcccggtctgacgaggaccccggcaccctctacgccgtcattcagccggagcatcagctctcccgggaagggggacagcttctcctcccctaccggattgacgaggacggcggcatcaccgcccagctccgggtttccgacctgcccgtgcaggccgacggagaggaccgccccgatgcggcccggctggccagccagggcccaggtgaacagttcgccctgtatgtagaccgggctctctttctccgctccgacaccatcaccatccagctcggcagcttctaccgtctgacctatgcgcccgcctgattggggattggaggtttttttgtccactctgctgattaaaaacgcccgctacatcgtctcctgcgacgacaccgaccgcctgtatgagcggagcaatctgttcatccgggacaacgccatcgagtacatcggccccgagctgcggcaggccgaccaggtcatcgacgcctcccgcatggtggtctaccccggcctcatcaatacccatcaccacctataccagctcttttcccgcaatctgcccgaggtgcagcggatggagctctttccctggctggtgacgctgtacgatgtgtggaaaaacctggacgaagaggtggtggccgcctccagcctggtgggcatggcggagctgctcaagacggggtgcaccacctgcttcgaccaccactatgtcttccccgcccgggcgggggatctgatcggcgcccagttccgggcggctgagctggtgggcatgcgcttccacgcctcccgtggctccatggatctctcccggaaggacggcggcctgccgccggacagcgtggtacagaccatcgaccagattttggccgactcggagcggctggtgcgggtgtggcacgacccgtcccgcttctccatgcgccaggtggccctggccccctgctcccccttctccgtgtccaccgacctgctgcgggagagtgcgcgcctggcccgctccctggaggtacggctgcacacccacgtggcggagaccagggacgaggagcagtacaccctggagcggttcggcctgcgcccccttgcctacctggaggggctgggctggaccggccccgacgtgtggtatgcccatggcatccacttcaacgatgacgagctgaaggcgctggccgccaccggtaccggcgtggcccactgccccatctccaacatgaagctctcctccggcgtgtgccgggtgcctgagatgctccgcctgggggtgccggtgggtctggcggtggacggagccgcctccaacgacggctccaacctgctggaggagctgcgggtgtgctacctgctccaccgcctccagtccagccagagcgcccccaccgggtacgacatcctcaagctggccacccgcggctccgcccgcctgctgggccgggacgacatcggctgcctgaccgccggcatggccgccgactgcttcctgatcagcctggaccgcattgagctggcgggcgcccagttcgaccccctctccctgctggggacggtggggctcaagggcccggtggattataccatcgtcaacggcatggccgtggtgcagaacggggagctggtgaccgccgacgagggggagctggccgcccgggccaatgcggcggtgtgccgctacctgggccgttgctgagcccgcgcccggaggccggacggtttttctccgcccggcctccgttttttgtgcagttcggcgcttgtatttctgcctcacaggagtaaaatggtagagctatgtaaaattcatgtaaaggaggcgggagaatgccggaacaggcaccggcccgcagcagcctgctcttttcccgcgacgcactgctgcggctcatcattcccctggtcattgagcagcttctgctgatgactgtcggcatggcggataccgtcatggtcaccacctccggcgaggccgccgtatccggcgtctcgctggtggacaacatcaatacactcatcattcaggtcttttccgccctctccaccggcggggcggtggtggtttcccagtatctggggcggcaggacaccgacaacgccaaggccgcctccaagcagcttctgtacgccatgtgcgccctgtccctgctgctgatgggggccgcgctggtcctccggcagcacattctggcgttgatcttcggccgcgtggaggccaacgtgatggagaacgccctggtctatttcctgctcaccgccacggcctatcccttcatgggcatttacaacgccggggccgccctgttccgggccatgggcaacagcaaggtgtccatgttctgctccctggttgtgaatgtaatcaacatcacagtcaatgcggtgctgatcttcggcttcggcatgggggccgccggcgccggtatcggcaccctggtctcccgcatcgcggcggccgtcattatcatggcgctgctcaaccaccccgaccatgtgctccgggtggagggtctgctgcattttgagttccggggtgccatcgtcaagcgcatcctatttatcggcatccctaacggtatggaaaacggcatgtttcaggcaggcaagctgatggtcctcaacctgattaccaccttcggcacttccgccgtggccgccaacgccatcgccaacagtgtggccggggtcatcaatgtgcccggcatggccctgggactggccatcattaccgtcatcggccagtgtatgggggctggcgagacagggcaggcggtctactacaccaagcgtctcgtgggggccagctatctttgcatgctggtcatgagcgccgccctcttcttctcggctgggggactggtcaccctgtttcacctgagcccagaggcctgcaccatggctgcccaagtgctccgggcctgcgccgtgggcaacgtcctgttctggcccctggccttcacccttcccaactccctgcgggcggctggggacgccatcttcactatggcggtctccctgggctccatgtttgtctgccgggtggtgctcagctatgtgtttgcctgcgcctggggcctgaacctgggactgcttggggtatggctcgccatgatcgccgactgggtggtacgggccgcattcttcctgttccgctactggcggggcagatggaaacgcatccgcgtgatttgactgcacaaggagggaatcgcatggaacgcttccaagatccggagcggctggcggccctgtttgcccgctgccggattcccgagcgccttccctggaccgccgcctatccctggacacttcagtactatgagaagggagaatacctctgccgcctgcgggaacccatggagagcctctacctgcttctggagggcggcatccagaccagcctgaccaacgccgccggccgcacccggctggtggccaccgcccagccgggggaactagtgggcggcgacgtagaggtggtgctgggcaacatccaggccaccaccgaccagcgcgcccaggaggacggcgcgctgtgtgcggccctcccactggcggagtaccgggaggctctatgctccgacctggggtttctgcgctatgcctcccggcggctggcccgcattgtggtaatgaataccttccgcgccaccaacgacctgctgcttccgctggaaaaccgtctggccgcctatctgctctcccaggcggaggacggctggttccatggcaccctgacccgcaccgccgagacgctgagcaccagctaccggcagcttacgcgggtgatgagccgctttgcccaggccggatacctccgccgtacccccgagggctggcgtctggaagatcccgacgcgctgcgggccctggccgaaagcgtggagccctcccgcattctctgaaaaaagccccgccgttccgatggaacggcggggcacttttctttcccggggtaggacatatggcctaccttccagtggagaacatctgctaaagtacaggtatactccgttaccgctttcccttgtcgtaagggatgccctccgccttgggagccctggacttcttggaggtgaaggccagaacgaccagcgtgataatatagggcagcatccggtagaagtgggggctgatgccgagctcggccagcaggaatacaccgtcgccgttgatgtcaatgctggcataggaggcggcgatgcacttgaacaggccgaacagcagggccgcgccggcgatgttcaaaggtttccagttgccgaagatcataacggccagcgccaggaagccgaagccggccacgtcgccggtagaggcgcagttggcggtggtgagagcgtagacgaagccgcccatgcccgccagcgcaccagagattgtggtgccggcgtagcgcatcacatagacgttgatgcccagggagtcggccgcctgtggattctcaccacaggagcgcagccgcagtccgaagcgggtcttgtagagcaggatggacagcaccacaaacaggataatacagatgtaggtggccagatatgccttgttgatgaaggtgtctccgaagaagcccatttcgtcgctgcggccgtagccgaagaagctctttttgagcatgaaccagcttgccgcgtcgccctccgccatctgcagggtgttctggttggcgatgatgcggatgaagaacagcaccagggcgggggccatcaggttcagtgcggtacctccgatggtctggtccgccttcaggttgaccgaggcaaaggagagcaacagggagaacactgcgcccaggatggccgccaccagcatggccagcagcatgaagccctggagcgccacccagtccccagccgccttggcctcggagaagatacccgccttctgggtcacgttgacaaagaggacacccgcgaacgcgccgaagatcataatgccttccagggccaggttgataatgccgctgcgctcagcaaacacgccggccagcgccacgatcatcagcgggacggcatagatcagggtctgctgaatgaggaacgtcatgccgactcgcctcctttctccacttctgcgccgcctccgccctccggcggtttggccgccgcctctgccgcgggcagggcagccttgctccggcgcttccgctggccgctgatgaacatcttgatgaccagggagaaagcgctgaggtagacgatgatggcgatgatgacatcggtgatatactcattgtaagccgtcaggttggtaagctgcagacccacaatatccagcatggacatgaagcatccggtaaagatcacaccgatgggattgctgacggccagcagggccacggggatgccattgaagccggtggcgggaagggtctggtaggtagaccagaaaaactccgtgttgcccgacaggtagtacagggaagcggccgcgccggacagggccccggcgatggccatggacaggacgatgttccgcttgtcggcaatgccggcgtaccgggccgcgtggcggttggcgccgcaggccttgagctcgtagcccagagtggtcttgttcataaggatatagatcagaattgcgataccgatggcaatcaggatgccgccattgacctgagagttggggaacagtttgtccagccccagcttggcggtctccacaccattgaaactggtcttgtagatataggcagtcttggtgttctccacgtgattctggaggctctcaaacaggctgcccttgtcgaacagccaggtcaccaggttggcggcgatccagttggtcatgatgcaggccagcacctcattgatgttgaggaaggccttcaccagtccggggatacagccccacagggcgccggccagcatgccgcccaggaaggcaatgagccacaccagcggagctggaaccgtttcagtggggatggtgagtgccagaatcagggtggcggcggtgcccatcaggtactggcccggcgcgccgatgttgaacaggccggtcttgaaggccacagccaccgacaggccggtaaggatcagcggggtggcccggaagagcatgttgcccaagttcgtggagttaaagccgaaggtcagcgtgcccgccgcgtcgcgtccggtgctgaacaggccgccgaacaccaggcggatgccctcccacgcgctgttcagccccagggacgggttggcggcgcccacgatgatgataatcagcgcgcccaccaccatgccgatgaggatggagatcagtgaggccagtacagacttggtgccgtctttgccccacaggttggaaagcttctgcttcacgccccctcgccctcctttttcattcgttttgcgccggccatatagaggcccagctcctggacgtcggtggcggcggggtccagctcgcccacgatctcgccctcatacatcacgaggatgcggtcggacaggctcatgacctcgtccagctccagagagaccagcagcaccgccttgcccttgtcccgctcggctaccaactggctgtggatgtactcaatggcgcccacgtccaggccgcgggtgggctgcaccgccacaatcagcggcttctcccggtcgacctcgcgggcaatgatggccttctgctggttgccgccggacatggagcgggcaatggtcaccggcccctgtccggagcgcacgtcgtactgctcgatcagcttttccgcgtaggcgcgcacctcgccctgcttgacaaagcccatgtgctggaaccgtggctcccggaagccctggagcaccatgttttgttccagggtaaagtccagcaccagtccgtgcttatggcggtcctccgggatgtggctcatgtccgcgctccggtggtggatggaggcgtggctgatatcacggccgcaaagggtcaccgtgccgccgctgcacttctccaggccggtcaggccgtagatgagctcgctctggccgttgccgtcgatgccggcgatgcacagaatctcccccgcccgggcctcgaagctgacatcatggaccgcatccctcttttgggtatgggaggggaccgtcaggtgctccaccttgagcaccgtctcaccgggtctggccttctccttgaccacctcaagctgcaccgggcggcccaccatcatgttggacagggactgcttgtcggtgtccttagtatccacggtgccgatgtacttgcccttgcgcagcactgtgacgcggtcggccacggccataatctcgttgagcttgtgggagatgaagagaatgctcttgccctccttggcaaactccttcatggtggccatcagctcatcaatctcctggggggtgaggacggcggtgggctcgtcaaagatcagaatctcgttgtcgcggtagagcatcttgaggatctccacccgctgctgcatgcccacggtgatgttttccaccctggcgtccagatccacctttaggccgtacttctccgacagggcctctacctttttgcgggcctccttcttctgcaggaagcccagcttcgtggtttcggcgcccagaatgatattgtccagcacagtgaatacatccactagttggaagtgctggtgcaccatgccgatgcccagcgcggtggcgtcgttgggattgttgatcttcaccaccttaccgtttttcttgatttcgcccgcctccggctgatacagaccgaacagcacgctcatcagggtggatttgcctgcgccgttctcccccaggagggcgtggatttcccctcttcggagttggagtgtgatatcgtcgttggcgatgataccggggaattccttggtaatgtgaagcatttcaatgacgttttccgcttccatagtcctcatcccgcctcctctatacagtatagttttattatataatacccccatggaaaacacaagaaatttgtcccttttctgtcacaagaaaagggagagggcacaaagccctctccctctttctgaggtgattgtgtgaatcagatgatattcacattcacgttgctccagttggtagcggtctcggcgttgtccatcacagtgtagtcgtcgtccaccaccagggtgccgtccaccatctgctggtacagggactcgtactcctccacggtgaaggtctcgaagcgccaggaatccgcgccggtgggcagctgcacggcgttgtcggcgacgcccagggaggtctgctggccgccgatggtgtcgaatgtaccgtcatagaccttggccacggcccactgcacggcgtcagccaggcccttcatggcggaggtgacgacgtactcggactcgccggactggtccacgtctacgccgataacatagccgtcattggcggaggcggcggccacgatggactggaacatggagccgccacaggcgaagacgatctcggtgccgttcacataccagccgttgatcatggtctgcagatcagtggaggcggagaagttggagccgtactgccaggagtagttcatgtccacggtgatgcccttctcaagcgccgcagcgttggcgccctggacatagccgtaaccgaaccggcagcaggcgggattggtgccgccgccgccgccggagaagcccagcttggtaaagccgtccatgacggcggcgtaaccggccaggtagccggcctgctcctccttgaaggcgatgccggccacgttggacagggtgttgccggcgtcatcggtcaggggatagccgtcgatgaagacgaagggggtgtcgggatactcgatggcggccttcttcagcgcggcctcctgcaggtaaccggcgcacaccaccacgtcggcgccgccctcgacggcggccttcatggcgtcatagcggtcatcgtcggtggcctcgctgccgttggcgggctggtagtacttgtagctcagaccgttggcggcggcgtacagcttcacgccgtcaaaggtgccctggttaaaggacttgtccttcaactggcctacgtcggtgacgaaggccacctgatacttgctgtcggcggaggtcatgctgtcctcgatggcgtcgggatcggcctcggtctcgccgggggtctcggtctcgggggcaggggtctcggtgttagtgtcaggcgcaggggtctggctgtcggcgggcttgttgctgttgccgcaggcggccaggccgaagaccatcgccaggcacaggagcagtgcaaggagcttcttggacttcttcattgtaatctaccttcctttcagaaaaatagcccagtttggtccagacgattttgtcctcccctccctgagcgtgtgcctttattatactctatcccttcgaaaagggcaaccacctttttacatgattcaaaaaattttttacagaattgttacagatgtgacagacttaaaccgtcctctataaccgtgtttttttcaatacgggtaacgctccgtacctccgcagcctttaccggcattggcctccgggccggccgctccctcctgtaaaattcccagccgccgattgacaatttttaaaattttatatataatgcaaaatataaaatacaagatttgaggtgcgacatattatgccctgcaacaccaaggcccccacaattcggtggttttatttgaccataggcatcctttccatgctcttcgcgggtatcctttacagttggtccatactgaaagcaccgctggccgacgcattcggctggaacgcctcccaactgaccatgaattttactctcaccatgtgctttttctgtctgggcggagtgggcggcggtctgctggccaggcggctgggtacccgcctgaccatcgccctgggcggcgctttggcgtgcatcggctttgtactgaccgcccggctggacggcagcagcctgcccatgctctacctcagctacggcgtcatcaccgccaccggcatcggctttgcctataatgtggtgctctccaccgtgcaggcctggttccccgacaaaaagggcacctgctccggcgcgctgctgatgggctttggcgcctcctccctcgtgctcggctccctggccgacgccctcatccagaatcccgccgtgggctggcgggcggcctttctctgcctgggcgtcgccatcggaattgtgctggtcgcggccgcccttcttatccgcctccccgcccccggcaccgtcctgccccagcccaaggccgccgccaaccgggtacaggaggactttgaggccgccgactacaccaccggccagatgctccgccgcttcaccttctggcgtgccttcctgtgcatcatcttcctggccgccatgggcaacaccgttatctcctttgcaaaggatctctccctctccgtgggggccagcgccgccctgtccaccaccctggtgggcgtgctcgccgtgtgcaacggcctgggccgcatcctcaccggtgccctcttcgacaccctgggccgccgccgcaccatgctgctggccaacggtgccgccatcctggccgccctggtcacgctgctgtccgtggccgtccactccgtccccctgtgcgtggccggcctgtgcatcaccggcatctcctacggcgcctgccccaccatctcctccgcctttacctcctccttctacggcgccaagtacttctccctcaacttctccgtcatgaacttcaacctgaccggcgcctccttcgttgccaccgccgccagcgtcctgctcacccaaaccgggggctacgccgccccactggtgctgctgctggtgctcgccgtggccgccctggcactcaacctcagcatcaagcgtccctgagcctcctcaggccgataaaaagccctccgccgaacggcggagggcttttttgtggtttagttcttgttgtcttccttcatgcgcaggatatacatgccgtcgtgccaggtatccatgtagatgtagccgcggtcgtccaccacgcagtcctcggtggtggccagcatggggccgggtaccgggatatcgaagagcagcttctccgggttgggggggatgaagtaggccagctccttgatgtagtaggggtcggacacgtcatacacccgcatgcccgcgtggaagtagcagcagtagacccggttggggttctggtccagccagggcttgttgctcatgggctcgtggatgttgtgggggccgaaggggccctgggcgccgtccattccggcggtgttgaagttgggccagggatagttctcgggcacctcggggtaggggaactcggccaccagttggggatcggtgggatcggagatgtcgatcatgtgcaggttgttcatgggctgggcgcccttgcgggggccggtggtgagaatctctttgttgtagaatgggaagcgctcgccctcgttggtggccaccaggaagctgcggccgggcaggggcaggcaggtgtgggtgcgggcgccggcgaacttgccggagaaggggcccttcaactggagctggccgatcttcttgggccgggtgatgtcggagatgtccagaatgatgaggccctcgcagtagtaggacagataggccaggttgcccaccacgaacggaggcccgtggagctggggccagtccatgaactcccagtgctgggggccgtccaccgggtactcgccctccttcaggccgtcggtgaactggcagggcacccaccagcggcccacctccaccgggtgggtggggtcgatgatgtccaggatgcggtagatgttgccggtgtagcccgggcagtcggcggacaggtggacgtagcgcccgccgttgtagaagaagcggtggacgcccatgccgttctccacgccggtctcccacttgcccagcagcttggggtggacgggatcggtcttgatgtcgaagatctgcaggctgcccaggctcttgtcgccgggcttgcagccgtggaggaaggagacgccgccgccggtggcgccgatcatcaggccgtcggccacctgaatcttgggggtgttggtggcggggtactccttgggatcgcaggcctccagccagttgaccaccttgggctgggtggggtcggtcacgtccaccacgttccagccggggccgcggaaggagccgcagtacatgtaatagcgcccgtcgtcggtcttgtggagggccatctggaaggcgttgacgccgttcagatcgcagaagcccacgacctccatgttcttgatatagccctggttctccgggcttttggcgtaaaagggaactgacataacgtacctccttggaaatggatccaggcgcacccgaagctggtgcgcccagatcgctgtttgattagggatgggccggcatcttggggggcttccggcacagcgcgatggtcagcggcataccgaaggcgaaggtgatgaacgccaccaccagggccaccacgtaggtcagggggaagctcatcagataggccatgaagaaggcgcccgccggcatggtgtagcccacggccaggaacatcatgacgaggctcatcagcacggccatgacgaacgtaatggaggccacccgcaaaatgtggaacagcaggccgttttcattcttgaccccgcacagccgggcgaagccgtcgcccatggccttgagatcaatgtaggtgccgatggcgaaggccacggcgaagccggggatgaagtccttggtgagctgctgaaccagcggcccccagaggatggcgcccgcctcccggaacatgttactgccgtcgatgtacaagggcaggaagatggcgaacataagcgagaaaatggtgttgaagacaataccgaattgatccttgcggaacatggggaatccctccatccttttgtgtttccggccccccggcgggaggccggcgcgtcgctccgcccggggcggaaggcgcttaacgcatggtgatgtagccgcggaactgggtcaggttgtcgctggtggggatgtcggtgaggaacatgcccacaatgttgaagttggatttcaggaaggggaagcgctcctgctgcgcccagacgggcttgggcagggccttggcgccctccaccgccgcctgataccactcctcggggccgtcgaaccacagctccaccaggcggtggaaggtgcagcccaccacgtcgtggtagatccggctggacaggaagcggttgacctccggccgggcctggaagtaggggacgatctcctcatggaaccagcgctcgccctcctcctcgctgacgccgtcggggtactggatgacgaactgccagcggtagttggggccgtcgcacaccatgcggcccttgcccttgaagtcctcctcccacgagatgggcacatgggcgaagacgaagggagggcagccgttgtcgccgccgatggagcgccccacgtcgccgtccaggttctcgtggggggtctcgtcggtgtcgggcacgcagccctgccagcgcagcacgtccatgggcatatactcggcaatggccttgttgcgcatctcaggctccatctcgttgaccagccagtagtgctcggtcatctgcatccgccgggtgccgaagcgctccccctccgggggcacgggcagggcgttgtagaaggcgtacttggtcacatagggtccgaagttagagatggaatcctgaatatggtggccgtacagccagtgctgaaggcggtggcggtactcctctctgcagacgtccacatagatgacgctgcgcatgggacgaaattccacggacatcccgaaccctccttctcagcccttctcgggcacggtggcggtgataaaggcgcggtacgcggcctggcgggccttgtacttctcggtctgcatgttggcaatcttcttgccggtgttctccttgatgtcgttgccgtggatgaacttgccggacagggtgtcgtgggcgtgctccagctgctcggcggggaaggtgaaggagtacttgccgccctcgttgtggatctcgccctccaggccgcacaggcagcagatggccttgccgtcctgcaggtggaagttgcggctgtggcagtgggggcacacgccggcgtcgccctggtactgggcgtgctcgatgtccttggcggcctcggcgatgttgcggccgatctggtgggcgcgggccacccgctcgtcctccaccaggatggacagcgcccaagggaacacctcgttgtcaatgaccttccacatgggggtcagggccagcatgccggcgtcgcactgggtgcgggtcacccagtcggagccgcccacggacatgaaggagatgaccttgtccttcaggatgcggggatcgggggcggtgccgccggtctcctcggcgatcttggtgccgatgatgttgttgccgcggtccatgcgggggccaaagcggtcggtaatcgtgtggaagaggccggtggcgcccttctcaaagatgggggtggagaagacaatgccgtcggcgtccagcatcttgtccagcagccagtcaaagtcgtccttcagcacgcacttgccgccgcggccgcccagcacgctctgcacgcaggcggtgcagccggtgcagtgctcgatgtgcaggttctgcagctggatgaactctacctcggcgcccatctccttggcccccatcagggcctcgatgcacataccgtcgttgctgccgttgcgcataccgccggaaatacccaaaattttcatctgtacttcctccttctgaaaagcaaaaagtttagtttgccttcgtttcccctgcatattacccgttctttgcctttgtgtaaaatgccggttttgtatggctgaaatgcagctttcgattagattactgcaattcgactccaatcttccatatagaggaatttaacaggttcagtattgtttgttttgcacaaaaataaaggtgtctctctgtggctaaccatgaattgatgcacagttaccatatggctactatctcctaactgcataaaactccgtgcgcacagggcgcactacgaaactatgcaaaggcttagacgcatgaagtctttgcgcatgtgggccgtcccggcccatgtgcgataatctcatggccgtgccgctgtaagcggcacatggccaactttgctatgcttttgcatagcaaacaggtcgtgacaagccgcacgaattttgatatactgatatccccaacttatcgaacgtgtggagggattcccagtgactctaaatcaactggagtgtttcatggtgctggcacagcgtctcaattttacccaggcggcagacgacctgttcatggcccagccggctctgagccggctgatttccgcattggaaaaagagctggaccttcagcttttctaccgcaactcccgcagcgtagccctcaccccggccggcacggtgtttttcaaaaaatgtccgaaaattctggacgaataccggggcagcgtggtggccgcccggctggcccaggagggctatcgcggttccctaaccctgggcatcatgcgggacaccttcgaaccaaagctgcccacactctatcagcgctttcgcacggcctatccccatgtctcgctgcttatccgtggctatagccactccagcttgctgtccgcgctggagcggggagaggtggacgccatcctgaactatatgccaatgccctccgggcaggagtccccctccatcctgctgcacaaaaaccaccagtgcatcatcaccgctttggaccacccgctggcctctcgtggcagcatacggatggaagaggtgaaggacgagccgtttgtggtcatggcccgcaccgcctccattcccggccatgattttatctggaagacagcggctgatgcaggcttcgccccccatgtggtggcggaggccactcatgtgccggttctgctcaccttggtttcctgcggtattggaatctctaccctcagcgatgatatggcctgtctctgccagggcaaggtggcttttatccccctgctgggggttccctttgccaacgtccgcctgatgtggaacgaggacaaccagaatcccgccctgccccacctgctggacgtattccggtccatctgttgaatacagcgcaagcagcagcgccgccgatccgttgggatcggcggcgctgcttactctggcctccattttctgcggcgtgttaccgggccgctttctccttcaggacatactccatcagaaccggaatacaccggtcggtgttccgttgcagacagacgcagacctcctcggcatcccccctccgggccgcctccagcatgccttcaaagtcctccacgtggctgccgcgctcggtaaggcagtcggcatagatataccgcagcagcaactgctggccctgtatggagatcatattcgcatccagccggcgattgccgcagtgcgcgtaaaaggtccccacaaaacggttaaccgccataacctcgctctgcacattcctcgcccgccggtactcctccaggtacttttccagccctgtcacgattgcggcccggtcgccatgcgccatggccaggcggatggccgcacagtggagggtcatggccagctgttcaatctctgtgatgtcgtgctggtccaagtccaggatgtgggcgcccacgttgttctcgtagaccaccagtccctcctgctggagcctgtttaccgcttcccgaatgggggtgcagctcacgcccagctcatcttgaagctcattgacattcaacttgctgcccaagggacgccgcagcgtgatgatatcgccgcgcagcatttcatacacctgatccaccagggagcgctttttgatcgccgccatggtttcgtctccttccatttcatttcttgcaagatattataacagcgtccgctttaaaagacaagcccggccagcgtttttcccaaatcaatgcactcaattttgacactttttccaaacctggtccaccccccttgcaatttaaaaaaagtgtggtattcttaactcataaatcttgcaagatacaaattatatcttgtttgattatgggaggtatccatggcacagcaagcctcagtatccagtctactggatatgacttccagcagcaatgttgttttcctgggcgaggcgggcagcggcaaaagcgagattgcccttaatttcgcccaggcattggcggaactgggcggcaagcccgtccacttctttgacctggacatgaccaagcccctcttccgctccagagaccggcgcgaggccctggaggcgctgggggtggaggtccactacgaagcccagttcatggatgcccccaccctgaccggcggcgtgcggcagcggctgaacgatccgcactgctgcgccgtgctggacgtggggggcgactacatcggcgcccgctccattgggggatatgcccccctgctcaaccgggacggcaccacggtgtattacgtgatcaaccccttccgcccctggtcggccactctggagcacattgaccaggtgctgggggagaccctgggagtctcccatgtggagctggcccggctgcggctggtgggcaaccccaaccttgggccggagaccacccccgccgacgtggcggagggcgcccggaggctctgggagctggtgagcccctacaagccggtggattacctgtgcgtccgccgggagctgtgcgccgccctgccggaggggctgccctgcccggtgctccccatccgcctgtggctgacctatccctgggcgaccgggccggagccggacgcaccgtaagccccctattcaacagtttgcaagatgcaatatgcaagaaggagatgtcagtatggcaaaagtggaaattgtggcggagcgctgcaagagctgcggctactgcgtgaagttctgccccaagcaggtgctggagatcggcacaagcgtcaactccaagggctatgagtacgtggtgcccgtgcgcccggaggactgcatcggctgcgccatctgcggccgcatgtgcccggacggggccatcgagatctacaagtaaggggaggaaggcaatatgtcacgcgtatttatgaagggctgcgaggccatcgccgaggcggccgtgcgggcgggctgccggttctttgccggctatcccatcaccccgcagaacgagattcccgagtatttttcccgtcgcatgcccgaggtgggcggcgtgttcgtccagggcgagtcggaggtggcctcggtgaacatggtgtacggcgccgcctccgccggcgtgcgggccatgacctcctcctcctcccccggaatcgccctgaagagcgagggcatctcctactgcgccgccgcccgcatccccatggtgtacgccaacatctcccggggcggcccgggcgtcggctccatccagcccgcccagatggactacttccaggccaccagggccagcggcaacggcggcttccagatgatggtcttcgccccctccaccgtccaggaggcggtggacatgacctacgccgcctttgactacgccgaccgggaccgcaacccggtgctcatcctggccgacggcgtcatcggcaccatgatggagccggtggtgctgcccgggatgaagagcgaggaggaggtggccgccctcaaggcgtccaagcagggctgggcctgcgtgggccacaagctggactacgcccaccgcgcctggatccagccgggccactggctgaccagcgacatgcagaaggccaacgaggatgccgccgccctgtacgagtcctggaagaaggatgtgcaggtggaggagtaccggctggaggatgccgaggtggtgctcaccgcctacggcatctccgcccgcatctgcaagtccgcggtggagctgctccgcgcccagggcgtcaaggccggcctgatccgccccatcaccgtccaccccttcccctacgccgcctacgaccacattgactacagcaaggtgaaggcggtgctggacgtggagatgtccatccccgcccagttcgtggacgacgtggcggtggctgtgaaggaccgctgcctcatcgagacgtgcctgtgctccggcggcaacatcatgagccgcgacaaggtccttgccgcggtcaagaagatcatggagggcaagtaagatggaaaagatctacggaagaacaaaaaccatccaggaggacaaggtctccggcttctgccccggctgtatgcactccaccgtcatcaagctcatcggtgaggtgctggaggagatggatctggtggaccgcgccgcctgcgtcctgggcatcggctgctgcggcctgcacatggactatatcgcctacgacaacaccaccgcgccccacggccgcgcctgcgccgtagccaccggcatgaagcgctccaatccggacagcctggtcttcacctaccagggcgacggcgacttcgcctccatcggcctggccgagtctatttccgccgccaaccgcggggagaacatcaccgtcatcttcatcaacaacggcatctacggcatgactggcggccagatggcccccaccaccctggtgggcatgaaggcctccaccgccccccacggccgcgatcccaaggagcacggctatcccatgcacatgtgtgagatcctcaaccagctcaccgcgcccgcctacctggtgcgcaccagctgcaacacccccgccaacgtcaacaagaccaagcaggccattcacaaggccttccagaaccagctggacggcaagggcttctccatggtggagatcgtcaccagctgccccaccaactggggcctggatcccatgaagtccctggagtacatcgaagagaagatgctgcccgagttcccgctgggcgtcgtccgcgaccgctaaaggaggagagcgaacatggaaaccaatctctgcgtggccggcttcggcggccagggcgtcatgaccctaggcaagttcctggcggacgccacctgtaattccaccgacaagaacgtcaccttcttcccctcctacggcgccgagcagcgcggcggcaccgccaactgcttcgtggtcatctccgacgaggccatcggcgcccctctgggcgacgtgatggacgatctcatcgtcatgaacggcccctccctcaagaagttcatcggcaccctcaagaccggcggcaccctgttcatcaacagctccatcgtctccgacgacatcggccgggacgacgtgaagctggtcaaggcccccgtcaccgagctggccctggagatgggcaacgccaaggtgctcaacgtcatcatgctgggcgtctacgtgggctacaccgaggtcatcgaccccgccatcgtctggcagaccatcgagcacaagctctcctccaagcccaagctcctgcccctcaacaagcaggcctttgagaagggcctggagctgggccgcgcccagaagcagtaaggaggaattcggcatggtatttcacaattttgacgagctgatcgcccacgtgaagggccagcccagccgcgcccgcatggccgtggccgcggcgggcgacgcccacaccatcgaggccgtcctgcgcgcccgggccgaggggattgtgacccccatcctggtgggcgacaaggcggtgatcgaccaggtgctggcggagctgggcgagcacatccccgcggaggacatccacgacgagcccgatctggcggaggccgcccgcaaggcggtggccctggtgcgggcgggtgaggccgacttcctgatgaagggcaagctggacacctccgtgctgctcaaggccgtggtgaataaggagaccggcctgggcaagggcggcgtcatgagccacttcaccgcctttgaaatccccacctatcacaagctgctgatgccggtggacggcggcatggtgacctatcccaccctggagcagaagaaggccatcatcgagaacaccgtgggcgccctgcgggccatgggctacgactgccccaaggtgggcgtgctggcctgcgtggagaagctcaaccccaagatgcccgagaccgtggagggcgacgccctgaagcagatgaaccagcggggcgagctcaccggctgcgtggtggagggccccatctcctacgactgcgccgtcagccgcgagatcgccgccttcaagggctttgaaagcccctgcgccggcgactgcgacgtgctggtggcccccaacatccacgccggcaacatcatgggcaagatgctcaccgtcacctgcaaggccaagatggccggcttcatcgtgggcgcccggtgccccatcgtcatgaccagccgcggctcctccgccgaggagaagtacctgtccatcgtcatctccgccgcggccgcccggaatcagtaaggaggaaccccaatggagcgacttttgattctcaaccccggctctacgtccaccaagctggccgtctttgacggggaggagcccctgttcgtggagtccatcacccactccgccgaggagctcgcccccttcgactgcgtggccgaccagtatgaattccgccgcgagctggtgctggactgcctgaagcggcacagcgtcccgctggactccctcaccgccatcgtctcccggggcggcctgctgacccccatcgaggcgggggcctacgaggtcaacgacgacatggtgtggcagctcaagaacaagccccagaacgagcacgcctccaacgtgggcgcgatgatcgcccgttccatcagcctccaacttggcatccccgcctatatctacgatggggtcacggtggacgagctgctgcccattaacaagctcaccggcctgccctccatgcgccgcaagggcatgggccacaacctgaacacccgcgccgcggccctgcgctacgcccgggagagcggcagggactacaaggacatcaccgtcatcgtagcccacctgggcggcggcatctccgtcaacctgcaccacaacgggaagattgaggacttcatcaacgacgaggagggccccttctcccccgagcgcgccggcggactgcccatgtttgacgtgattaaggaatgcttcagcggccggtacgactacaagggcatgatgaagctggtgaagaaccagggcggcctgatggcccacctgggcaccactgacagccgcgcggtggagcagatgatccagagcggcgacgcccacgccaagctggtctacgacgccatgatcctcaacatcgccaagaacatcgccaagtgcgcccccaacgtgtgcggcaaggtggactccattctcctcaccggcggcatcgcttactcccagtatgtcaccagcgagattgagaagcgggtctccttcctggcccccgtggtggtctaccccggcgaggacgagatgcgctccctggccctgggcggcctgcgggtgctccgcgggcaggaaacggccaaaatttttcataaatcagagtccgctaacggatagaatgattctgactgcttcaatagtggagccggatgccgtaccatcggtatccggctccatttttctaagaatatctcctcccatctctatcagccatcaggcaggggacgccgcgaaagatccgctggttttcagcttcctttcagcttcgttctgtattatgatcagaaagacacgtgggacaaacgcaggagggacagtgttgaaaattttgattatagaggacgaacagctgctggccgactccatcgccgaggtgctgcggcggaagggctttgaggcggaggccgtctatgacggggagaccggggcggaatacgcggagctgggcgtctacgacctgctgattctggacgtgatgatgcccggcctggacggctacaccgtggcccggcaggtacgcgccaggcatctaggcacccccattctgatgcttaccgcccgctccggcctggaggaccgcatcaccggtctgaacgcgggggccgactactacctcaccaagccttttgacacccgggagctgctggcctgcgtcaacgccctgctgcgccggcagggcgcccaggtcaatcagctcaccctgggcaatacatctctggatctgtccaccgccgccctctcctgcggggcggacagcatccggctgtccgccagggagttcgacatcatgcggctgctcctccaggcgggcgagcgcaatttgtccaaggcggccctactggagcgggtatgggggtacgactccgacgcggtggaaaaccatgtggaggtctacgtttgctttctgcggaaaaagctcgccagcatcggctccaacatccgcatcgagtccatccgccggctgggctaccacctggaggtgagcggcgatgattaagcggctgcgcctgaagttcattgtcatcaacatgggcatcgccaccatcctgctcagcgccatactgggcctggtgttctacttcaccagcgccaatctggagaccgagagcatccgtatgatggagcgcatcgccagccagccctttcaaatgaacgcaccgggcgagctgggggaggacgtgcgcctgcccttcttcacgctgcagctcggcccccacggcgagctgctggacgccagcggtggctactacgacctgtccgacgacgcctttctgggcggcctggcccaggccgccgcggcctccccccgccgcctgggggtgctggaggagtataacctgcgctattaccgctccgacgcacccatgagccgcttcctggtgttcgcggacatctccagtgagcgggccacgctggacggactgcgcagaacctgcctcctgatcggcggtctgagcttcctggccttcctatgggtcagcgttttgctctccaagtgggcggtgcgcccggtggagcgggcctggcagcagcagcggcagttcgtcgcagccgcctcccacgagctgaaaaccccgctgaccgtcatcatgacggatgcggagctcctgcaggacggaggccaggacgcggccagccaggccggctttctgtccaacatcctgaccatgtcccgccagatgcgcgccctgatcgagcagatgctggagctggcccggacagacagcgccgaatcccaccttgtgctccatccggtggatctcagcggtctgaccgcccggagcctcctgccctttgagccgctgttctttgagcagggcctcaccctgatctcccaggtggacgaggggatcaccgtcagcggcgatgaggaagcgctgcggcgggtgctggagattctgctggacaacgcccaaaagtactccagccccggcggcgagacccaggtagctctccaccggagggggcggaatcactgtgcgctgacggtggccaaccagggggaaccgatcccgccggaggcccgccgccagatcttccagcgcttttaccgcgctgatccggcccggagccggaatggcagcttcggcctggggctgtccattgccgagggcattgtggcccagcaccacggaaccattgacgtaacgtgtgccggaggctttaaccgcttccgggtggagctgccctgccggcaggagtagcggcgccggagtaagcgcgtctggaaatcagagatacaggaggcatgtgtatgaaatttgcatttttgatcctgggggacttctgcccggagaccgaccgggcggccatacacggcggagcggcgcagatgcgcggcgtctccaccctggagggcgcctgtgcggccgcgcaggagctgctggagcagggcgtcggctgcatcgagctgtgcggcgccttcggcccggacggcgcgcggaggatcatcgaggccaccggaaaccggatcccggtgggatatgtcacccacctaccggagcaggaggccgtctaccgcgccgctttccccaatgactgaccggagcggcactccgaacgaccgcgcgagggtgcggcccagcggggccgcaccccagcctgtcgaaaaggtcttttcgacaggctggggggacattttgaaactctgaaaacgtttcaaaatgtcgcttgatccaacgcgaacggcccaggccggtctctcttggcctacggccaattcacctccagggaaccctgacggttccctttcacactatccttccctccgaacgctttagcaggagggtttatggacagcctgagggtgcggcccagtggggccgcaccccctttttgtcctccggggaaccgggctttcagcgtcgtttcagcattcctctttataatgacctcaggtgccatgcactcaaatggaatcgaggaggtcaaccatgatcacagtggaacacctgacaaagtgttatggagatttcctggcggtggacgatctctcctttgaaatcgaggaggggcatgtatacggctttctggggccaaacggcgctggaaagtccaccaccatgaacatcataaccggctgcctgtccgccacaagcgggcgtgtgcgcatcgacgggcacgacattttcgaggagcccggcgcggccaagcggctcatcggctacctgccggagcagccacccctctatctgaacgagaccccagtggaatacctgcggttcgtaggcgaggccaaggggctgcggggcggggcgctggaacgccagatcgcggaggtggtggaacagaccaggctcaccggcgtgcgccaccgctgcatctccgcgctctccaagggctaccgccagcgggtgggtatcgcccaggcgctgctgggcagccccagagtcatcattctggatgagcccacggtggggctggaccccctccagatcattgagatccgggagctcatccggcagttgggccagacccatacggttctgttcagctcccacatcctgtccgaggtgcagaccatctgcgatcagatcctcatgatcgcccacgggaggctggcggccttcggcgcgcccgacgagctggagagccgcctgctcacccccaacgagatcaccctgaccgccgaggggacggaggagcaggtgcgcgcccttctggacggcatcggcgccatcaccggccggtccatcacggcggaggagggcggtctcgtcaccgcgcacctcaaaaccggacgggaggcaagcctccacgacgtctcccgcgccctcttcttcgcctttgccggggcgggggttcccctgctggagatggcgctgaagaaggccaatctggaggatatcttcatcgagctgacggaacagagcgcggaggccccggccgccgcggagggagaggaggggcaggcatgaccgctgtattcaagcatgagctgagaagctattttcactccctgaccgcctatgtgttcggcgcgttcctgctggccttcatcggcatcggcgccatgctctacaacctccaggccgcggtcagcaacttcgagtacgttctcagcttcgccagcctagtctttgtggtcatcgtacccgtgctgaccatgcgggtgctggcggaggagcgcaggcagaagaccgaccagctgctctactccctgcccatcaccaccgtgcagatcatcgccgggaaatatctggccctgctggtgctgtacctgatccccctggccatcatcgcggtctatccgctgatcttcgcccagttcggcgacgtctatctgcttacctcctacggctccatcctggcctttttcctgctgggcgcggccctgatcgccgtgggggtctttctctcctcgctgaccgacaaccaggggctggccgccggcctgggcatcgcggtcattctgctgaactactacagcgtcagcctctccgagtatgtctcctccaccccggtgggggcgctggccgccctgctggtgctcattctggcggtgggtgccgtggtgcgctatctgacccgaaacagcaacctggcctacggcgtctgtctggtgctgctggccgcggtggcggccctgtacttcgtggacagcaccgccttcgagggcctgctgccctcggtcatgtccgccctctccctctttgagcggttttacacctttgtcaacggcgtgttcgacctgacggccgtgttctactacctgacggtggccgccctcttcctgttcctctcggtgcagtctttggagaaaaggaggtacaactgatgaagaagcggccgaatgcaacaccctccggcccggcggggcacagccgccaggcctttcagggcggaacctactctctgatgctgacggcggcggtgctggcgctgctcatcgtcctcaatcttctggtgagcgccctgcccaccagcctgacccagtacgacatcagcgcctccaagctctactccgtcaccagcaacaccaaggtggtggtcaacgcgctggagcaggacgtgaccatctactggatcgtgcagtccggcgaggaggacgcggtgatcgaaaacctcctgggcaaatacgagagcctgtccgaccacattaccgtggtcaagaaaaaccccgacgtctaccccaccttcgccgagcagtacaccgacgaggcggtgaagaacaacagcctggtggtggagtgcggggagcgcagccggtttatttcctacgacgacatctatctgtccgagccggacatgtacacctactcctacaacacctcctttgacggcgagggcgccatcacctcggccatcgattatgtggtcaacgccgagcagccccagctctaccggctggagggccacggcgagagcgagctgccctccaccttccaggatcagctggagaaggcgaacatggagctgcacgacctctccctgctgaccgtggacgccattcctgaggacgccgcctgcctcctcatctacgcccccaccagcgacatctccggggaggagcgggatatgctcgccgactatgtgaccggcggcggcaagctgctggtcatggccggcccggtggatggcgcctccctggacaacctctacagcctcctgtccgagtacggcgtgacggccaacgaggggattgtgatcgagtccgaccgggagcactacgccttccaggcgcccttcgccctcctgcctgacctggcctccagcgccatcaccgactccctgatcgacgagcgctacttccccatcctgcccctctctctgggcctcaccgtgggggaggacaccaacggcgccacggtcacccccctgctcaccacctcggacgcctcctacagcaagctggccggctacgagctggacacctacgacaaggaggagggggatctggacggccccttcaccctggcggtctccgtggaggccggcagcggccagatggtgtggttctcctcctccgccttcctggacgacaagtataacgccctttcgtcgggggccaacgtgaacctggggatgaacgccctgtcctccctggtgggggagagcgaggccatggccatccgcagcaagtccctgaactacaactacctgaccatcagcgagtccacctcctccctgctgaaggtgctcatgatcggcatcgtacccctggcctacctgggcgtcggcatcgccgtggtcgtaaagagaaggaggatgcagaatgaagcggtataagcggctctatgtggtgctggcggtgcttctggcggcctgtatcgccacctttgccctcagccggtacaaggcccaaaaggagcagatccagaccagcggggagaccatcctctccatctccgccgacgaggtggagagcctctcctgggactacgacgggcagaccctgtccttccaccgggacggagcctggagctacgacgacgacgcggccttcccggtggacgccgagcagatgaacctacttctggaacccttcgcggccttcggcgccgcctttatcatcgaagatgtggacgatctggggcagtacggcctggataacccggtgtgcaccatccgcatcaccgccggcggggagactcatacaatccaactgggggactacagcaagatggacgcccagcggtatgtctccattggggacggaaacgtgtacctggcggcccacgaccccctggacgagtttgacgtgaccctggacgagctgatcgaccaggacgacatccccgccttcggccaggtgtcggagctgcgcttctccggcgcggagaactacgccgtctcctaccaggaggacggcggcaacacctaccgggaggacgatgtgtacttcaccgagcgggacggggcgcaggtcccgctggatcccgaccgggtggaggactatctccaggccatccagtccctgtcgctgacggactgcgtgacctacagcgccaacgacgacgatctccagtcctgcggcctggacagccccgagctgaccatcgaggtcgcctacgacggagaggacggggcctccggcacctttacgctgaacgtcagccgcgatccggatgagcgggcggcggaggcccccgccgacggggagagcgaggaggaggtcaccgcctacgcccgggtgggccagtccaagctgctctatcagattaccggcgcggagtacgaggcgctgatggccgcctcctatgacgctctccggcaccaggaggtactgcccgccgcgctggaggatatcagccaggtggacgtgaccctggagggcgagacctgcaccctcaccgcggcggacggcgcggacgggccggccttcgcctatcagggcgagacgctggagaacaccgattttcagagcgccctccaggccctgaccgccgtgtccttcaccgatgaggcccccacgggcaaggaggagatcaccctgaccctccatctggagggggagggctccccctccgtccagatcgccctctaccgctttgacggggagaactgcctagccacgttggatggcaaaccgctgtgtctggtggatcggagcgcggcggtggcgctcattgaggcggttcacgccattgtgctcaactgaacgccatacggaaaagaggccccggaatcacttgggattccggggcctctcagcttcttgtcaaattcttgtcaaacgaattgtctgctccggcgcggacggtccgggccggtgggctgtccccgcagcttacgctccggtcccgcccgccacggccagcgccgcggccttgatggtggccaccgccgcggcaatgcccatatgactgctgacgcacaggtcatattcccggctctggccccatttcccggtggcaaagtagttgtagtaggaggcgcgggccctgtcctggcggagcacataggcctccaggttgggctcctggacgccgtactcctctcgggcccggcgcacccgctcgtccagcggagcgtgcacaaagacgctcagccgcctggggtcgtcccgcagaatgtagtcggcgcaccggcccacgatgacgcaggactccctggacgcggcctccttgatgaccttggcctgggcaatgaacacctggtcgggcaccgacggagtctgtaccgcggtgtagaggtcgtacaggaagctgttggtgggacgttgatgctcggaatcccggatgaaattctccgagaatccggtcttcctggccaccgccgtgatgagctccttgtcgtagaaggtgatacccagctcctccgacagctgcttggcgatgagccgcccgccggaaccgtactcccggccgatggtgatgacaacgtgcttcataaggacacctcctatcctgattttattataatacaaacccgccggttcgtcaaagcggattttctcaaccccagccgaatgtcccgccggcagagtacttggagggcagtacggtgtcgatggcgattttgtccacgtccccgttctcccacaggcggagcagatcgtcagcctcggcgtacaccagcgcgccggtcacctccacgccgttggcctccacataggcggcggcctccgcgaaatagctctgatagtagtccgcccagacctcgccccccagcagggcctctattgcctgaggccggtcgttcacataggccaacaggctgcggaaccgctgttcataggccacgcccacggcccgctccagactggcctgggcccagttaaacatgggatagtcctcccagtcgggactgaagccgctgccccgcgcatccagcatggggaatcccagcatgctctcctcccccgtacggacgcccgcccacagaaagcggataccgctgtactcctgctgctcctccagccagtacagctttacggggttcagatgctccggaaaatgcacccacgccgccacataggaggtgccgggcagctcgcgcaggtagtcctgggtgtggcggctgaattccagtttatcactgacgcgcccgctctccgccgactccataatctccagaatactccgccccggactggagtgcccccagaatccgtctgcatgggggcccagctcgccgctccgctggctcgtctccccggtgagccacgcctccgtctccaccgtgagggtgtagcgcccgaacccctccggctgcgccgaggcggctgtcaccgtcgcccccggggcgagcaggctgtaaagggcagtaagatccaccgccacgtcctgactctccacgcgcagatggcgctccacctcctccggcggcaggtctccgattctgatcacctccacgccgttctcctttacaagagaggccggcgcgcgatcttccattccgcccaccgtgtaggcgtttggctgatagtacagggaggacaccagggggccgaccacgaagcgcccccccagcaggacggccagcacgatgcaggccgcccacaccgccgtccgccgcaggcggcggtttaccttcttctgaatatgccgtacctctccggcgggggcctgcgtctccgccgcccccagcgcgtcctccacctgctcggccaggtagtcggcaatggcctcgctcttctccagctcggcctccaccatggcccgctcctcctcgctggcctgcccggcccggtatttgtccagcagttcccgaaatgtcatatctgtccctccaatctgctcttcagcttcttccgcgcccggcacagcagggtgcgggccgctccgggggtgagtcccatggcctcccccgcctccttcagggagagccctccgtagtagtggagggtgacgatctcccgatccaccggggagagggcctgcaccgcccggtagacggcccggcgccgctcctcctggagcaactcctccagcacgtctccctccgccgccagctctgggccgggcggctccggggccaggcggcggctgcgccgcacctgatccagccacaggttgcggcataccttatacagccagctccgccacccggcgtccgccccgtccagggccagcagggcgcggcaaaaggcctccgcggtcagatcctgggcctgggcctcgttctggcacagggaataggcgtagagatacagctctccggcatagcgccggtacagctcctccagcgtgcgcggctccactccgctcccccctttctgtctattcaacgtctcagccgaaaaaaggttacactttctccggcatcttgcatcactcaattcattttttgcaaaacagcccaattttccggtggctttcccgtcatttttgcaattttatttttttctcttgcatttttagagaaaacagattataatagctccatcgtggaagcgcggggcctctcccccgcgttcatcgctcaaattcggccgcctgccgggcaggcgccacgcaaaggggtttggcaatatggcatttacctttaccaattcgtatctccagggtgtctatgaagatgtctgcaaaaagaatgcccacgagccggagttcctccaggccgtcggcgaggtgctggagtccctccagcccgtggtggagcagaaccagcggctggccaagtccggcgtcattgaccggattgtggagccggagcgcagcctgctgttccgcatctcctgggtggacgaccacggccaggtacaggtcaaccggggctaccgggtgcagttctccaccgccatcggcccctccaagggcggcctgcggttccacccctccgtcaacctgtccatcatcaaattcctgggcttcgagcaggtgttcaagaactccctgaccggcctgcccatgggcggcggcaagggcggcgcggacttcgaccccaagggcaagagcgacaacgaggttatgcgcttctgccagtcctttatgaccgagctgcagcgccacatcggccccgacaccgatgtgcccgccggtgatatcggcgtgggagcccgcgagattggctacctgttcggccagtacaagcgcatccgcaacgaattcaacggcgtgctcaccggcaagggcctgagctacggcggctccctggcccgcaccgaggccaccggctacggcctgtgctacttcgccgacgagatgctcaaggccgccggaaagtccttccagggccagagcgtggtgatctccggctccggcaacgtggccatctacgccaaccagaaggccaccgagctgggcggcaaggtcatcgccatgagcgattccaacggctatattgtagacgaaaacggcattgactacaaggtgatccaggagatcaaggaggtcaagcgcgcccgcatcaagacctatctggactatgtacccactgccaagtatttcgagggctgccagggcatctggacggtaccctgcggcatcgccctcccctgcgccacccagaacgagctacccctggagggggccaaggccctggtggagcacggctgcttcgccgtggccgagggcgccaacatgccctccacccccgaggcggtggcctggttccaggagcacggcgtcctcttcgcccccgccaaggcgtccaacgccggcggcgtggccacctccggcctggagatgagccagaactccatgcgcctgagctggacctttgaggaggtcgatcagaagctgcacaccatcatgcgcaacatctaccacaacgccgccaacgccgccgccgagtacggcatggagggcaatctggtggccggcgccaacatcgcgggcttcatgaaggtggccgacgcgatgatctggcagggcgtgagttactaaaaaggcttctgccttctgagacccgtcggccaccggaaccccatcgcaagatggggcggcgcg

SEQ ID NO: 4369 - DNA, 1496 bp, Unknown
  gut microbiota DNA sequence
attttaaggacatcagcccctatgcccttatcaagctggcgaagttttacagcgtgaccgccgattacctgctggggctgtccgaaacaaaaaatcacccaaacgccgatcttgcagacctgcgtgtgagtgatgatatgattgaactgttgaaaagcgggctggtggataatttcctcttgtgtgaactggcggtacacccggatttcccccggctcatggctgaccttgaaatctatgtgaacggaacggcagtcaagcaggtacagagcgcaaatgccattgtggatattatgagcgcaaccattatgaagcagcacaatcccggcttgtccgacccgcagctaaggcagcttatcgccgcccatattgacgatgacagcttttgccgctatgtaatacagcaggacataaacggcatagcccttgacctgcgggaagcccataaggacgattttttcagcgtcccggaggacaatcctctggaagattttttgcaagccgcagaagcagcgtccactccgggcagcgacccggaacaggcggcgatggcgtttatctgtaaacggctcaagctgaactatgggaagctgtcggaggaagaaagaaagtggctgaaaaggattgcgcagaagtcggacttgctgaaaaacccaaaaccgcagcgggggagaaagtaaagggataaatcgggatttggcaaaggcgtgtatatgaaaaagtaacttccagtttgcaagagaaaggtatggtgagcgaatgagaatattatacgaactttcatggttatgggagatgctggttattgcgcttgcggttgcggctgtttgcgtggtttgcgccatgctaatctgtaaggcagtaaagaagaacctcagcaaaaaaacggcggcagttatcggcgcagcagcgtttgcgggcgctgttttggcagtcattgtgattgcccggactccgatgccgctttgattaaacgggatgcttgattgcctgtgcataagtacaacttcaagtttatcggggaaatagcaaagccctaaaacggcttcccgcccatttcaattttgagagaaaaatccgtctgttttttcgtgagtgtgtccacaagttcgggacattttgtcccgaagtccggcgtgggacgaggaacgggggctttcatatacgccctgtctgctgataaaaccagtcctgcgtttgcggctccacgccacgcaatcacagccctgctttcctgccgcttcaaatgcccttgccctctccggcggcaacggcattttcacggcaacgccgacagagcgtataacacactacactttgcgagcaaagtcgtgtgccaaggggcaagcccctttggaaacccctgacaacaaaacaggctgaatatcccgcactttcccggtgcttgatactcagcctttatttgttgtcagcagcccccgtttcgtggtctgcgtgtagttccttgtaaactgacctaatctgcctggtaatta

SEQ ID NO: 4370 - DNA, 134301 bp, Unknown
  gut microbiota DNA sequence
cacggaagttaagctcacctgcgccgaaaatacttgtctggagacggaccgggaagataggtaacgccgacacagaaaacggacttcatatgaagtccgttttttcttttcttgaagaggagtgagagagcgtgcattattcaggggtgcggcgcggggtgtttgtggatcgcccgaaccgctttatcgcccatgcggagctggatggccagcgggtggtctgccatgtcaaaaataccgggcgctgccgggagctcctcactccaggggcagtcatctacttgcaggagagcgacaacccaaaccggaaaacccgctatgatctgattgcggttgagaagggcgggctgctgatcaacatggatgcccaggcgcccaatcaggtattccgggagtgggccgaaggcggcgggttcctgccggggttgtctctcctgcggccggagacgacctggggaaactctcgctttgatttttactgggagttatccaccgggcggcgcggttttgtggaagtaaagggcgtcacgctggaggaaaacggctatgcccgcttccctgacgcgcctacggaacggggggtcaaacatctggaggagttgatcgcttgtcgggccgagggctatgagacggcggtgtgctttgtgctccagatgtccggcatgcgggaattcgcacctaatgatgacactcatccggcctttggtgcggcgctgcggcgggctgccgcagccgacgtgcagatcctggctcgggagtgcatggtaacgcccgactccatgacgatcgccggagcggtgccggtccgactgtagggctggggcctgtcaatgaatgggaaggagagcaggcttagagctagcctttaaacggagcaaacggggagccgggaacggctcctcttttttgcttgacttatatcgaatatcggtatagtatgattatagcgatattcgacatataagaaggtgagcgcgtggcccgaaaaaggctggaaaccctgaccgagcagatgttttatgttctgctgtccctgcgtggggaacggcacggctacggtatcatgcaggccatcaccgagctcaccggtggccgggtcagcgtgggggcggggaccttgtacgctctgctggagcgctttgagaaagacggactcatccgccgcacccgtacggaggacaaccggaaatactacattctgatgccggagggggagcggacccttcaaaatgaatatgagcgtatcaagaagcaggcggcggacatggagcgggtgcttcaaaaggaggaagagtcatgaagcggcgtttttccctgtttacctatccaatgatggatatgaaggcggcggaggctgaactgaaccgccgggcggcggcgggctggacggcggagtggtgcaggagacaactgggggccgctgggcaaccgcctctggaggggtatgagggtgtgtggcacatccggagcggggagcgaacggagacggctgaccggggagaatcgggatgggtgcttcagcgggggaatacattgtttcggatgaagggcggcgcgcttccagacgagatgtggctggacgaagtgctgtctaggctggagggagagacatgaggaagcaaaagagtatccgctggttccgctacaccgtcgaggatgccaaggcggcccaagcggagctggacgagcaggcggagcggggctgggagctggaggaggtggggctgtttaccgccaccttccggcgtgcggagcgcccccgccggtgctgggtggagcccgcccggtggaagagcgagcggaaaaaggactgggatgcccggtcagactatctgaccctctgcggggaggccggatgggagctgctggaggaggacgggggactgttttacttccgggccaaagaggggaccgaccccgctccgctccagaccgacgaggatgtagagtgggcggacgtgtggaagaaggccctggccgaccaggtgtggagcctgtcctatctggccgtctattggtccatctggaccgtaggggggtacatcagggagcacccccgcatgtgggagctgttcctgtccaatatctccatggccatggcgacccttgtgctgttgtggctgggaatggatctgtttttcgtggtgcgggtgctccgctaccgggcaaaatgccgccaggtggtggcagagggggagccctttcccgtaccacggcggtggggagccagactccgggggatacgcccgctgatagagggagtgctgattgccgtcctcgtcctgtgcctcctgttgagcgttggagaagggcagaccaattatatagacggctattccgcctatacaagggaacagaactccatcgcggccgcatccttcgagtattgccgctatgatcaggaggaaggcgatttgtgggtggagcggatggactgccgcgccggctggctggcggagtggatctgtgaggatttccgggctgcggaaggggacgaaaaacgacttcagcgggaattccaccggcacaggccgacggctctccgggcggtggagctggggttcgaccgggcctggagctattccagcggggaatatgagggcctgattttacgaaatggaaaccaagtgctccgtatcgagggcaatcagattgacctgaccggtgccaaaaccctggcggacatccgcgcctggctggcggaaggggcgtaggggccgatacccacaggcccccgggcgggtgagggcacctgcccctacaggggagcaaatccggcggcagcgctccggcgtgccgccggaaaagcgcgggcggccacaagggacgcccctacggggcgcatatcagactgcggcgtagggccgatgccccacacaagaaagggggaagaatgatgaagaggacgatgaggaaatggttctactttgatgggagcgatgccaagacggcggaggcgtggctcaatcggctgggggcggagggctggcggctgggcagactcagcacatggacggcatgcttctggcagacgggggagagggtacgctgcgccgtgacgacaaggcggcggggggatgaggaattccgcgccctctgccggaacgcgggctggggacttggctcagatggccgggaggctagtggaggcttgcatcccgccatgccctgtgataggataggagcagactggaaatccttctctcaggagtgtgaattacgatggaaaaccttctctttatcaacgcctgcgtgcgtggagagcgctcccgcacgctgaagctggcccggcgctttctggaggcctaccgggcgggccacccggatacggtgatcaccgagcgggatctctgcgccgaccggctccagccccagtacccggaggtgctggccgagcgggacgcgctttggagcgcgggcaagctggagcagcccatgtttgagcccgcccggcagttcgcggcggcggataagctcgtcattgccgcccctttctgggatatgagcttccccgccatcctgaagatctacctggagcgcatctccgtcaccgacctcacctttggctacagcgaggagggggccatggtggggctgtgccgggcctccaagctgctctatatcaccacccggggcggcaactacgccggcacccccatggagacggccacccccgtgctgaaggccctgtgcactatgtacggcatcccggagttccagtgtctggacgccgaggggctggacgatatccgcaacgacaaggaggcgcttctggccgacgccgcccgccgtgcggaggccctggcggaggtgttctgagtgcggccccacatcctgctgctgaccaccgggggcaccatcgcctctctgcccacggcggagggactggcccccggcctggacggggaggccctggccgggctgctcccccagggaattatggactgctacgacatcacgatccgggatatcctccacctggactcctccaacatccagccggaggagtggcagaccatcgcccgccacgtctttgaaaaccggatggagtacagcggcatcgtgattacccacggcaccgacaccatggcctacaccgcctcggtgctctcctttatgctgcggggcatctccatcccggtggtgctcaccggggcccagctccccatggcccaccccctcagcgacggcatggagaatctgcgcaccgccctggccatggcggcctccggcgtgccgggggtgttcctggccttcgaccggaaggtgattctgggctgccgggcggtcaagacccgcaccaccgacttcgatgcctttgagagcgtcaactggcccctggccgccaatgtggacggcaaggggctgcagatccaccgggaggccatccccgcccccgccggagcgtgcgccctgcgggacaagctgtgcgacaaggtgttcctcatcaagctcacccccggactcgacccggagatcttcgacatgctgctccagatgcactaccggggcatcgtcatcgaggccttcggcgctggggggctgcacttcgtccggcgggatctgatcgccaagctccaggcggccgcccgggcgggcatgaccgtggtggtgtgctcccagtgcctctacgagcccagcgacttctccgtctacgaggtggggcagagggctctggcccagggggtgatccagggccgggatatgaccaccgaggcggcggtgaccaagctcatgtgggtgctgggccagaccggcgatccggagatcatccgggactacatggagcgctccctggccggggagatggcgtaatcagacagcgcgcggaaagggccctccgccgccggaacttccggcggcggagggccctttttcaagattgtgaagaggaagcggagctgctctgggccagataccactccccccagcggcacatctcgtccagaatgggggcgaggctccggccgaagtcggtgaggctgtactccgtcttgggcggcaccaccggatagacggcgcgccggagcaggccgtcccgctccagctcacggagctgctgggccagcatcttgtcggtggcccgcgggatgcgccggtgcagctcgtggtagcggagggtgcccgcgtccatcaggtgccagaggatcaccgctttatattttccgcccacaaggcgcagggtggcctcaacggggcaggtaaagccgcagcaggggatttccataggggagctcctttccatttgggtagtatctacccgaaaagtacattcttgcgcggaagatggattcggatataatgatagtacaggccggcctgaaatacaacctcgtaaaggagtatccgagatggactttttgaaattggttcgggcgcgctattcggtgcgccaatatcagaaccgtccggtggagccggaaaaggtggagcagcttctggaggcggcccaggcggcccccaccgccgccaattgccagccggtgcgcctgctggtggtggagacgccggacgggcgcagacggctggccggggcggcggagctctacggcgcgcccctggcggtggtggtgtgcgccgaccggagccgggcgtggaagcggccctttgacggcaagcagaccacagacatcgacgcgtccatcctcaccgaccacatgatgctggcggcgtcggccctggggctgggctcggtgtggatctgttacttccagccggaggcggtgaaggcggcccttggcctgccggagcacctggagccggtgaacattctggccgtcggatacgcggacggcgcgcctgccagcccggagcggtggcggacggagcgcattccgctggacgaactggtgctggcgcgggcataggcggacaccccagggatggtcattccatccctggggtgttttggtttttctgctgtgcaagaaaagcggcgcactgggcggggctgcggaagatatgcgcctcgcccttccagccgtccagaagctccagcacccggggccgctgggtgcggtggaagtcccagatccagcggatgaacgccgggtccagccgctccgggcagccctcggccatgtcggggcgggtgcgcccgcgccagcgcaggatccgccggagagcccggaacaggcagagccgcctggggtagtccagaaagagcaccgcgtcgcaccgctccagccgccggggcagggtgcgcaggtagttgccgtccatcacccaggcgtcccccgccagggccgcgtccagccgggcgtcgaactccgctcgagtgcggttgatccagccggacttccaccacagccggtccagatacacggccggcaggcccagcgtttccgccagggcgcgggtgagggtggacttgcccgcgccggggcagccgatgaccagcacccggcgcatcctacatctccctccggccctccagggcgcgcatgagggtggcgtcgtcggcgtactccagatggctgcccaccgggatgccgtaggccaggcgggtgacccgcacctggaagggcttgagcaggcgggagaggtacatggcggtggcctccccctcggtgtccgggttggtggccatgatgacctcccggacatcccccttggccacccggtccaccagctccttcacccggatgtcgtcggggcccacgtggttcatgggggagatcaccccgtggagcacgtgatagaggccggggtactcccgggagcgctccatggccaccacgtccttgggatcggccaccacgcagatgaccgacgtgtcccgcttggggtcctggcagacggggcacaggccgtccccctcggagaagttctggcacacggggcagcagtggatggctgcctttgcccccacgatggcgtcggcgaaggcggcggcgtcctcctccggcagggagaggacgaagaaggccagccgctgggcggtcttgcggccgatgccggggagccgggcgaactgctccaccagcttttccagggcgggagggaagtactgcatgggtcagtcccccctcagggcggcgatggccgccgccggctcggccgcgccgtataccgccgagccggccaccagggtgtccgcaccggcggcgaccacggccggggccgtcttgacgctgatcccgccgtccacctccagacggcaggcggggttgtaccgctcgatgagggcgcgcacctggcggatggtgtccagttggtgctccagaaaggcctggccgccgaagccgggctccaccgtcatcaccagcaccatgtccagcccctccaggtaggggagcacggcggagggggcggtgatgggccgcagggccaccgcctttttcaccttgcaggcctccatccgccgcagggcctcggcgatgccagtggggtggtcggcctccaggtggacggagaggagatccgccccagcctgggcaaaggcctccacatagcgcaccggcttgtcgatcatcaggtgcacgtccagaaacatgccggtgcatttgcggatggactgcaccaccggcacgccaatggtgagattggggacgaagcagccgtccatcacatccacatgcagccagtcggcggaggacacccggcggatgtcccgctccaggttggcaaaatccgcggagaggatggagggggcaattttaatcatttttttaccactccttgaagggaagttcagaattccgtggtaggataggccccagggctcaaccgggggcggggcaaacggaggagcgggcacataagatacaccaagcggatgacgcccggggccccgccggctctcccccgcgcccacgcggcgccggcccggcggcccatgccccggaggaagcgcgccgcatcatataggcgtatccgggggaagggttcccccggatacgccggtggttccagcacaggccgcgcctgcggggctcagtggtagaagtcgttggtgtggcactcccgggccgcatagcccgcgccgcacagggcgtccagaatggcccgcttgtgggtgtggccgaaggcctccagggtgacgcggagctccacgccggactggcggttgatgttgacgaactggttgtgctccagcttgataatgttgccgttggcctccgccacgagctgggccacccgcagcagctcgccggggcggtcggggagctggacggagaaggtgaacacccgcccccggttgatgaggccgtgctgcaccagggaggccacggtgatgacatccatgttgccgccggagaggacaggcaccacgttcttaccgcggcacttgagatgggagagggcggcgatgggcagcaggcccgcgttctccacgatcatcttgtgcttttccatcatatccaggaaggcgtccaccagctcgtcgtcagggatggtaatgatgtcgtcgatatttttctgaatataggggaaaatttggtcgccgggggttttgacggccacgccgtcggcgatggtctccacccggtccagggtgaccacatggccggcgtccaggctggccttcatggaggccgcgccggagggctccacgccgatgaccgtcacgttggggttgaggagcttggccagggtggacacgccggtggccagtccgccgccgccgatgggcaccagaatcacatccacgtcgggcagatcctgaaagatctcataggaaatggtgccctgcccggtggcgatggccgggtcgttgaaggggtggacgtaggtgagcccctcctcctccgacagcttggcggccagctccgccgcgtcgtcgaaggtctcgccgtggagcaccaccttggccccgtagtccttcgtgttgttgaccttcaccagcggggttgtagtgggcatgacgatggtggcagacaccccggcggcctgggcggcgtaggccacgccctgggcgtggttgcccgcagaggcggtgaccagcccccgggccttctcctcgtcgctgagggtgctgatcttatagtaggcgccccggatcttgtaggccccggtgacctgcatattctccggcttgatatagatctggttgccggtggccttggaaaaggcgggactgtagactagactggtgttgcggatcaccccggacagcacgccgcgggcctccttaaattcctttaatgtcagcatggggcagacttcctctccgtatcataccatatttccttctatcataatgacttttccgcccaaagtcaacgtgttattgacacctggggcggggaaaggtacaatgaagctaacctcgtttttggaggaaatgtcaatggcgaaaattgtgaaaaaatctccggcccccctctatctggcggcggcggtgtgggcggcgtgggctgtgctggcccccctgtatgcctggtggcattttgcgctggcggcggcggtctcggcggccgcatggctgggggggcggaagctctttcccgacaaggtgctgatcctgcctgacccggagcccgcgccggagcgggaaccggagcgtgccgcgccggaggacccgctggccgtcgagcgggcgcgggcgctggccgagctgcggcggctggacgagaacatcgaggacgccaagctctccgcccagattgtccacatggaggaggtcaccggcaagatcttcgacatcgtggccgggcagccggccaagctgccccagcttcgccggtttctgaactactatctgcccaccaccctcaagctgctcaacgcctatgaccgcatgggggccgccggggtggagggggccaacatcgacggcaccatgggccgcatcgacgccatgatggacaaagtggtggaggcctttgacaagcagctcgacgccctgttcgccgacgaggcgctggatatatccacagacatcaccgttctggagcagatgctggcccaagaggggctcggcggaatgcagatgggacaatcataacaatggaggaactgcgatatggctgacaagacggattttaccccggaactgaccctcactcccaacctggacgccgcagcggcggcggaggcgccccaggcccctgaggcgcccgccctcaccctggacccaaccggggcggtggatgcggccgcggcccagaaggccaaggacgagcaggccatccagctcgacgagagcaagctcaccgaggcggagcggaagatggtggacgactttgccaagcagatcgacctgaccgactccaacgtggtgctccagtacggcgcggcggcccagaagaacatcgccggcttttccgagagcaccctcaactccgtgcgcaccaaggatctgggggagatcggccaggccctgtcctccctggtggtggagctgaagggcttcggcaaggaggaggacgagaagggcatcttcggctttttcaaaaagaagaaaaacgagctggaggccatgaaggtggcctacaccaaggcggaggccaacgtggacaagatcgccgaggtgctggagggccatcaggtgaccctgatgaaggacatcgccatgctggaccagatgtacgagctcaacaccaagtattacaaggagctgaccatgtatattctggcgggcaagaagcgtctgaaccaggtccgcgccaacgagctggagcagctccgccagaaggcggcccagtccggcacccaggaggacgcccaggcctacaacgacctgaccaatatgtgcagccgctttgagaagaagctccacgatctggagctcacccgcatgatctccatccagatgggcccccagacccggctgatccaaaacaacgacaccctgatgctggagaagatccagtcctccctggtgaacaccatccccctgtggaagagccagatggtgctctccctgggcctggagcactcccgccaggccaccgcggcccagagcgcggtgaccaacatgaccaacgagctgctgaagaagaacgccgacatgctcaagatgggcaccatcgagaccgcccgggaggccgagcggagcgtggtggatatccagaccctccagcacaccaatgagcagctcatctccaccctggatgaggtcatgaacatccagcgggagggggcccagaagcgccgggaggccgaggccgagctggggagaattgagggccagctcaagcagaagctcctggagctgcggggctaagctccgcccgacacatttgagtgaggaaatcccatgaaatttctgaaaacccacaccggcgccatggtggtgctggcggtggtcattgtcttgtccgtcttgctgggctcccaccgctccctggttcaggccagggagaaggtggaggcgcagtttgcgcccatcgccggtgatctccaggactgcctggacatcaccgccaacctgctcaccgtggcggggcggtacttggacgagggtgagctgggtgagctgacggacagccgggcggccctggcggagagcggcgacatcaccgaggcccacgcggcgtatgagcgcctgctgggggacgcggagaccgtctttctcaagctggaggactgcgtcctgagcggacgggacgcggactacgtgaaggggttccgcaccgatctggccgccgagcaggacaccatcgcccgggacggctacaacgccgccgccgaccgctacaacgagcgggtgctggggggcttccccgccagagtgctggggacgctcacctttgtgcgcccggcggagaccttccgatgagaggagcgagaggcatgagacgacagcttgcggcggccctgctgggcgcggctctcctgacgggggggggccaggccgtggcggagcccaccgccgcccgctatgtggcggacgaggcggacgtgctcagcagcgagaccgagcagtacatcattgacaaaaaccagtctctctttgaggacaccggcggcgagatcgtggtggtgtcggtggattttatggacggcatggatgccgccgactacgccatggccgtggcggagagctggggcggcatcggtgacgagagcctgaacaacggctttctgctggtgtacgccgtgggagagaacaaggtgtgggccatggcgggctccggcatcgaggacgccctcccggcctcaaaaatcgagggctggctggaggcggacttctacggcggctacgacgccggagaatacgacagcgccacccgcgcctttttcgacgacgtgtatggctggtatgagagctattatggcacatctgcggggactgtggtcccgtctgagcccgggcgcgactttgtctattaccctgagccggagaatgactttgtgttcgctgtggtcgggcagatggggctgtttctgctgatcctcctggtggtggtcgtggtgtgcgccgccgacggctggcgctaccgccgctaccggcggcgctacctgctgcccggcatgccgcccccgccctatgtctaccggccctttatcttcggccggccccaccggccccgcccgccacggccccccagggggccccgtccgcccatgggcggcggcttccgcccgggtgggggctttcgcggcggcggggcgggccgctccggaggcggcttctcccgcggaggcgggttccgcggcggcggagccggacgccgctgatgcagcacacaaccgaaggccccggagcaaagctccggggccttcggcatccgttcggcacatctgtgtgctatactgtcatggaaaggggggacagccgtggaggcgcacattctggtggcggaggacgaggcgcgtctgcgcaccatcatccgggactactttaccgcccacgggctgacctgtgcgctggcaaaggacggagaggaggccctggagcggctgcgggagcgggactatgacgcggtgctgctggacgtgctcatgcccaacctggacggatttgcagtttgccgggcggtgcgggagggcagcggcgtgcccattctgtttctcactgccctggggggagagaaggatgtgctccgggggtatgccctgggggcggacgactatgtgaccaagcccttctccctggcggtgctgctggccaaaaccgaggcgcttatccgccgcagccggggagggggcgcggagacactcgcctgcggggcgatcaccctggagccgggccgccgggcctgcacggtgggcggccgtccggtggccctcccgcccagagagtacgagctgctgctctgcctgatgcgcaacaagggccaggtgctccgccgggagcagcttctggacaaggtgtggggcatcgacttcgaggggggagaccgggcggtggacggccggatcaaggtcctccgcgccgccctcggcccggcgggaaaacagatcaggacggtcttcaaggtaggctacaagctggagggggagcagcatggggcggattagacggttgttcaaagggacgattccactgttttcagccctctggcttgggatgatgctggtgctgctgtggctcaatgccgaggggcagagcgcacgcatgggggcatctatgcagtcgtaccggtggtcagtggagtaccagtattccgagatctggaatggatctgcggcggagacaaaaaagccggtgattttgacttggcggctgatggaagagccgctgtattccatcggcggtatcacgcagacacgggtgtatgatcgtacgggcagggagctggcccggcggcccatggctatggggacagccagtcccattgggacgggggtttatacctggagcctcctgttggacccggtgctgagcgaggaagaacagctctccctggctgagcggctgcgggccgaaccgggccttggaaattttttcggcacagccggtggattctatgaggagctggagaccgggggactctactgcgaggtggtgggggtggtggacgaggagcgggaggtcatctatcctcagaggctcacctactgctatgctgaccgggagatcaccctggtggacactgacagcggatttttcgacggtagggagttagttacgctccggttcgacggggttcagttgaattctgcgttggtaggcgtgtcggcctccccacgggagctgttacaaaccttccgggcggcagagacaaacctggatgcgctgctgggcggcgacacccccacaacgagccgtgtttccatatcgtctgacggcagtgagtgcgcccccatgagtgatggggagatcatcgtcgccaccgcatatacctgcaatcctctgcgtgtagccctgagggggcaggggcccacagcagtactcacgctgctggcagcggtgggcatggccgtctttacggaccgccgccagcgggaaacgttggagcgggaacgggccttcacccgggcggcggcccatgagctgaagaccccccttgcggtgctccgcacccacgcggaggcgctgagggaggacattgccccggcccggcggggggaatacctggacgtggtgctggacgagagcgaccgcatggccgctctggtgggcagcttgctggagctctcccgcatggaggagggcggggcgctgcaccgggaggtgctggcgatggacgccctggtgcgggcggtctttgaccggctggccctcccactggagcgaaaggggctccacctgaagctgaatctggagcctggacaggtattcggcgaccgggcacggctggagagcgcggtggaaaacctggcctccaatgccctgcggtatacgccggaggggggcgcggtgtcggtgcggctggaacgggcaggcggctggctccgcttggcggtggacaacgacggccccagtctcaccacccaggagctgacccacctgtttgagccattctaccggggggatgcggcccgcagccgcgctactgggggtacggggctggggctggccattgtcaggacggcggcggcagcccacggggggacctgctgggcggagaaccgggcgggaggcgtgcggatctggatggagctgccggccttgcaatcagtctagcggtatgatatgatatcttcacaaataaaatgagaatgtgagggatcgcgatgggcttcaaccgacccgaggcgaaacggctggccaaggcagccatgcggaataccaaccccaaccccatgctggtgaccctggtctttgtcctgttgaccactggagtgagctatctggtgggacttgtgctgacaaacccgatctatgatgcgctctatacggcatatctgtacctgctggacggggcctacgacccgatgttcatcttcaagagtctgctgtcgcccggtatggtggcagtgtatatgctggtttcgctgctgctcaatgtatacttctgggtgatgaacttcggctatgcatcctacgccctgcggatggcgcggggggagcagccgggctaccggcggctgtttgacggctttgcagccctgggccgggctattctggtcagtctgctgacctccattttcctcagcctgtggggcctgctgttcatggtgccctatatggtggtgatgatccttgccgccctgctggggagcatggggctgatgatgctggccatccttctgctcatcggcggtatggtgatgatggtcattttcagttaccgctaccgcctggccacctattttctgctggatcaccccgagatgggcgcattggaatccatcactcagagcaagcaggcgatgaaggggtggaagggggagctgttcattttagactggtcctttttcggctggctcctcctggtggcgttggtggagctggtggggatcggcctgggcacgctgttcagccccgctctgggcacattgctgggtacggtggctgcgggggcgttcagcctgtggctcaacccctacatgaacggcacggaggccaacttctacgactgggtgacccatggctccctctcctaccgggagaacaacggcccaggcggctaccagagcccctacggcaacaacactccggaactataatcaaaagctccctcggggtttgaccccgagggagcttttggttattccagaacggcgccccgggcggcggaggtgaccaatttcgcataccgggccagatagccggtcttgatcttgggttcggggcagatccacttggcccgccgggcggccagggtggcctcgtccacctggagctcgattttgcaggcggggatatcgatggaaatgatgtccccctcctccaccaggccgatggggccgccctgggcggcctcggggcagacgtggccgatggaggccccgcgggtggcgccggagaagcggccgtcggtgatgagggccaccgactcgcccagccccatgccgcagatggcggaggtggggttgagcatctcccgcatacccgggccgcccttggggccctcgtagcggatcaccaccacgtcgccggggacgatcttcccggcgtagatggcctcgatggcctcctcctcggagttgaagacccgggcggggccggtgtggagcatcatctcaggggccacggcggagcgcttcaccacgcagccctcgggggccaggttgcccttgagcacggcgatgccgccgtcggcggagtaggggttctcgatggggcggatcagctcagggttgcggttgaccacgccctccaggttctcggccagggtctttccggtgcaggtgagcacgctggtgtccagcaggcccttcttcgtcagctccttcatgacggcgtacacgccgcccgcgccctccagatcctccatataggtatccccggcgggggcaagatggcacaggttgggggttttggaggagatctcgttggacagatccagatccagctcgatgccgcactcgtgggcgatggcgggcaggtggagcatggtgtttgtggagcagcccagggccatgtccaccgtctcggcgttgtggaaggcggcgggggtcatgatgtcccgggggcggatgtttttcgccaccagatccatgatctgcataccggcatgcttggccaggcgcagccgggccgaccacacggcagggatggtgccgttgccccgcaggcccataccgatggcctcggtgagacagttcatggagttggcggtatacatgccggagcaagagccgcaggtggggcatgcgttgttttcatagtcctccacgccagcctcgtccagcttgcccgccttataggccccgaccgcctcaaacatgtggctcaggcaggagcggcgtccgtcctccagccgcccggccagcatggggccgccggagcagaagatggtggggacgttcacccgtgcggcggccatgagcaggccgggcacgttcttgtcgcagttagggatcatcaccagcccgtcgaactggtgggcgatggccatggcctcggtggagtcggcaatgagatcccgggtgacaagggagtacttcatgccgatgtggcccatggcgatgccgtcgcacacggcgatggcggggaactccaccggcgtgccgccggcggcgcggacgcccgccttgacggcctcggcgatcttgtccaggttcatgtggccggggacgatctcgttgtaggagcacaccacgccgatgagggggcgctccagctcctccttggtgtagcccagggcgtagaacagggagcggttgggggcgcgctccacgcccttcgtcacgttgtcgctgcgcataagtaaaatctccttcgcaattttacgcggtaaagtatagtggtattatagcacaagggccgggcggtgacaacgcggaatttgtgcggcccccctgccgcaaaaaagcaaccccgtccgcagggcggacagggctgctttttggatgtatggaaggacttagtgagggatgcgctggcacttcttgggggtcacgcaggtaccctcggcgatggcgaccacaatgggctcagccaggaaatcggcggcggagtcgctgatgtcggggcggggcacggccaccttgcgggcctcgaacttcatcttgcgggaggtgttgccgatgtgggtgatctcaccgtaggcctcgatgaagtcgccggcgtacacaggggccttgaactcaatgttgttgtaggcacagaacaggccctcatcgccgtcacactggatcagcagctcggtggccacatcgccgaacaggtgcaccatatgcgcgccgtccaccaggttgccgccatagtgtgcgtccttcgcggacatgcgcaggcggatcagcgaagtatacttcttctcttccatgtcaattccactcctaaacgtattttgtgaaagaagacgaaaaatggaaccggaattccctacctattgtacgtccgatcgaggggcttgtcaacagcgggtttcccgaatggaggctcactccaggcggagatgggcccgccgcagggccgcccggatggccagacacaggggcggcgcggcggcgatggccgccgccgcgttgaagagggaggcggggattttcagggggagcagcagggccgctgcggcaaagggcaggccgcccaccagcatgttgtcatagaacagggacttggagaagtagagcaggtaataggtcaggcagccaaccagtgaggaggccagacagcggcggtaggaggccgtctctcgctgttccggagtgcggaacaccagcccagccgccaagcccatcgcgcccttggtgagaaaggtgagccagcactctggggcaaagatagggttggtcaggtcgtagagggcggagcccaggccggaagccaggccgcccaagggccccaggagcataccagacagtacgcaggcaatgttggccagggtgaaggaggtctccccggtgggcagggggatgatgatgcggggaaaattgacggcgaagaccacggcggtcatcatggccagcacagccagccggtgggggttcatggcgttctttttcatggcgaacacttccaatcctcttggtgtgtccccattatagcgggaaactgacattgtttcaaacatcagatttgaaaaaaagaataagaccagagggggcgaaaaagggccgccgcggatgcggcggccctcgtgatcaatagcggccgaagtcgccggaacggccctcggtgacatcggagccgaactcgtagtccttgcccggcaggatagcgttgagggcgatacccgcgatggcggcgatggccagattggtcagggtcacatgggcgccgcccaccgggaaggtaattccgccggagaagcccaggccgcacaccaggatgacagcggcgatgatcaggttgcgggagttggtgaagtccacccggttttccaccacgttgcgcacgccgatggcggagatcatgccgtacaggatgaaggacacgccgccgatgatggcggtggggatggagttgaccagggcggcgaaggcaggggagaaggagagcaccaccgcgtacactgctgccaggcgcaccaccttggggtcgtatacccgggacagcaccagcacgccggtgttctcaccgtaagtggtgttggccgggccgccgaacaggccggcaagggaggtggcgatgccgtccccgatgagggtgcggtggagaccggggcgctccaggaagttctcgcccacggttgcggagatggcggacatgtcgccgatgtgctccatcatggcagccacggcaatgggggccatgaccagaatggaggtcacatcaaacctggcgatcgagccggtgaagtcggtgaagaagggttgcaggccgataggagcggcagccgtcacggcggaaaagtccatcagggggatcaccgagccggaggcgtccactgctgtggcccccagggcattggcggccacagccaccagataggggatcaccacgcccagaaggatggggatgatcttaaccatacccttcccccagatgttggctgcgacgatgaccgcgatggacaggagggccagccaccagcaggaggaggcgttgcttaccgcgttaggggccaggttgaggccgatgaggatgatgatgggcccggtgaccacaggaggcaggaagcgcatgaccttctttacgccgaccagtttgatgacggcggccagaatcacatagagcaggccggccactacaatgccgccgcaggcgtactggagcttgacggagggctccattgtggcataggcgccggaatccagggcggccacggcggagaagccgcccagataggcgaaagaggagcccaaaaaggcgggtaccttcaggcgggtgcaaatatggaagaagagggtgccgatgccggcgaaaaacagagtggtctggatggacaggggcaggccgtagccctggaccagaatggggaccaggacggtggcgccgaacatggcgaacaggtgctggaggcccagcaccagcatcttgggcaggccaagcgtccaggcgtcatagatgggctcgcttccgggggtggatttgtgactcatacgtgtctcctctctcgtttgggcattgggcagaaaaaaagcaattgctttttcaacgaaaaagcaattgctttagagaaatggaatggagatacccaggtgaagccaaagaaacatccggtactccatgttccattcctcctgccgccgccaaatttcactctatgatatcagaaatccggtcgtttggcaagaaaaagtttttcctccgcccggccgggtggaggaaaaaccgggcgagtacgtccccggtacggcgggggcgtttcttacagcatccgcttgagatactgcccggtgtaggaggcggcacactgtgccacctcctcgggggtgccggtgacgacgatattgccgccgccgtcgccgccctcggggccgaggtcgatgatgtggtcggcggtcttgatcacgtccaggttgtgctcgatgaccaccaccgtgttgcccacgtccaccagcttctggagcacctcaatgagcttgtgcacgtcggcggtgtgcaggccggtggtgggctcgtccaggatatagatggtcttgccggtggagcgcttggccagctcggtggccagcttgacccgctgggcctcgccgccggacagggtggtggagggctgccccagcttgacgtagctcaggcccacctcgtagagggtttggagcttgttgtacagccgggggaggttctcaaagaaggggagggcctcctccaccgtcatctccagcacctcatagatgttcttgcctttgtagcgcacctccagggtctcccggttgtaccgcttgcccttgcacacctcgcagggcacgtagatgtcggggaggaagtgcatctcaattttcagcaggccgtcgccctggcaggcctcgcagcgcccgccccggacattgaaggagaagcggcccgggccgtagcccctggccttggcgtcggaggtggaggcgaacagatcacggatgtcgttgaacaggccggtataggtggccgggttggagcggggggtgcggccgatgggggactggtcaatgtcgatgactttatccaggaactcctccccctcgatgcccgcgtgctttccaggccgggtcttggcccggttcaggtcggcggccagccgcttgaacaggatctcgttgaccagggaggacttgccggaaccggacacgccggtgacgcaggtgaaggtgcccagggggatggacacgtccacgccccgcaggttgttctccgccgcgccccggatggtgaggaagttcccgctgcccttgcggcgctcggtggggacggggatccttttgcggccggacaggtagtcgccggtgatggagccgggggtgttcatgacctcttcggcggtgccggcggccaccacctctccgccgtgaacgccggcgccggggccgatgtccacgatatagtcggccgcccgcatggtgtcctcgtcgtgctctaccaccagcagggtgttgcccaggtcgcgcaggtgcttcatggtgtccagcagcatgtcgttgtcccgctggtgcagaccgatggacggctcatccagaatatagagcacccccatgagggaggagccgatctgggtggccaggcggatgcgctggctctcgccgccggacagggtggcggcggcccggctcagagtgaggtactggagccccacactctggaggaagccaaggcggttcttgatctccttgaggatgcggtcggcgatgaggtgcttctggggggtgagctccaggccgtccacgaaggccagggcgtcgttcaccgacttgcggcagaaggcgtcgatgctgataccccccaccgtgacggccagggcctccttccgcaggcgcttgccgccgcagtcggggcagggccgctcagccatgcactcctccagatcccggcgcatggcgtcgctctgggtctcccggtagcggcgctccaggttgttgaccacgccctcgaaggcctgcatcagggtgcccttgccgttctcccggtcgtaggtcagcttgagcttctcccccttggtgccgtagaggatcacgtccatgacctcctccggcagttcctccaccggggtggtgagcttgaagccgtatttcttggagagggcctcaaagtacatgcgggagatggagtcacccttgatgttgttccagccggaggcggtgatggcgccctccaggatggagagcttcctgttggggatgatgaggtcgggatccaccttgagctgggcgcccaggccggtgcaggtgggacaggcgccgtaggggttgttgaaggagaacatgcggggggagagctcctcgatggagatgccgcagtcttcgcaggcgtagttctgggaaaagaggatgtcccggtcttcgtccacaatgttgatgaccaccaggccgccggccagggcggcggcggtctccacgctgtcggtgaggcggcggtgaatgtcctccttgatgaccagccggtccaccacaatctcgatgttgtgcttcttgttcttgtccagggggatctcctcggtgagatcgtagagcgagccgtcggcccggcagcggacatagcccgacttgcgggcgtcctccagcagcttctggtgggtgcccttcttgccccgcaccaccggggccatgatctggatgcgggtggcctcgggcagggccatcacctggtcgatgatctggtcgatggtctgctgctggatctccttgccgcacttggggcagtggggggtgcccacccgcgcccacagcaggcggaggtagtcgtagatctccgtcaccgtgcccacggtggagcgggggttcttggaggtggtcttctggtcgatggagatggcgggggacaggccgtcgatgtagtccacgtccggcttctccatctggcccaggaacatgcgggcgtaggaggagagggactccacatagcgacgctggccctcggcgtagatggtgtcaaaggccagggaggacttgcccgagccggacaggccggtgagcaccaccagcttgtcccggggaatgtccacgtcgatgtttttcaggttgttctcccgcgcgcctttgacgaaaatatggtcgagcatacgtgtggttctcctttgttcaggggtttacaggggctgttcgccgggccggggcggccgggcatggcggacgagatcctcccgcacggccccccatttccggtagttttcccggccctgccgcagggtcattccccggttttcatcgctgggggcgtcctcgtccgggtcgaacacgtcgttctcccagaagcacaccgggcagatgtaggcaatggcctcctctttggggacaggaaaggtgaggcacccgcagcagggacaggggtagctccccgccggcccctccggctccggctcaagcggctccggagtgcaggacgggccgtcggacggggagggcacaaagctggcgttggtggcctggggcagatagaagaatttttctgttttgtccatagaacggcatcctccgggtcagggggcgaacacgggacgaaatacatacgcccacagagcccacagcagaagggcggagcccagcaccccggcggatacgcgcacccacctgggcggtctgggacagacggccagggcgataagggcgaaggccgcaagccccagcagaaaaggggcgtacatgaccagcaatgtgtcccagcccatatcccaccggcccatgttcagtacccgaacaccttggccacgccctccagcatgtcgcggatgggcaggccgtaggggcagcgcttctcgcaggcgccgcacatgacgcaggagccggcgtggtagggcatagccttgtaacgctgctcggcccagccggccaggccgtacttgcgggcgtagttggccatcagaaagttggaggggatgtcaatgccgttggggcagggggcgcagtagccgcaccggcggcagaactgggtgcccagctccttccgcacggcgtcgcaccgggccagctcttccgccgtcaggggggcggcaaggtccacagaggcgttgcggtccacttcctcaggggagcccatgccgggaatcataatgtcgatgaccccggaggcggcgatgtaccgcagggccagctcccagtcgtccaggttgccgccggccaggggcttcatggcgatggtgccgatgcccttctcccgggccagggccagcacgtcccgcccctgatcctccacaatattataggggaacataacggtttcaatgcggtcggcgtagtcctccaccaaaattttaagcgcatcagcgctgtgggcggtgacgccgatgtggccgatcttcccggcctccctggccgccgtcagggcctcgtaggcgccgccggggccgaataccttctcaatgtccttctccggcaggttgtggagctgatacaggtcgatgtagccggtgcgcaggttgcgcaggctggtctccacgtcggcggccatggaggcggcgtcccggctcatgctcttggttgccaggataaacttgtcccggcggccctccagcgcggcgcccagatactcctcggagacggtatagccccgggcggtgtcgatgtagttgatgccgtactcctccagcttatctaccacagccttggtgttggccccgtcggcgcgctggatggggataccgccaaaggagactacagcggccttcaggccggtcttgcccagtgtcacatagttcataatccatacctcttattccatgcccggctcacgccggacgtatttgggaagtctttccgccgccggacgggggaacaggccgccggccggccggtcaagtcatacataatagcagtcctcgcgccatttccggggattggcatcaatgtagttccagatgcgccggtagtccgcctcgccgcggatgacgtggtcgtgaaaggatttctgccagaggggaatgcccgcccgcttggcggcggcccgtttcatagagccgatcacggtggagagcggctttgtaggggcggatattatccgcccgtccggctccgcaagcgccagaatcaggtgaatatgattgggcatgacgacgaatttatccagcgcaacattggggtagtgcgccgggatggcgcggatggcctcatctaccacacggccaatggaggaaagctgaataccctgcggcgggcggatgatatccgcccctacggacggctgccagaaaagcggctgtttgtcttttgtgcagagggtgatgaaataatagcccgcctggctgtaatcatagtttggcagccggttcggcttccgtctgggcagctccatgcccctcacccatgtccccgcagctcgatgatgcggtcgcgcagaacggcggcgtactcgaattccagccgcttggacgcctcccgcatctccttctccagcttggcgatggcagtctcccgctcctttttggagagggccttctgagagtggggcagctcgtccttgtcgccggacaggtcgatcacgtcgcggacggacttgatgaccgtcttgggcacgatgccgtgctcccggttgaaggcgtcctgcttggcccggcggcgctcggtctcgtcgatggcccggcgcatggagggggtgatggagtcggcgtacatgaccaccaagccgtcggcgttgcgggcggcccggccgatggtctggatgagggaggtctccgaccggaggaagccctccttgtcggcgtccaggatggccaccagggacacctccggcagatccaggccctcacggagcaggttgatgcccaccagcacgtcgaaggtgcccaggcgcaggtcgcggatgatctccatgcgctcgatggtgtcgatgtcgtggtgcatgtagcgcaccttgatgcccgcgttggtgaggtaggcggtgagatcctccgccatctttttggtgagggtggtgaccagcacccgttccgagcgggcggtgcgggcgttgatctcgccgatgaggtcgtcgatctgcccctccacgggccgcacctcgattttggggtccaggaggccggtggggcggatcacctgctccacgatctggcccgaccgctcccgttcatagtcgccgggggtggcggagacgtacaccacctggttgagccgcttctgaaattcgtcaaacttcagcggccggttgtcgaaggcgcagggcaggcggaagccgtagtccaccagagaggtcttgcgggccttgtcgccgttgtacatggcccgcacctggggaagggtgacgtggctctcgtcgatgaaaagaacgaagtccttggggaagtagtccagcagggtgtgggggggcgagccgggggcgcggccctcaatgacccggctgtagttctcaatgccggtgcagtaacccagctcctgcatcatctctacgtcgtacatggtacgctgcttgatgcgctgggcctcaataagctggttgttggcctggaagaaggctacccgctcctccagctccttgtaaatctcctggacggcggcgtccatcttctccttgggggtgacatagtgggtggcgggccagatggggatggtgttcaaccgccggatggctgcgccggtgaccacgttgatctcgctgatacggtcgatctcgtcgccgaagaactccacccggatggcggagtccttccagtaggcggggaagatttccaccgtgtctccccgcacccggaacatgttgcgctcaaaggcgatgtcgttgcgctcgtagcggatggccaccagctttttcagcaactcgtcccgctccagggtagcccccacccgcagggaaaccatcatcttggcgaagtcctccggctcgcccagaccgtagatgcaggataccgaggacaccacgatcacgtcccgccgctccatcagggaggcggtggccgccagccgcagccggtcgatctcctcgttcaccgccgagtccttctcaatgaaggtgtcggtgtgggggatataggcctcgggctggtagtagtcgtagtaggacacaaaatactctaccgcgttgttggggaaaaattccttaaactcggcgcagagctgggccgccagggtcttgttgtgggccagcaccagggtgggccgctgcaccgcctcgatgaccttggccatagtgaaggtcttgcccgaaccggtgacgccaagaagggtctgctcatccagaccgttctcaatgcccgccgccagggcggcgatggcctccggctggtcgccggcgggctgatattcgctgacaacttgaaatttcgacatagcgctgtctcacctcacaggtcgggaaatcggaacggcggccagccgcgcgcagaagcgcgccgccgccctgcggcgtccaagcgttttgcgaagcaaaaccttgtccagacggaattcagttgcgtctggaggaatagaaaaacagggctcccggcggattcatccgccgggatacgccggccggctgatattcgctgactacttggaatttgggcataccgtcacctcacagggtaattatagcaaaacaaatgttcgatttcaaccgagaattttagaacttgcctttttacggctggtaaaagccgctgtcccggagagacaccatgtcgtcgtccacaaagatcaggtggtctaccagctcaacgccaagtttggccagaaaaggggccaagctgcgggtggtggcgatgtcatcctccgagggaaaggcgatgccggagacgtggttgtgggccagcaccacagcagcggcgttgagggcgagggcggcctcggtgatgagacgggtggtaatagccacggcgttgacgttaccctcacccagccgtcggatgcccagcaccttgtgcttgccgtccatgcacagcaggcagagcagctcgttccgggccccgaagaaatagggccgcaggagctggtagtagtcccggctgttccgggcgatgtcgtctacccgggtgcgggcagtgaggtagcgaccggacagctctttcactgtcttgagcagcaccgccccatgcttccccatgcccttgaccttgcacagctcctccggcggggcgtccaacaccccggccagggagccgaaacggtcgatcagttcgtgggccaggggattggtgtcgctgcggggattggcgtagaagaacagcagctccagcagcttgtggtccgggaaggagtccggccgggccagaaattcggttttcagacgctggcggtgtccgtcgtgggggcccatggctgaagatctcctttcctgtggattcaagcaggcggatgagggcatccgcctccctcctgtcctcggagccacgtctcttaccgggcgccgtactgctccagataggccgccatcctgcccttcatctcgtcgtcaatatacaccctgccgtcgagctcccggttgtggagaaaggcgatgatctcccggacggtgacgatggggtagacggcgatgccgtagtcctcccgcagctcgtccagggtggagcaggcccgggtgccccgctccatccggtccacggagacgataagggcgcgcatctttacgtcggccacatgctggaacagctcgatggactcccgtacggcggtgccggcggtgaccacgtcctctacgatcaccacccggtcgccgtcctggggcttgcagcccaccatgacgccgccctcgccgtggtccttggcctccttgcggttgaagcagtaggggagatcccgcccataattgcggtacagggaggcggcggcggagacggccagggggatgcccttgtaggcggggccgaagaggcagtccaccccgtcggggaggttctgctggatgcaggcggcgtagtagtcgcccagcttggcggcctgggcgccggtcttgtagttgccggtattgatgaagtagggagtcctgcggccggacttggtggtaaagtctccgaaggtgagtacgccggcgcgcaccataaaggtgatgaattcttcctgataggtcatgttcccaaacctcgcttctccaaaaatagtcgaattattataccactattcgggggcgcggacaaggccgtgtctgcggaaagaaatttggaatttcactcttttttaatgttattttacccgggcgtatggtacaataccaaagacttcatagatgaggtgttgcagttggaactctttgaatggatgacctccaccacctggggcgagagcctgcttaccctgctggtgtccatggtgccggtgatcgagctgcggggcggagtccccttcggcaccgccttggggctgacccccctccacgcactggtggtatgcatcatcggcaatatgctccccatcccctttattatcgtatatatccgccggatctttcactggatgcgccgcagatcccccaggctcaacgctctggtggacaagctggagaagaaggcccacctgaaggggcaaaaggtaacgaagtacaaatacatcggcctgtggctctttgtggccatccccctgcccggcacgggggcgtggacgggggcgctgatcgcggccctgctggatatgcccctgcgcaagtccattccctccatcttcctaggggtggtcaccgcggggctgattatgacctttgtcacagggggcgtggtggcgattttcgcctcctgagcgcctttttctcagctccggcatagaatggcccggaggtgagcgaaaatgaacgcgatttggcaagtgctcctggccctgctggcggcggtgggcctgttggccctgggctggctgaccttcggccgcctgctgaccccggtggggggcagcgggggcggtccggtgtacgcggtggtgcccgcgtctggggacggggcccacctggaacaggacgtgaaggggcttctctggctgcggggcggcgagctggcccgcttcaccatcgtcatcgccgacggcgggctggatggtacggggcgggcggtggccgcggccctgctggcccgcggccaggggatcgtcctctgcccggcggagcggctgggggagtacatcaaggcatgaaaagggtccgccggccggcggacttttttctgcgcgcaggggccgggcggcgcatttccggcgcggcaaagcggacgaaactgcgtttgccggtcgacaaatcggggcacagatgatatgatatcccgtgagaaaagggagggagcagcatccatgcaggaggcggaactgacttacatcgagggcaccgtggatgccgtcatctatcagaaccgggagaacggctacacggtgctccgcctggacgcgggggaggggcgggggctcaccgttgtggggtgcctgcccggcgtggcgccgggtgagagcatctcagtccaggggacatggatgcaccacgcctcctacggggagcagttcaaggccgaggcggtggagcggcggatgcccgcaggcaccaaggccatctttgactacctggcctccggcgcggtgcggggcatcggcgccgccaccgcccggcggatggtggaggagttcggggaggaggccctgacggtgctggaggagcaccctgagcggctcactcagatcaagggcatcacccgcaagcgggccctggccatgggggagcacttccggcagcagatgggcatgcgccgcctgctggagtttctgggggagcatgaggtgcccctccagttggccatgcccctctaccgcaagtacggcgaccgggccctggagatcatccggggcaacccctatctgctggtggaccgggagctgggggtggacttttctaacgccgacgcgctggccctgtctatgggcatggagggggacgacccccagcggctggaggcggggctgctcttcgagctgacccacaacctggacaacggccacacctttctcccccggcgcaagctgctgcccgccacggcccagctcatcggtgtgggggaggaggccctggaggaggcgctggaggccctgctggagcggggtgaggtggtggaggagccggtggccggggagcaggccgtctacctccatgacctgtgcgaggcggagcagtatgtggccttccggctgtgggagctggcggcgggggagatcgtggccccccatgggctggaggaactcatcgaccgcatccaggccgagcagggcatcacctatgccccacagcagcgccaggcagtggagctggccgccaccagccaggtgatgctcctcaccggcggaccgggcaccggcaagaccacctccctgcgtggagtgctggccctgttcgacgccctggggctggagaccgccctggccgcccccacggggcgggccgccaagcggctgggggagctgtgcggcgcggaggggaccacgatccaccgccttctggagacccagtacgacccccactccggccggctggtgtttgcccacgatgaaagcgacccgctgaaggccgacgcggtgatcgtggacgagacctccatggtggatatcaccctcatgcacggcctgctgtccgccctgcggccggagtgccggctgatcctggtgggcgaccccgaccagctgcccagcgtggggccgggcaacctgttctccgaccttatccgcagcggggtgatccccatggtgcgcctgaccgagatcttccggcaggccgccgagagcgccatcgtccgcagcgcccacggggtcaaccggggggagctgcccgacctgcgggacaacaagcacgacttcttcttcctccgccgcaaggagccggcccgggcggcggagaccatcgtggagctggtgaagacccggctgcccaacaacatgggcatcccgccggagcagatccaggtgctctcccccacccgcaagcggacggcgggcaccgcgtcgctgaaccgggccatccaggaggcggtgaacccgcccggccccgaccggccggagcgccgcttcggcgagtacatattccgccggggcgaccgggtgatgcaggtgcgcaacaactacgacgtggtctggaaggacggcctcacctccggcatgggggtgttcaacggggatatcggccaggtggtggaggtggacaaccgggccgagctcctcacggtggactttgacggccgccgggttgaatatacccctgatatgctgggggagctggagcccgcctacgccatcacagttcacaaggcccagggcagcgagtaccgggcggtgatcctggcggtgtgcgagggggcgcccatgctcctgacccggggggtgctctacaccgccatcacccgggccagggagctcctgatcctggtgggggacgaggacgtggtggcccacatgaccgccaacgaccgtcagcagcggcgctactccggcctgcgctggcggctggcccagctggccaacgggtgaggctccgcccaccccgtgtgggctgcgaaaaagaagaacttaatatgcacgcataagtgcaaagtgcgtgcacaaaccgataccatcaccctgaaaggtggtgtcaatatgaagcgagacaagcacctcggcatccgcatggacagccagctccacaagaagctggtctacattgcggagtatgagggacgctccctcaactggcaggtcatccacctcatccaagagtgcgtccgcgccttcgagcgggagcacggtccgattccggacgaggagctgtcatgagcgggccggtgggggtcctgctggatctgctcttcccgcccaaatgcgtgttctgcgggaagctgctcacctcgggggagcgggacttctgtgcccgctgccagcgggagctgccctggctggcagggccggaggcggagcagacgggggagtttttcaccctgtgcgcctctccgctggcctaccgggaccaggtgcgggattccatccggcgttacaaattcaaagggcggcagggctaccacaaggcatacggccgcttagtggcccagtgcgtccacgaccatctggacgggcggtgggatctcatcacctgggtgcccctctccgaccagaggaggagggagcggggctacgaccaggcgttcctgctggccagcgccgcggcgttggagctgggggaggtggcggtggagacgctgcgcaaggggcgcaacaccgaggcccagtccggcctggacggcgacgcggcccgccgggccaatgtgctgggggcctacaccgccgtggacgcagagctggtggagggcaaacgggtgctcctcatcgacgacgtgatcaccaccggcgcgactatttcagaatgtgcaaggattctgcgcaccgtgggggccagagaggtggtatgcgccaccttggcccgggcgagaggatagaaacagggaaagtttgtggaaattagcgttgaaataggtcggatacttcggtataatataggggattattcatgaaattctgggataaactaaaacaaaagctttcaagacttcgaggtgcgggtatgttcagtaaggatatcggaatcgacctgggtacggcgtctatcctggtctacgtcaaaggcaagggcgtggtgctgcgggagccctccgtggtggccatcgacaagaacacgggcaagctgctcaaggtgggcaccgaggcgcagcagatgctgggccgtacccccggcaacatcgtcgccatccgccctctgcgggagggcgtcatctccgactacgacatgaccgagcggatgctcaaggagttcatccgcaaggtgacttccttccggctgttcaaaccccgcatcgtcatctgcgtcccctccggcatcaccgaggtggaggagcgcgccgtcatcgacgcgggcatccaggcgggcgcccggcgggtctatctgattgaggagcccgtggccgccgccatcggcgcgggcatcgacatcgccaagcccgacggccacatgatcgtggacatcggcggcggcaccaccgacatcgcggttatctccctgtccggcatcgtggagtccacctccatcaagatcgccggcgaccagttcgacgaggccatcgtgaagtacatacggcgcaagcacaatgtactcatcggtgagcggacggcggaggagctgaagatgcagatcggctgcgtcttcccccgcccggaggagcagacggtggagatcaagggccgctgcctcatgaccggcctgccccgggtgttctctgtgtcctccagcgagatgatcgaggccttcgaggaggtctccacccgcatcctggaggccatccacggcgtgctggagcgcacgcctcccgagctggtggccgatatctccaccaacggcatctgcatgaccggcggcggctccctggtctggggcttcgacaagctcatcgagtcccacaccggcatcgagacccatgtggccgacgacgccatctcctgcgtggcctacggcaccggcaagagtctggacgacgtggactccatgcaggacggcaccatcaacctctcccgcagaaagcagatgaactgaagaataaaacagcacgcccggccaagcggccgggcgtgctgttttacgctgcattgcggctcagccctcccgcagcagggcctcgcccacggtgaaaatgtcgccggcgcctacggtgaggatcagatcgccgggccgggccagcgcccgcagccgctccgtcacctcgggcagcgtggcatagtactcactgccggggatgcgcgccgccagatccttggaggagatgccgatgtcgttgacctcgcgggcggcgtagatctccgccagaagggtgatgtcgggcgcgcggagcgcctccacaaagtcgttgaacagggcgtgggtgcgggtataggtgtggggctggaaggcgcagatgacccgctcatagcccagggtgcgggcggcggagagcagggcgtggagctcaccggggtggtgggcgtagtcgtcgtacacctccgccccgtggtaggtgcccttgtgctcgaagcggcggcccgccccccggaaggcggccaggccctcggagacggcctccggctccaccgccagggcgatggcggcggcggcggcggccagggcgttctttacgttgtgctcgccgggcacccgcagggccacgtgggtgaacacatccccccggtacaccacgtcgaaggagggcaggccccggttccaggcgaggttggcggcgcggacatcgccctgctccaggccgaaggtgaggacgggccgctcctccccctccagggtgtgcatggtgttggcgtcgtcggcattggccacaatgatgccgctctccggcacccggtcggcgaaggcgcggaaggagtgctccacgtcgtccagatccttgaagaagtccaggtgatcggcctcgatgttgaggatcaccgccacggtggggaagaaggagaggaaggagttgcagtactcgcagctctccaggatgatggtgtccccgtggcccacccggtagccggagcccaacaggggcagggtgccgccgatcatcaccgtggggtccatccgggcggccatgatgatgtgggtgcacatggaggtggtggtggtcttgccgtgggtgcccgcgatgcacagggcgttcttgtagcccctcatgatggctccccaggcctgggcccgctcaaagacggggatgcccgcggcgcgggcggcggcgatttcggggttttcgtcgtggacggcggcggtgcggatcaccagctccgcgccctggacgttctccccccggtggccgatggccacggggatgcccagggcgcgcaggtgctccaccgtggcgctgttgcgcatgtccgagccggtgatcaccatgcccgccttgtgaagcacctcggccaggggggacatggacaccccgccgatgcccaccagatgggccctgcggccgggggcgatgtagtcgtgaatattggcgcttgccatggggtttacacaccctttgctctagtttataataagttccgaacacaatattataaaccattataggcaaatagcaagaaaaagataccagagggaggcggaaaaatgaagggatggcccatccccggcggcgtgcgggcctgcctggacacgctgcggcggacaggacacgcggcctacccggtggggggctgcgtgcgggatctcctgctgggccggacgccgggggatttcgatgtgtgcaccgacgcccggccggagcgggtgatggagctctttccccacacggtccccaccggcctgcgccacggcacggtcacggtgcggacggaggacgggccggtggaggtgaccaccttccgccgggagggaggctatgccgacggccgccacccggacgcggtggacttcgacgccactctggcggaggatctggcccggcgggatttcaccgtcaacgccatggccctggatgaaaacggcatggtgatcgaccggtacggcgggcagacggatctgttccgaagcgtgatccgctgcgtgggcgacccggaccggcggtttgccgaggacgccctgcggatgctgcgggcggtgcgcttcgccgcccaactgggcttctccatcgagaagggcaccctggacgccatccggcgcagtgcccgccgggcggaaaacctgtcgggggagcggatcaaggcggagctggagaagatcctgctctccccccggccggagctggcgggggagctgctccggctgggcctgctggcccacctgggggggagtccagactgtcccggcctgctggcgctccgggaggagccgccggagccggtgccccggtggcgggccttctgccgcctgaccggctttcccattgcggccctgccggtggagcgggccctccgccgtggggtgctccacccggaggccgaggcggtgcgcgccctggccctctccggcggggagctggccgccctggggctggagggcccggccatcggcgcagcccagcgccgcctggccgcccacatcctgtcccacccggaggacaataccccggcgcggctgctggccctggcccgggcggagctgagcgggccgtaggggcggccattttcgcttggacaggcaagaacgccgtcctcccggcataagcattagggacgaggagggacggccatggaacggagcggaaagcgggagggcctgctggaaaagacggcggaggtatttgatctgccgggggacgtggtggcgggcctgccccgcattgagctgacaggcagccgggagctgcggatggaaaatcacaagggaattctctcctacggcggcgaggagatccacatctccgggggcaagctggtggtgaaggtgcggggctccggcctggagctgcggagcatgaacgccagccagctcctgatcaccggcgtcattacggccgtggagctggaataggggggcggaggcatgctgaagcggatggtcaacgccctgcgggggagcgtccggctggaggtgtccggggcctttccggagcggtttctcaacctctgcgcccagcggggcattgtgttctggaacgtggagtggctggaggccacccgcctgcgcctcaccgtcacccggcagggaagcggcccggcccgggcgctgggggacaaggtgctgtgtaccgtggtgccggcggaacagtccggcgtgcccttttttctgggccggttccggcggcgctatgccctgctggtggggctggccctttccctgacggcggtatgcgtcctctctcagtttgtgctcaccatcgaagtggagggcaacgaggcggtctccacagcggagatcctcaccgagctgcggcggcaggggctgcggccgggggtatacggccccggactggacgaggggaccatcagcagcgcggccctgctgggcctgcccgagctggcctggatgtcggtcaacctccacggcacccgggcggaggtgctggtgcgggaggcggtgcctgcgcccgaagtggatgatgaggagcaggtgggcagcattgtggcccggtcctccggcattgtgacccatatcgagcccctcagcggggaagcgctggtggcccagggggacacggtgctggccggggaggtgctcatctccggcgcggtgaccctggatgccccccagtacagcgagctggagaacctgggccaaatactggtgcgggcccagggacaggtctttgcccggacgtggcacaccatgacggcctccatccccctggaggcccaggtgaaatcgtataccggcgagaaggccagccgctggaccttgagcatcctgggacatcgcatcgattttttcggaaagagtggaatttccttccctgagtatgataaaataacagatacctgggcgctcaccctgcccggcggccgggagatgcccctggccctgagccgggagacctgccgggcctataccctcgccgccgcgccggtggacgcggacgcagcggagcggctgctggaggagcggctgctggaggcccttcgggcgcggctgggagacggcgaggtggtgcataccagcttctcctccgcacagcgggacggacggctggaggtcaccctccaggccgagtgcacggaggagatcgggcgctttgtgccgctggagtctattacagaagaaaatgaggccgaaccatgatcgaacagaccatcagcatcgagcgcattgaagatgtcatcgacatcttcggctcgtttgacgaaaacatcaagctcattgagcacgagctggacgtctcggtggtgagccgggacgaccagctcaagatctccggggaggcggagaacgtcctttacgccgtcaaggcggtccagggcctgctgggcctggccgggcggaaggagaccatcaccgagcagaacgtccgctacatcatcaatctggtgaaggcgggcaacgaggagcacatcaacgacatcgcacgggatgtgctctgcgtcaccgccaagggcaagcccatcaagcccaagaccctgggccagaagcggtatgtggacgctatcaagaagaacaccatcaccctgggcatcggcccggcgggcaccggcaagacctacctggcggtggccgccgccgtggccgccttccgggacaagcaggtcaaccgcatcatcctcacccgcccggcggtggaggcaggggagcggctgggcttcctgcccggcgatctgcagagcaaggtggacccctatctgcggcccctgtacgacgccctcttcgacatgctgggggcggagacctataacaaatacctggagcggggcagcatcgaggtggcccccctggcctacatgcggggccgcaccctggacgactccttcatcattctggacgaggctcagaacacctcccgggagcagatgaagatgttcctcacccgcctgggcttcggctccaagatcgtcatcaccggcgacatcacccagatcgacctgccccgggacacggtgtccgggctgaaggaggccatgcgggtgctggacggcgtggaggacatcgccatttgcaggctcaacgaggccgacgtggtgcgccacgtgatcgtccagcgcatcatcaaggcctatgaggaggacgaaaagaggaagggaaagcgatgaaccacgaaattctgatcgagaccgaggtggatggcgcggagccctacgccgcgctgctgcgccgggtgatccccgccgtcctggacgcggagcgcgtgcccttcgcctgcgaggtggacgtgctcttcaccgacgacgcgggtatccacgccatcaacctggagcagcggggcgtggaccggcccaccgacgtgctctccttccccatgttccagcttacccccggtgcgccgcccaccctggacgacgtagaggccgaccctggcaccggactggtccctctgggggacatggtgctctccctggagcgggcggaagcccagggggcggagtacggccacggcgcggagcgggaggcggcctacctggccgtccactcggtgctccacctgctgggctacgaccacctggatgagggcccgatgaaggcccagatgcgggaacgcgaggaggccatcctggccgccctgggcatcacccgggagggcgcggatggataagaggcttttgcggtacgccggcggcggcggggcgatctccctgctcgcctgcgggctgctgtgcatggcgctgggcgcgctggcgggcggagacgtggccgggctggtggcctgcggcgtgattttcgccctgcccggcgtcgtattcggctgtgcctacggcctgtatgaggcgctgaaggggagagacgatccggacgcgtagggcgcggcatccttgacgcgctgaccttccgtaacgatttacacaccatttgcaggggactcggctgccgggccgctgaacgactccgcgccttaccacagcctgcgcctgcgcagacgcgaatgtgctcggccgcccctgtcggaaaaaattatcataaaaccgctcaagaaagttgaggatcacctatggaaattagaaaatccggaatgatcagcatcgtgggccgccccaacgtgggtaagtccaccctgaccaacgccctggtgggcgagaagatcgccatcgtcaccaacaagccccagaccacccgcaaccgcatctgcgcggtggtgaaccgggagggctgccagttcgtcttcctggacacccccggcctgcacaaggcccgcacccgcctgggggactacatggtgaaggtggtcaaggagagcgtggccgacgtggacgcggtgcttctgctggtggagccgatcccccacatcggcgggccggaggcggagctgatccggcgcatcaaggagctgaacgtccccgccgtgctggtcatcaacaagatcgacacggtggagaaggaggagctgctctccgtcatgcaggtctacggcgcggcccacgacttcgccgccatcgtgcccatctctgccaagcggaacgagggggtggacgagctgctgggcttgctggcccagttcctgcccgaggggccccagctcttcccggaggacatggtcaccgaccagccggaacgccaggtgtgcgccgagatcatccgggagaagctgctgctctgcctggacaaggaaattccccacggcaccgccgtggagatcaccaccttttccgagcgggacgacggtatcatcgacctggacgctaccatttattgtgaaaaggccagccacaaggggatcatcatcggcaagggcggggccatgctcaagaagatctccaccctggcccgcaccgacattgaggcctttatgggcacgaaggtgtttctccagacctgggtgaaggtaaaagaaaactggagagataatatgaatttgatcaagaatttcggataccgggacgagtaagggcgcagaaattaccgctcataaacggaacgcggccagccaacctaaagacagaaaggggggctgtgccatgagctgggcggagctgctctggcggctgtttttgcagaccggcctgccggaggtctacagcctttaccggagggtgaagggctgagcacgcgggcgcggcgcgcccgcatacataatagtggagggaagcccatgcacatcagcacccagggcctggtgctccgggaggtcaactacaaggagtcggacaagctgctcaccgtgctcaccgctgaggggggcaagcgcacggtcaaggcccggggctgccgccggaagggcagtcccctggccgccgcggcccagctcctggtctattcggacatgaccctgtttgaataccgggactacttcaccctcaacgaggcggagtccctccagcagttctggcgcgtcagatccgatctggagaggctgagcctggcctcctacttcgcggaggtgatggaggcggtggcggtggaggggcggcccgatccgccggccctctccctcatccttaactccctctatgccctggacaggctgaaccggcccctggagctggtaaaggcggccttcgagctcaagctcatgtgcctggaggggtacgagcccctgctggacgcctgtgcggtgtgcggcgcgccggagccggagccgcctctgttccacctgaacgagggggtgctctgctgcgccgcctgccggacggaggcgggggagggagccgccgtccccttggaggggggagccctggcggccatgcgtcacatcgtctacggcgatcccaagcgcctgttctccttccggctggagggggcgggcctgtcctgcctgtcccacgtctgccagcgatttctgaccacgcagcttgaccggggctttcgtaccctggatttttatcaacaatgggggaattgaatatggaactgtttgtagcggacgcctttaccacccggcgcttctccggcaatcaggccggtgtggccctgctgggggaggcggatttcccggaggaggggttcatgcgggccctggccggggagctgaagcactcggagaccgcctttgtccgccggacgggggagggctccttccacatccgctatttcacccccgcggaggaggtggacctctgcggccacgccaccatcgcctccttcaccgtcctgcgggagacgggggctatcgggccgggtacgtatgccctgcacacccgctccggagacctgtccatccaggtgggcgcggacgcggtgtggatggatatggcgccccctgccgacggccggagcttttcagaggaggagcaggcggagctgtacgccgcctacggcctgtccctggccgaccggccggagggcctggaggcccaggcggtgagcaccggcctgctggatatcctgctgcccgtccgggatctggccgccctggagcgggcggagcagaacgagggggaggtcacccgcctgtcggagcgctacggcgtggtgggggtgcacatgttctgcccccatacccccgacgccgcggcccactgccgcaacttcgcccccctgtacgccatcccggaggaggcggccaccggcacctccaacggggcgctgacctactatctgtaccgccgggggctgacggccgccggggcggagaaccgctttgttcagggggagaagatgggtaagccctcggagatcctcagccgtctcacggacgggggggacggcgtcaaggttcaggtgggcggccgggcggtgctcgccctgcggtgtgagctgctgtgatcatgccggatgccattccgccggagctgctggccccctgcggaatgaactgccaggtgtgctaccggcacctgactccccggcgggcctgcctcgggtgcaggggcggcgcgtcgaacaagccgccccactgccgggactgcgccctgaaagcttgcgcggcggagcggggcgtggcattttgcgccgcctgtccccggtttccatgcaagtccatggcggcgctggaaaagacctatcaaaagcgttgggggatcagcctggcggagactggacgccgggccgccgcgggagaggcggaggcccttctggccgggcagcggaggcggtggctctgcacctgcggcggggtgatctccctccacgatggagtctgctcagagtgcgggcggcccgtggactaggagatatgaaactgccggatgatccccacactcatgtactcgcccatctcgcaggcgagctggtccagcagcaggtaggacgcgctgatggcgtggtaattgcccagcagatcctggtcggcggcatcgcagagcagggtggtattgtggataaacatgctgctccataaactggcgtcccagtgggggttgagcgcggacagccgggcggcggtgagccggttgaggtccagccactggcagcggatgcgctcagcctggctgcgctgccgcgcgtccagcgcgtccagataagcggcgtagtagcggtagagcggagagcctgccgctgcggtgccggtgatgagctggatgccgtagtagcgctccatgatctggtcgtactgggcgggctgggcctgcagctcccgatagatgctgtccacgttttccgcgtggaacagccggctctgcatatacatgagggcccagaaggtgctcccccgccacgcattgatacaggtattgagtaatatgagctgatgctcggagaacgtatataagtcaagccgtttctgttccataagatccctcctgcccatagggtatgcgcctggggggcttcgggtgcgcgaatcttggggcacaggcgcggcgctccgcggaacaacgcggcaatcaaacagcaaggaaacgagttatgaccgatttatttgaaaaatccattcagattctggaactgcccaaggtgcttgagcgcctggccggccaggctgtgacccaggagggcaaggagcactgcctggcgctgcggcccatgaccgacccggacgatgtccagcgggcgctggatgagaccagcgccgctgtggacatgagcgccctgcggggcagcccctccttctctggcgtcaagccggtggcggcctccctccagcgggcccacatggggggcgcgctcaacacccgggagctgctggacatcgcggcggtgctgcgggcggcccgctccgccagggagtacggtgagggggacgggcggaaaaagacctgcatcgaccacctgttccgctccctgaccgccaaccgctttctggaggacaagatcaccggctccatcgtgggagaggaggagatcgccgacgccgccagcccggaactggcctccatccggcggcacatccgggccaccgcctccaaggtgcgggacatcctcaacaagctcctctcatccaaccaggccaaatatctccaggaggccatcatcacccagcgcaacgaccgcttcgtggtgcccgtcaagtcggagcacaagaacgacgtgcccggcctggtgcacgacgtgtcctcctccggggccaccttcttcatcgagcccatgggggtggtgaaggccaacaacgagctcaaggagctccaggccagggaggagaaggagattgagcgcatccttgcggagctgtccgccgagtgcgcccagttcaaggacgatatcactcaggactacgatctgctcatccttctggatgtgatcttcgcccgggccaagctggcctaccggatgcgggcctgcgcccccagaatcgtggagcgcggcctgtacctgcggaaagcccgccaccccctgctggagccggacagggcggtggccaacgacctgatgctgggggaggacttcgacaccctggtgatcaccggccccaacaccggcggcaagacggtgaccatcaagaccatcggcctgctcaccctcatggcccagtgcggcctgcatatccccgtctccgacgacagccgggtaaaggtgttccgccgggtgctggccgacgtgggcgacgagcagtccatcgctcagaacttgtccacattttcctcccacatggtgaacattgtgggcatcctgggggaggcggacggcgagacgctgatcctctttgacgagctgggggcgggtaccgaccccatcgagggcgcggccctggccgccgccatcatcgagagcgcccgggagatgggggccctggtggccgccactacccactacgccgagctgaaggtgtacgccatgaccacgccgggggtggagaacgcctcctgtgagttcaacgtggactccctggcccccacctaccgtctgctcatcggcatccccggcaagtccaacgcctttgccatttcggagcggctgggcctgcccaagtctatcatccagaaggccgccgcccgcatcgacgcggagaacgtccgcttcgaggacgtgctcacccaactggacgagcagcgccaggagatggagcgggagaaggaggccgccgcccggctccggcgggagatggaggagacggccaaggcctcccgggagtacaaggccaagatggaggccgagcgggccaaggcggtggagaaggcccaggcggaggcccgggccattctggacgaggccagggacaccgccgaccaggtattcaaggagctcaacgacatgcgccgccgccagcggaaagaggaagactggcagcgggtcaacgacgagcgggccgccctgcgccgcagcctcaacgaggcggaggggaagctgggggcccggccggaggagccggccccgccccccacccggccggcccgggcgggcgacacggtggagctggtgaagatgggcacccaggccaccgtcctgtcggtcaacaaggacggctccctccagctccaggcggggattctgaagatcaccgccaggcaggaggaggtgcgcgtggtggagggggagacccagcagtccgccaagaaggtggtggcccgggcggagcacaagctgcgctccctgggggcctcgccggaggtggatctccggggcatgatgaccgacgaggccatcggggcgctggatctcttcctggacaacgcggtgctgggcaagctcaacgaggtgcgcatcatccacggcaagggcaccggcgcggtgcgcaaggcagtgcgggagcacctcaagcgcagccgctacgtcaagtccttccgccccggccgctacggcgaaggcgaggatggtgtgaccatcgccgagcttcggtagagcagcccccgtcccccgcgggagcgcgtggggggcctccggggggaatcgattccccccggaaggcgcggctttggagcgaagcgacaggctttccgcagaaagcctccgcgccgtgaggacggcgtaacgagcgccaggctgcggcaggcggaatgtctgccatctgcggacattcgtgccccagaggggaaggagtaaactggttcgtcaatcaaaccagtttcttcaacttaatttgtgtattttgtcattgacggtttgggataaatttgatattctatagtacgaagtatgcgaatgcatcttggggggaaaacgctatgtatatgaaagaggcagtcgtgaacaaccaggtcggcctgcatgcgagaccggccacgtttttcatccagaaagccaacgagttcaagagctccatttgggtggagaaggacgagcgcagagtgaacgccaagagcctgctgggtgtgctctctctgggcattgtcaaggggacttccatcaacctcattgcagacggccccgacgagaaagaagcggtggaggctctgattgagctgatctcctccaacttctccgagtaagcgaacgagcgagagaaaaaagcgccgcgtctgcggcgctttttttgatagacgggaggtgtggcttgtgaaggcggagatgactccggagcccatccggcggagcgccctgcgcctgcggctgggcgggctggccctgtgctggcgccgccgcctgctgtggcataccggcggcctgcggtttgcccggccccggccggaggtggagtgcccctacctgcgggcggagcacgccacgcccctgctgcgcaggctgcggggggaggacatggccctccagcgcagcaaggtcaccaacctgcgcctggcggcggcccgtctggacggcctgaccctgcggccgggggagaccctctccttctggcgggccgtgggcaagcccacccggcggaggggctatgtggaggggatgattctgcgcaacggccgcgtggcctccggcgtggggggcggcctgtgccagatgaccaacctgctctactggatgaccctccacacccccctcaccgtcaccgagcggtggcggcacggctacgacgtgtttcccgactccaaccgcacccagccctttggcagcggggccacctgcttctacaactacatggatctcatggtgcgcaacgacacccccgacacctggcggctggtgctccaggtgacggacacccatctggagggggagtggcgggccgacggcccccagacctgccggtacgaggtctatgagaaggagcacgagatccggggggagtactggggcggcttcacccggcacaacaccctgttccgccgggtgctgggtatggacggcgcggagctgggggaagaattcatcacggagaaccacgccatcatgatgtataatcccatgctggaggagactgccccgtaggggcggcctttatgaccgcccgccctgcgggagagatatgcccgccggtacggcataagaagggcggaaaacgcaaagcctgtccggtaggggcgcacggtgtgcgcctgccggtgccagcccggtggaagggggcggcgggccgatgtgggcatcggcccctacggtgcccctccttcgatagacgcaaagaaaagcccatgcccattctcccaaacgcacgaggggcgtttggggctcctaggggacgccgctgcgcccagcggcagggtatgagaaatctggcggaaaggaggacgcgggccgatgtgggcatcggcccctacgagtcatgacctttgacgaattaaaagaaaaagcccatgcccattccccaaacgaacgggttcgtttggggcccccggaggatgatttgacatcctcggcgggagtgaatcccgcctgcggcgaggtttggcctgcggccaaacgctcggacggcgcgaagcgccgggacgctgccgcgtccagcggcagggcataagagacccaggcagagaggagggcatacttccccgattatgactttcgacgaactcaaggaaaaagcgcatgccctgccgctgaagccgggcgtgtatatcatgcaggacgccaaaaacgaggtcatctacgtgggcaaggccaaggcgctgaagaaccgggtgagccagtacttcgcaaacctggcctcccacacggagaagacccgggccatggtgagccagattgaccacttcgacgtgattgtggccgactcggagtttgaggcgctgattctggagaactccctcatcaagcgccaccagccccactacaacatcctgctcaaggacgacaagggctacccctacatccgcctgacggtgaaggagccctacccccgcttctccctggccaaccgggcggcggaggacggggcgcggtacttcggcccctacggcagccgggggagcacccagaacatcatcgacgccctgcgcgtcgccctgaagctgccctcgtgcagccggaagttcccccgagacatcggaaaggagcggccctgcctgaattaccacatgggccagtgtgacggctactgccggaaggagatggatcagacccgctaccgggaggccatcgaccaggcggtgcgcctgctggaggggcagttcaaggaggtgggggaggagctgctggccgagatggagcaggcggcggaggagctgcgcttcgagaaggccgccgagctgcgggaccgcttcaaggccatcgagctgctgggcaagcggcagaaggtggtggcgggctccctggcggacaccgacgtggtgggcttccacaagggggaggccacccggagctgcttcgtggtgctccactatgtggagggcgagctggcggccaaggactgggagctcatcgagacccccatggaggaggatacggcggacatcctctccgccctggtgggacagtactacggcggccggggccgcctgccccggcagatcctcctgccctgcgagctggaggacgcggtgcccctgatgcgccttttgtccgggcaggcggggcacagggtggagctgatcaccccccagcggggggccaagatggatctcatccgcctggccaacaaaaacgcggtggaggaggtggagcgctggaccacccgggaggagcggcagagcaagctgatggagctgctgggccggatgctggatctggacgcgcccccccggcgcatcgagtcctacgacatctccaaccagggcgccgacgacattgtggcctccatggtggtgtacgtcaacgcaaagcccctcaagcgggactaccgccgcttcaagctgaaggacatggacggccccgacgattatgcctccatggagcaggtgctgacgcggcgcttccagcgctatctggacggggacgagaagttttccggcaagcccgacctgctcctcatcgacggcggcgtcaaccacgccaacgtggcggtgcgggtgctggagagcctgggcctgaccattcccgtcttcggcatggtgaaggacgaccgccaccgcacccgcgccctggtcacccccgagggaaaggagatcggcatccagggaaaccaggccatcttctccctcatcggccagatccaggaggagacccaccgctttgccatcgagttccaccgccagcagcagaaccagcgggtgcgcggctcggtgctcgaccagatccccggcgtgggggagaagcggcgggctgagctgctcaaggcgtttaagagcatcaaaaatatcaaatcggccaccctggcggagctggaggatgcagtgcccaaaaacaccgcccgggcggtctatgactttttccatcagaaaggggaggaaccatcatgcgagtgattaccggaacggcccgggggatgcggctcaaagagttgcccgggctggagacccggcccaccaccgacaaggtgaaggagtcggtcttcaacatcgtgcagtttgacgtagagggccggcgagtgctggatctcttcggcggtactggccagatgggcatcgaggccctgtcccggggcgcggcgtcctgcacctttgtggacgtgcggaaggaggccgccgcggtcatccgggccaacctggcccacaccaagctagaggagcaggggaaggtggtgcagggggactacctggccttcctcaccggctgccgggagaaattcgacctggtgttcctggacccgccctacggcgccgggatgctggaaaaggccctggaggccatcgccaagattgacattatgacggaaaatggtataatagtctgcgaaagtgcggcggagagcgcccttccggagctggccgccccctatgccaaggggcgggattaccgctacggcaagatcaagatcacgctgtaccaccgtgcggtctgacgggctgtgcgacagttaaggatgtgaagcccacatgaagaccgccatctatcccggcagcttcgaccccatcactctgggacacctgaacatcatcaagcgggccgccgtgtgctttgacaagctgatcgtgtgcgtcatggtcaactcggagaaggtcaaccggggactgtttaccccggaggagcgggtggagctcatccgccgggtggtggccaagctgcctaacgtggaggcggactgttcctccaccctcattgccgagtacgcccgccagaagcgggcctgcactctggtgaagggcctgcgggcggtgtccgactacgagaatgagctgcagatggcgctcatcaaccgcaagctgaatccccggctggagaccatgttcctgccctccagcgcaaaatacacctatgtgagctccagcatggtcaaagagatggcccgctatggggcggagctctctgactttgtaccccgggagatcatcggggacgtacaacgaaaaatggacagcaggagggatggctgatggccaccggcgtggaagaattactggatatgctctttgagatgatcgacgaggccaagagcatgcccctgagcagtgacaagtgcattctggaacgggacaaggccctggatctgctggacgagatccgggctcagttccccatggagctggccgaggccaagaagctcatcgctgcccggacggagtatatcgcctccgccaagcgggagggggagctcatccgcaagcaggcggaggagaaggcacgccagatggtgtcggaggacgagctgctggcccagaccaaacagaaggcaaacgagctgatgcgcactgcggaggagcgcagccgcgacctgcggaaggcagccaacgactactgcgaggatgccctgcgccgcaccgaggaggcggtggccgaggcctacgacgagatcaagaagtcgcgggcccggttccgtgccttggcaggaggcggtgccccggctggccgccagccctacgacgtggaggcggaataaaaccaaacaccaaacagagagcccgccggcggaacttccgccggcgggctttgagatgatcgataaaccttcctgccgaaggcttcggagggaggaatagtgtgaaagggaaccgtcagggttccctttcgcgttcgatcaaacgcctttttgaacctttttcgagggttcaaaaaggctctctgcctgtcgagaacttttcgacaggcagagagcccgccggcggaacttccgccggcgggctctgctttgctgtgggagagggctcagggggctttgtagtcgggggcgcgtccgatctcctggatgagctccttcatagccgccgccatggcgtcgatgtcggcgtggttgttgaagtactggcaggagatgcggaagccgcccacgtagtcggtgaagcgctgggcaataaaaatcttgcgggcgtggagctgcttgagtacccagcggtccacatccagatcgtcatagaggcgggcaatgacgatgccgccccgccggcccgggtcgcggtgggtgatgatggtggcgccgatggcctccaattgatccatgcagtaggcgctgagctcccagatgtgttcctggatgttctcgatgccgatctcgttgaccaggcccaggctctcccccagggcaatggcgccggtgtagttggaggtgccgccgatttcgtacttgcgggcggtctccgggaaggtccagtcgtggacggagggagcggcgggattctcccagtaggcgccccagccgccttcgggaacggtggtgttcaggtagccggcatagctctgcttgatcttggacagggagttcttgttgacatagagcacgccggtgccgtaggggctgttcagccacttgtggccgccggccaccagtagatcaaagtggcactgcttggtgtcaatcttggtgacgcccaactgctgcaccgcgtccaccaccaggaagatccccttttcctggcagaaatcaccgatgtccttcatgtcgctggcccagccgatgcaccactccagggtggacatgacgatgatgcgggtcctctcatcggccagggcggcgaagtcgtccaccgtgaagcggttgtccttggtcttgcatacccggatctcgatcttcttctcccggcgcatcacacaccagggcagggccacctgaatgaactccagattggtggtgatgatgttgtcgccgtcggccagctcaatgccgcgggcggcgatgttcagcccgtgggaggtgctctccaccagggcgatctcctccgggtcggcgttgagcagcttggcggcttcgtcgtatgccttgccgcgcagcgagtccatggcgatgtggtgggcgctggagttctcttcctcctgggtggcggtcatgtcggcgaaggccttcaccgcccgcaccgtgcgctggggggcgaagctgacgcaggccgcgtcgagaaagaccatctgctccagaacgggccactcctgcttgcggatcgcttcaaaatcgacggacataagtactacctcctatatttttgtgggtgatggctgggttgtattcctctggttttccttcactggtgaagcaacatccctccaatcgactgactttttgagatcaaacgctataatggtaaaaaattaccaattatggagttggaaaaacagattatgacagagaccggtattctgacggatgcctcaccctggatcagcgtcgagccggcggcatggcgcccgctgaccgaggggagaacgccgcgcctgttccgaaaaaagacctttctctacactcaggggcagccggcggagcatttttacatcattcagcgggggcgggcctgcatctctacctcacgggcggacggccacgagaaacagctctacatcgcggagcggggcgccctgtgcggggagagcgcctgtctgcagcggcagccccacgcgtcggcggccctggcgattgtggacacctgggcctatgccgtcccccggctggacatgctggaggcgctgcgggaggactgggcgctgaatcagcggttcctggagctctgctttcggaaaaacacggtgctgctcggtcaggtgcgggagctctcctttgatcaggcggagcggcgcattgcccggaccctcctcaatctggcggcccagtatgggcggccctgcccggagggggtgcgcatctccatccgctttacccaccaggatgtggccggtatcatcaatacaagccgcatcaccaccaacaaggtgatgaagcgcatggaggaggaggggatactcctcaaacgggagggccgctatatcctgcgggcccttcccgccttggagcggctggcgcggggagagggtcagtagcgcacagccctttcgctctcccggaaggcgcggctgtctggcaggagggtgcgcccgtagccggagacgatggcgaagatagtcataaccagcaaaagaatgggatagaactggtgggtgacgatctccagtgtggagacgggaaccgcgccgggcaggtcgacggctgtcatcatggcggcgcacaccaccggcaccatatagggcatcaggtagttgagggtgccgccggagcagatgaggaggttggcggtgcggtagccgtggagctgatactcctcccccagccgcttggccagggggccggtgcccacgatggccgcggtgttcaggccggtggccacgttgagcaggatacagatggcgacgatggcgccctcggcggagcggggaccgacaatgaagcggtccatggactggatcatcatatcaatgcagccgcccttttccagcaggtggatctgggcgaacagcagcataaccagcaggatggtggggaccgcgccctcgatgccctccatgatgaggccgcctgcgctcaggggttccgggacggagatgatgtcgctgaaggtgatggtgccggtgaccagtcccaggagtacgccggtgacgatgccatagctcagcgcctccagcaggtggcgctggagcaggcagaagaccaccaccaccacaggcaccagcaggaacagcagggccgtaggccggaccgcggcactctggacggcggagagatccgcggcctcaccgcgggagccaagcgccagatagaggatcagcgtcaacgccgcggccggcaggacatatttcaggcggctgcggaaaacgccgcccaggtccaccttctgagaggaggaggccgcaatcagagtgtccgacaccggggagacgttgtcgccgaaggccgctcccgatacgatggcgccgatcatcagcgccggcgtggccccgaccagatagccgatggggtaaagaatggggccgaccacgaagatggtgcccaccgaggtcccggtggagaaggcgatcaggcaggtgagcagaaaagaggcggccacgaacttgttgcccaggaagttgagctcaatgagatagtgggccagggtgtccaccaggccgctggtctcaatgagctgcccgcagattccggccagcagaaccgccatgatcaggatgccccccaccttgttggtggcgccctcgatgatggcctcgcagtaggccgtcttgtccttggccaggaacaggcagacgatcatggggaggagaaagaccacccagtattccggtacgtccgcctgcttgaccgcgatgtaaattagccccacgatggccagcaggatgggcgcgaaggccacccactttccgccgtagtaggtgatgtgcgcttccggtgcggcttgtgtttgatccataggtacccccttttcagcacggatgtgttcaattttgtggaacagatatctgttgtggttaaaagtatacctgcattttccataaatactattaaatgctttacaaaagaggtggtgtttttgggagaatatacccgaatcccgaaccgcgtgcgcggcgggactgcaccgttttttgtttacgtaataccgcaaaatataggacttttttgccgccaaaccgcaagggatggcggttttttgataccatttgtaacgaaatgcaatcgaacatatgtttttagtgccgaaaagcaggggtttcagtggaaaaatcggcatttttcccgttaaaaaagaagaaaaaactgttgcaattctgtaacagaacatttatactagagaagaaagtggggcgaagtggagcaaatcaccgctcttaagcagtaaagtggggggaagtgagcagcatgaccggcacctatgagcacagcattgatgccaagggccgtctgttcattcccgcaaagctccgggaggagctgggtgtcaccttctatctggcgatgggtgtagacgcctgcctggccatctatccccagtctacctgggaccggtttacagaaaaattttcctccctgcctatgagtcaatccaaggccatgcgccccctattcgccaacgcggccaagtgtgaactggacagccagggccgcatcgtcattccccagaagctgcgcaggtatgccggtctggacaaggacgtggtgatcctgggtgtcaacgaccgggcggagatctggagcgcggacgcatggcaggcccaggaggaggaagagatgacgccggagaagatgtcggcctgtatggaggcgcttggattctgatatgagtgagcaggtattttcccacaagccggtgctgctggacgagtgcattgaggccctggccatccggccggagggcgtgtatctggatggcactctgggccgggcgggccacagccgggagattgtccggcggctgaccaccgggcggctcatctgcgtggaccgggatcaggcggctctggacgcggcggaggagcggctggcgccgtggcgggagcgggtcaccctggtacacagcaatttctgtgcgctggacgccatcctggacgggctgggcctggacggggtggacggcatgctctttgatctgggggtgtcctccccccagttggacgacgcatcccggggcttttcctacaggacggacgcccccctggatatgcgcatggatcagaccgacaccctgacggcccgggcggtggtcaacgagtggccccaggaggagctgcggcgcatcctctggcaatatggggaggagcggtacgcccccgccgtcgcgggagccatcgtccgggccagggacaagcgccccattgagaccacgctggagctggtggaggtcgtcaagggggccatgccccctgcggccctgcgggagaaacagcacccggccaagcggaccttccaggccatccgcatcgccgtcaacgacgagctgggctcggtggaccggatggtgcgggaggcggtgccccggctgaaccccggtgggcggctggcggtgatctccttccactcgctggaggaccgtatcgtgaaaaatgccctggcggctttcgccaaggggtgcacctgtccgccggattttcccgtctgtgtgtgcgggaagaagccccaggtgaagctggtcaacaaaaagcccattgtctccggagcggcagagctggaggagaacccccgggcccgcagcgccaagctccgggtagcggaaaaacggtagaagcacggaatttaccaaagagattggagtggacggactcatggcaactgccgtcaagcgcagaagcagatacacgaattacagccgcgtaccctatgacgcgtatgatggctccgcggcgcggcagctccagcgggaggaggttcttcggcccaggcccatggttcggccgcgggagcgggcggtggtccggccccgggtgcgggtacgggaggcgggactggtttcccccttcgctgtggtgggatttctggcggtgggcgtgtttgccgtgctgctgctgttcagctatgtgcagttgaccaccatctcccagcaggtggtggagctgcgcagtgagatgactgctctccagtcggaggaggccaagctgcgcaccgcgtatgagctgtcttatgatctgagcagcattgaggagaccatgacagccagtggtgccatggttcggccgcagaacgggcaggtggtgtatgtggacctgtccgggccggacaccgtgacctttttcaaccaggacgaggcggtcgccggactggacggcatgtttgagagtgtaaagtccattgcctccgagattgtggcatatttccagtgagtacggccatatagtgatctgcagaccccagagaaacagacgggctgccccgggcggcccttgaagagaacgagcagagagggcgtaagaaaagcaattttcttacgccctcctgcgatatatcacccaatcccgcgggagagcggaagacgagatttcttgagtgaggtgagccagccatggcagacagaaagagaaagcgtatggtccagcagcagccggaccggcgggcgaaccgcaccattttggtgcgcaccctgttcctgctgacactgttcggcgtggcggcgttcgtgccgctgctggtccggctctggcagatccagatccgcgactacgacaaataccagggaatggcggtggagcagcagaccgccgacagcacggtggaggccaaccggggcaccatctacgaccgaagcggggagactctggccatgagcgccacggtctacaacatccagctctcccccaaagagatcctggcctgccaggaggcgtatcgagagaaggcggcgaacgcagcagagaatgggaagacactggactacccggagcccaccaacgagttcattgcctccaacctggcccaaatcctggatctggacgaggcggacatcctcaagcgcctggccaagaccagctccatgtatgagatgatcaaatggcgggtggaggacgacgagcgggacgcggtgatctccttcatcaacgaaaaccatatcaccggcatttacaccccgcccaccaccaagcgctactatcccaaaaacagcctggcggcccaggtgatcggctgggtgaattacagcgaaggacggggcgcctatggagttgaggctcagtacgacgaggctctctcgggcgagacggggcggatcgtcaccgccaaaaacggcgacggcacacagatgctctaccgctatgaggactactacgacgccactgacggcgacaatctgaccctgaccctggacagcgctatccagtcctactgtgagagcatcctgaaaaagggcatcgagcagttcgaggtgcaggacggcggcttctgcatcgccatggaccccaatacgggcgaaattctggcctgggccaactcccccacctacgatctgaacaaccccagggtggtgagcgatccggtgctcaaccagtatctggcggacatcgagagcggggcgtacaccaaggaggaggcctaccagaaggcactggcagagggggcttccagcgaggaggcccgcgacaaggccatttctgcggcagagaccgaagtgctttacacccagtggactaacaaggcaatcaccagtacctatgagcccggctccacgttcaagtccatcgtcctggccgccgccctggaggagggcgtggtcaccgagaacagccacttctactgccccggctacatcatggtagagggctggtccaggcccatcagttgctccaagaaggcgccgggccacggggaccaggatctggccctggcggtggcgaactcctgcaacccggccttcgtcaagatcggccaggctctgggagcggagaagttctatgactatctggaggacttcggattcctggagaaaaccggcatcgacatgcagggcgagatggacaccagttccctgatctggccccgggaggacttcaacaccgtccagttggccaccgcatccttcggccagcggttccaggtgacccctattcagctcatcacagcggcctccgccgtcatcaacggcggccacctgatgcagccctatgtggtcagccaggtgaccgacggcgagggcaatgtgctccagcacaatgagcccaacgaggtgcgacaggtggtcagcgcgcagaccagtgagcgctgccgtgcgatcctggagaaggtggtggacggcggcaccggcaagaatgcccgggtggagggctaccgcatcggcggcaagaccggctcctccgagacgctggagaccgaccataccatcgtttccttcctgggcttcgccccagcggatgacccgcaggtgattatcctgctggcctacgacaaccccaagcccgccttccccggctccaataccaccgccggcggctggtatatcagcggcggcaatatggcggcactgatggccggagaactgctggaggatattctgggccacctgggcgtggagaagacctataccgccaacgccgacgtgctggtgcccaacctgtccggactgaatctggcggacgccacatccgccctccagaagaacagcctgaccctgcgcaccgtgggcgacggcggtaccgtcaccggacagatcccggcggcgggggcatccatccccggcggaagccaggtggtgctctacatgggcgaggcggtgcccaccgaccaggtgcaggtgcccagcgtcatcggccttaccgccgagcaggccaggcagaagctggctgatgcgggtctctacatgcgggccactggagccaccgagtacggctctcacgtggtggcctatgaacagtccaccgccgcgggcgcctcggtcaaccggggtaccaccattgaggtacgctttaccgacagcacggccagcggagcgggcctgtaaaaacgggccgacaacacgggaaacggggtgagggcatgaagctgaatgagctgttggacggcgtggcgctggccgcgcggcatgtccaggatgtggaatgttcaggaatctgctgtgacacccgagaaatgacccccggctgcctctttgtggcgcttccggggtacaagaccgatggacaccggtacatccggcaggccctggaacggggagcggcggcggtgctctgccagcgccccccggagggggagggcccctggctggtgacggaggacacccgggccgccctggccatcgcctcagccaactggttcggccatccggcccgggaactgaccctgctggcggtcaccgggaccaacggaaagaccaccaccacctatctgctcaaggccatgctggaggggtgcctccacacaaaggtggggctgatcggcaccaaccagaacctgatcggggaggagagcctgcccgcccaccgcaccacgccggagtcctacgaggtgcaggagctgctgcgggagatggcggatgcggggtgtacccacgtggtgatggaggcatcctcccacgccctggtgctccaccgcctggacggcatccccttccgggcgggtatcttcaccaatctgacccaggaccacctggacttccacggtaccatggaggcctaccgggacgccaaggggctgctgttccgccagtgcgccgctgcggtgctcaacctggacgacgaggcgggccggtactatgccgaaacggtgccggttccgacctttacttactcggagtgccgggacgaggcggatctcacggccaagaacctccgcctgttccctcagcgggtagagtttgaggcggtgaccagggacgccatttcccgggtaaggctgcctatacccggaggctttaccatctacaacgctctgggtgtgctggcctgcgggctggtgctgggcctgccgctggacggctgtgccgccgcactgggggcggcccggggggtgaagggccgcatcgaggtggtgcccacccccacggactacacggtgctcatcgactacgcccacacccctgacgccctggaaaacatcctcactaccgtgcgggacttcacgccggggcgggtgatctgcctgttcggctgcgggggcgaccgggaccgcaccaagcggccccgtatgggggctgtcgccggggctctggccgacgtggcggtagtcacctcagacaatccccgtactgaggtgcccatggacattatcaacgacattctgcccggcctggagggggctccggcggaggtcgtggtggagcccgaccgtcgcgccgccatccggcgggccctctcgctggcccgggcgggggacacggtggtgctggccggtaagggccacgagacctatcaggaggtggacggcgtggagtaccacctggacgagcgggaggaaatcgccgcctatttcgcctgagaggcgaggaagtttgttgctttttcgagtggaaaccatgccgggattgtgataaaatatcgaaccggctcacatgggccgcaatttggaatgttgagaggctttggaggttgcaaaagagatgttaaggattgtaatcagctttgtggtggcctttgcggcggccgccctgggcgggaaggggctcatccccctgctgcggcgcatgaaggccgggcagtccatcaaggagatcggccccacctggcacatgtcgaagcaggggacgcccaccatgggagggctgatgttcatcatcggctccgctgcggcggttctgctgctggggtggccggactttgccgcagggcgcttcggcggcggctttgtgctcctgttcgccctggtgttcggcgtgatcggctatattgacgactatgtgaaggtgaaaaagcaccagaacaccggcctgaccgcaccgcagaagtttctgctccagttggcggcggccatcgtgttcacggtgctgatgcgcaaccaccactatctgacccccgacctttacatcccctttgtgaacgtgaccctgtccctcccctggcccgtttatatggtgttcgccgccttcgtcatggtgggcaccgtgaacgccgtcaatatcaccgacggcatcgacggactggccaccggcgtcaccatgcccgtgatgctttttttcaccgccgtggcctgcttctgggggcaactggagctggggatcttctccgccgggctgttcggcgggctgtgcggattcctgatctataacttccaccccgccaaggtctttatgggcgacactggctctctctttctggggggagcggtgtgcggactggccttcgccctggatattcccctggtgctcatcctggtgggcatcatctacatcctggagaccctgtccgacattctccaggtgggctacttcaagctgacccacggcaagcggatctttcgcatggcgcccctgcaccaccacctggagctgggcggctggagcgaggtgaagctgttctgtgtgttctccggcgtgaccctgctggcctgtgtgctggccttccttggagtcatgggccggtaatccaccctgagttgagagaaaggaggggagccccctggcaaaacgcaagcgcgacctgaccattgaggagcaactggcccggggacccatggacctgcccttcctgatgctggtgctcctgctcaccggcatcggcgtgatcatggtgttttccgcctcctacgccacggcgtacttgcaggaggacaaaagccccaccttctacttcttccgccaagccctctttgccgcggctggcctgaccgtgatgtatatcacctcgaagatcaactaccagaccttccgctggctgtcggtcttcgcccttgggctggctgtcctgctgctcatcgcggtgctcatccccggcatccacaccagccgttccgacggcgtgaagcggtggatcgccgtaccgggcatcggaaccttccagccgtcggagatcgccaaggtggccgtcatcatgtacttttccgcccggctgtccaagcggaacacggagaagccgcgccgtctctccccccgcagtccgctcagcggtgtggtgggcttcctggaccgcatcggctttctggaactggtgccctatggactcatcctgctgctgattgtgggcctgatgatgctggagccccacatgtcgggcacaatcctgattctggccggcgcggcggcggtgctttttgccgccggcatcaagctctactggtttgccggcggcggcgcggccctgatggggctggtggtgctcatgatgagcggctaccagtccacccgcatcctggtgtggcaggatccctgggcttatccccgggacggcggctatcagattatccagtccctctacgccatcggctccggcggcctgctgggcctgggcctgggcaagagccggcagaagttcctctacctgcccgagccggagaacgacttcatctttgccatcgtgtgcgaggagctgggcctgatcggggccggaatcgtcctcattctctttgccctgctggtcatgcggggctactggattgccatccacgccagagaccgcttcggcgcccttctggtggtgggtatcaccaccctgaccgcggtacaggtgttcctgaacatctccgtggtcaccaacctgatccctaccaccggcatctccctgccgtttttcagttacgggggtacggcgctgatgatccaactggcggagatgggcatcatcctttccgtttcccggcagatcccggcgccgagacaggagtaaaaaagtccagggaggacgctgttcccctgcgcggccagggacagtggtgtgctccgcaggcgcatgtcctgctgcgcacatcctctgaatttctttcaccctatggcgggtgaagctttttaggccgcaggggcgaccagcggccgccctacattacgaggaggagaaaaaaggaatgagagtcctctttacctgcgggggaacggcgggccatgtcaatcccgccgtggccctggcccagatgttccagacccgcaactccggctgtgaggtactgttcgtgggcgccgacggcggcatggagacccggctggtgcccaaggaggggtaccccattgagacggtgaccatcaccaacttccggcggtccctctctccggcctccatcggccacaacgtcagaaccctgctgaatatgaacaagtccaggaagcaggccaacgccatcctggaccgctttcagcctgacctggtggtgggcaccggcggctacgcctccttcccggtggtgaaggccgccgcgaagcgggggattcccaccgccgttcacgagtccaacgccgtccccggcctgaccaccaagaccctgtccaaggtggtggacgtggtgatggtgggctttgaggagagccgaagccactacgacgaccccggaaaggtggtggtcaccggcacgccggtgcgtaccgacttcttccgctatacccggaaggaggcgcgggcagagctgggcctcaccgatgaccggcccctggtgctctctgtgtggggcagcctgggggcggaggtgatgaaccgccagatggcggagtgcatcgccctggagtgccgggacggcgcccccttccaccacatccacggcgcgggccgggactaccgggcggtgctggacgctctccagggcagcagcctggcggaccacccggaggtggatgtgcgggagtatatctacgacatgcccctggtgatggcagccgctgatctggtgctgtgccgggcgggggcgtccaccatcgcggagattgccgccatcgccaagccggcggtgctggtgccctcccccaacgtggtggccgaccaccagaccaagaatgccagggtgctggccaacgccggcggcgcggtactgctgccggagggggagtcctctggagagaagctgtacgcgcttatgaccgggctgctctccgacgccccccggcgggaggccatgagccgcgccctgcgggacatggcggtgcccgacgcggcggagcaaatctaccagactctggtccgtttgatggaaaaacgggccaactgaaccagccgtcctccctccgcataggatagcgtaccaaacgacttgcggaggctggatctatgagtgcttacatcatcgaggggggacaccccctggacggctctgtgcggatacacggggcaaaaaacagcgtactgcccattctggcggcctgccttctggccccgggcgagtgcgtcatccacaactgcccggagctgtccgacgtggcggcctccctggacatcctccggcacctgggctgccgggcggagcggcagggggacgccgtggtggtggacgcctccgcccccacgggctgggacgtgcccgacgcgctgatgcgggagatgcgctcctccgtcatcttcctgggggccatcctgggccgcatgggacgggccgagctgtgcgcccccggcgggtgtgagctggggccccggcccatcgacctccacctgggggccatccggggcctgggcggccgcatcaccgaggacggcggcggcctgcgggctgagggagccctgcggggggcggacctcgtgctctccctgcccagcgtgggggccacggagaacgccatgctggcggcggtgtgcgccgccggcaccaccaccatcaccaacgccgcccgggagccggagatcgtggatctccagggctttctgcgggctataggggcgaaggtgcacggggcgggcagctcggtgatcacggtggagggcggcgtccccctccacggcggcagctatgccgtcatgggcgaccgcatcgtagcggctacttacctggccgcagcggcctccgccggcggcacggtggaggtgacgggggtggactaccgccacctgtccacggtgagcgccgtgctgcgggaggcggggtgcgacgtgcagagtggggcggagtccatccgcctgcgccgggacggccccctccagggggtgcggccggtgcgcacggccccctaccccggcttccccaccgacgcccaggcgccgctcatggccgccctgacccgggggaagggctgcaccgtctttgtggagaacattttcgagagccgctaccgccacgtggatgagctctcccgcatgggggcggacatccgggtggagggccgtgtggcggtggtgtacggcgtgccgcggctccacggggcccaggtgcgggccacggatctccggggcggagcggcgctggcggtggccgccctaggagcggagggacgcagcgagcttgccggtgtgcaccacatcgaccggggctaccagtccctggagggagatctccgccgcctgggcgcagagatccggcggatttaagggttttcttaggatacgttcacaaatccgcaacctttctgtgggatactgacagaaaccagaacagacaggagagcagttggaatggcggcgagaaggaacagacggggacggcggcggaatcgggggcgcttcagcgcgctctataagctgctgtccgttctgatcatcttcgccgccattttgatgggctgtgtggtattcttccgggtgagcaccgtggagatcacgggggactccccctatacggaggaggagatccgccgggtatccggcgtggagcagggggacaacctgtttaccctcaacaaataccagatcagcagccgtatttacacccagctcccctatatcggtaccgtgaattttgagcggaaataccccgatacctttgtcatccacgtgacggccagcgttccggtggcgtggattgagagcggcggcagccgctggctgatggacaccgactgcaagctgctggagagcggcggagcgtccttaacagagggtaaagcccaggtgcgggggctggaggcagtcaatccctcggtgggcagcgtgctgaccgtgccgccggagcagcaggacaagctggaccagctcaagggcttcctggcggccatacaggcccggcagatgacgggcagcctcaccagcttcctggatctcacctccaacaatgaaatccgcttcggctatggggcgaacctgaccgttctgttcccaatgaacggagattttacgcagaagacctattatctacagcagaccctctggaccatggatgagaagggaatcccgcgaaccggcacgttggacttgacctacgacaaccaggagggacatctgctgccgaagcggtggctgccggaggcatccactgcgccggagctcagcccgccgcccgcggcggaggccggaacacaaggagagaacgatgccaatgagaagacagatgcagaataagggggagctcgccgtcatggtggtatgcgtggtggtgggcttcctgttggcggcccaactgcgcagcgtcaagctggcgggggcggccgacgccaccaacgccagccgcctggaaacccttcagaacctctacaacgaggtggtggatcagaaggacggcctggctgaccaggtgaagcagctccagggtgagctggagctctaccgggagcaggccgcctccggcgaggcgggcagccaggccctcaaggccgagctggagcaactggagatcaccgccggactcaccgatgtggagggccccggcgtcaccatcatcctggaggactccagtcaggctaacgttaccggaaacgaggccgactacctcatccacgacaacgacctgctctccgtcatcaatgagctgcgttccgccggggcggaggccatctccctcaacggagagcgtattctggccaccagcgaggtgcgctgcactggcgcggtggtaacggtgaacgggcggcggtacgccgcgccctacgtggtctttgccatcggcgatccggacaccctctacagtgcgctgaccatgcgcaacggcgtggtggacgtgctcagccagtggggcatcaccgtgaaggtcactgccagcgaccagctgctcattccgaaatacaacggcaccgtggagtaccagtacgccaagcccatcccggcggatgagggcggagaggaggcggtgggctgatgctggaactgatcggactggtggccggcctgctcatcggcgcctttttcccctggaccatcccagcccagtggtccctctatgtggccgcagggctgctggccgccctggactccgctttgggcggcttccgggcccgggttaagggggagttcaaactgggggtgttcctctccggcaccatcggaaacgcggctatcgcggtgttcctcacctggctgggccagaagctgggactgcccctctacctggccgccgtgctggtgttcggcacccggatgttccaaaactttgcggaaatccggcgggagctattgacctccaagcaaaagagagctaaaataagtcaagatatagttagagacggggaggacggcacaaaataagtcctttttcggccttacccgcgcagttacaacgaattcggttcacataggaggagcagttatggcgtttggactggataccggtcccgataatgtcgttaccatcaaggtcatcggcgtcggcggcggcggcaacaacgtagtcaaccggatggtgaaatccggcaccaagggtgtggattttatcgcggtcaacacggacaagcaggcgcttgccatttccagcgcgacgtttaagattcagatcggtgagaagctcaccggcgggcagggcgcgggcagcgaccccgaagtggggcgcaagtccgctgaggagagccgttccgctgtgtccaaggccctggaggacgcggacatggtgttcatcaccgccggtatgggcggcggcaccggtaccggcgcggcccccatcgtggccgacatcgccaaggagatgggcatcctcaccgttggcgtggtcaccaagccctttaacttcgagggacgccgccgtatgatgcaggccgagaagggcatcgaggaactccgaacccgggtggactccctggtgatcatccccaatgagcggctgaagtttgccaccgatcagaagatcacctttgccaatgccttcgagatcgccgacgacgtgctccgccaggcggtgcagtctatctccgatctgatcaagaataccggcttcatcaatctggactttgcagacgtcaccgccgtcatgcagaacgcaggcatggcccacatgggcgttggccgcgccggcggcaagaacaaggccgaggatgccgccaagatggccatctccagccccctgctggagacctccatcaacggcgccaagggcgtgctggtcaacgtcaccggctccatggacatcggtctggaggaagtggagatcgcggccaacctggtgcagcaggccgcccaccccgacgcgcttattatcttcggcgccgctttcgacgacactctggaggatgagatccgcgtcaccgtcatcgccaccggctttgaggaggtggagggagctatgcccaacaagcccttcagcgccgctgcggagaagaaggccgaggcccagcctcaggctccggcggcccccgctgcccctgcggaggaggatcccttcgaggacatcttcaagatttttaaccggggcaagtaaacatttattacaaaagcggcccgggccatgtggcccaggccgcttttcccccttttcaaggggagaaagctgtgataccatagagctgaataccgaaaggaggattcccatgctgtttgtctgttaccccaagtgcaccacctgccagaaggccagggcgtggctggaggccaggggtctgcccgctgaggtgcgggacatcaagacccagaaccccactgaggcggagctgcgccgctggcacgccctcagcggcctgcccctcaagcgttttttcaacaccagcggcctgcagtacaaggccctggccctgaaggacaagctgcccggcatgagcgaggatgagcagttcgccctgctggccaccgacggtatgctggtcaagcgccccattctggtaggggaggacttcgtgctggtgggcttccgagaggccgagtgggcggcccggctgggctgagaccctaggcgggcaggcggcgctccagccagtccagcacgtcccggtacacctcgtcccggttggtctcgttgagcatctcgtgccgcccctcggggtagagccggacggtgagatcctttaccccggcatcccgaaaccagccggccacctttttgacccccgcgccgttggcacccaccgggtcccggtccccggcgaagaagtacaccggcgtgtctggatccatgcgggccagattggctggcttggccaggagctggaggcccaccatcatgtcgtggtacatgcccacggtgggaaggaagcggcacagggggtcggcccggtaggcgtccaccaccgccgtgtcccgggagatccagtccgccgaggtgcggacgggcttaaactggccgttgtaccgccccacggagagggcgtccagcagggcgctgtgggccctgggccccttgaggcggatgagcagggcggacagcgcccgccccgcggctacagtggcagggggctcctgcccggtgccggagaggatggccccgtccaccgtgcccggccagaacatcaggtagccccgcaccacaaaggagcccatggagtggcccagcaggaagcagggcagaccggggtactccgcccccgcccgctcccgcagggcgcggacgtccttcaccacatgcttccagccgtcccggtcggcgaaccagccgaactccgaggggttccgcgccgtgcggccgtggcccaggtggtcgtggcccacgacggcgaagccgtgctccgccaggaagcgggcgaaggagtcataccggccgatgtgttccgagatgccgtggaccagctgcaccaccccccggggcggcccctccggccgccaccaggcggcggcaactgtgtggaccccatcgctggagggaaaggtaaattcttgtttgatcaccatggaaacccggctccttttgtgatagaatagcaacaatatcagtctagcctaaggcccggcgcccgtcaatagaaaggaagagcattatgaccgccattgaccgctttttgcgctacgtgacatatgatacccagtccgacgagcacagcgacgccatcccctccaccgccaagcagaaggtgctgggcgcagccctggccgaggagctggcccagatggggctgcacaacgcccacatggacgagtacggctatgtgtacgcctggctgcccgccaccgccgggtgcgagggaatcccgtgcgtgggccttatcgcccacatggacacctccccggacgcgccgggggtaggggtgaagccccgcgtcgtccgctacgaggggggcgacctggtgctcaacgaggagaagggcatcgtcatgagggccgccgagtttgagagcctggccaaatacaagggtcaggagctgatcgtcaccgacggcaccaccctgctgggggcggacgacaaggcgggtgtggcggagattatgtctgccgtggagtacttgctccagcacccggagctcccccacggccgcattgccgtgggcttcaccccggacgaggaggttgggcagggtgccgaccatttcgacgtggagggcttcggcgcggcggtggcctacactgtggatggcggcgagctgggcgagctggagtacgagaacttcaacgcggccaacgcgggcgtgtacttccacggggtgaacatccacccaggctcggccaagaacaagatgaagaacgcgattctgattgccctggagttcgcggggatgctgcccccggcggagacccccgcccacaccgaggggtatgagggcttctaccacctccacgacatgaagggcagcgagacggaggcggagctgcactacatcctccgcgaccatgaccgggccaggttcgaggcccgcaaggagtacctgggccgggcggcggactacctcaacgccaagtacggcgcgggcacggtggagctcgtcctcaaggactcctactacaacatgcgggagcagattgaaccccacatgtacctgatcctccgggcgcgggccgccatggaggccgccggggtgaccccggtggaggtgcccatccggggcggtaccgacggggcgcggctgagctacatgggcctgccctgccccaacctgtgtaccggcggggtgaacttccacggggtgcatgagtatatcccggcccaggccctcaccaaaatgaccgaggtgctggtcaatttgctgacgcggcagtaaatagaccaaaaggcgccccctcttatgaagagggggcgccttttggtctattacagcagagtctggaagaactggaggagtagcttggctccgtagaagatgatgatcagtccgcagacgatgtttatgacccgcaggatcttgtcgttgaacttggcggagaagaaggagatcaggatggtgatgcccagaaaccacaggcaggaggcggaggcggagcccagcatgagctgggaggccaccgcgcccgggttgccggcccggaagctgccgaacagcatagtgccgtcaatcagggcctggggattgatccaggtgaccacaaaggccttggcggccagcctgggcagggggatgctcacgtccacgtcccggtccagggtgggcttatcccgcagcaggccgatgccgatccacaccacgatgcagccgcccacgatcagaatcaggcgctgcagccagtcgaagcgctccaccagcgcgccgatgccgaagaagcaggccagcgccaggctgatgtcgaaggcgatcacgatcagggcggtgagcagggcccgccgccggggctgggtcagggcggagttgatgacgaacaggttctgcatcccgatgggggcgacataggccagaccgatggtcaggccctggagataggtcggcatgggggcttcctcctaaaaaagactttccttttctttctttacctggtattatattagcacctatggccagctgtggcaagagcgcagaatttccgtaccaggtaaggaggaactgaccttatgcccatggaacacgaaaactgcccctgcatggagacctgcccgctgaaccgggccatggccctcatcggggggaagtggaagatgcagattctctgttccctctacaacaacggccccacccgctacaaccagttgaaaaagacactggacggggtgtccaacacggtgctggccaacgccctgcgggagctggagggggacggactggtccaccggcaggagtacctggaggtccctgtccgggtggagtacgccatcaccgagccgtgccgccagctcatccccattttggacgcgctgggcgattggagcatggccctctaggcgcaaaaaggccgcaggcggagcctgcggccagacagatagggtcagtgggtgaggcggaaccagagccggttccagaaggtgtccttcacatagcccttggagacgcggaagttccactccgcgtcgcgggcccgtttgcggcaatcctgctcgtccccgtcggggcggtcgtagtgggggagcgtcgagctgagccgcccctcgagattgtcgaagaagaaatccataaaaggctcctttccggcggatcagtcccggtcggtgagacggaagcggagatggttccagaacgtgtccttcacgtagcccttggagacgcggaagttccactcggcctcccgggctttgcggcggcaggcgcgctcgtccagggtcatatcgtggggaggcgggagctccgcgttgagcttggcctgtagataagaggcgggaaacgagaggttcatgagaaactcctttccagacagaggcccttttaccgtctccaatctatcatacgccccggggaaagtcaaggagccggatccaggcagaaatgcggaaaaacgccgggtttcggcggttaggagaagatcgtatggcgaaaacactggttttggcggaaaagccctcggtagctcgggaattggcccgggtgctgggctgcaaacagtccggagaggggtatctggagggggagaagtacatcgtcacctgggccctggggcacctggtggagctggcgcccccggaggactacgacaaggcgtgggccaagtgggatatgctcaccctgcccatgctgcccgagcggatgaagacggtggtgatcccccagtccggccggcagttccgggccgtccaggcccagcttcgccggggggacgtgggcgagctggtcatcgccaccgacgcaggccgggagggggagctggtggcccggtggattctggagaaggccgggtggaaggggccggccaggcgcctgtggatctcctcccagaccgacaaggccatccgggagggcttcgcccacctgcggcccgcggcggagtacgacaacctgttccgctccgcccgcgcccgcagcgaggccgactggctggtgggcctcaacgtcacccgggccctgacgtgcaagcacaatgcccagctctccgccgggcgggtgcagacccccaccctggccctcattgtggagcgggaggaggccatccgtagctttgtcccccaggagttctggacggttaccgcaaagctgcccggtttcaccgccacctggcgggatccgaacggccaggcgcggctctttgaccgggagcgggcggaggagctggccgcccggctggcggggaaggagggggtggtgacccgcctcaggcgtacccgcaggcaggcaccgcccccggcggcctacgacctcaccgagctccagcgggacgccaacaagaagtacgcctactccgccaaggagaccctggccatcctccagaacctctatgagatccataaggtggtcacctacccccgcaccgactcccgctacatccccgacgacgtggttcctaccctgccggagcggctgcgcagcgtgatggtggaggactacaagcccctggcggcggagctgctgcgcagccgtcccctccagaccaaatatctggtcaacgccgccaaggtcaccgaccaccacgccctcctccccaccgaggagccggtggagctgtggcggctcaccgggccggagcgcaacatctatgatctgatcgtccgccgcttcctggccgtgctgctgccccccttcgagtacgaggaggtggccctcaccctggaggtggagggggaaaccctccacgccagagggaaggcggtgctctcccccggctggcgggcggcctacgaccgcacctttgccctggaggaggaggacgaggagggggacgagagggagcagagcctccctgccctggcggagggggagcgcctgaccgtccagtccgcccgggccaacccgggcaagaccgcgccccccaagcggtacaccgaggccaccctcctcaccgccatggagcacccggccgcccaggtggccgaccgggagcagggccggattttggaggagactggcggtctgggtacccccgccacccgggcggacatcatcgagaaactgttttccgccttctatgtggagcggcggggaaaggagctggtacccacctccaagggcgtccaggtggtgggcctggccccggaggagctgcgcagcgccaccctcaccgctcagtgggagcgccgcctgggggagatcgcccaggggcgggagcaggagggggctttcgtggacgagatgcggcagtttgccgcccggctggtggcccaggtgaaggccagcgacgcggcctaccgccacgacaaccagacccgcaccccctgccccgactgcggcaagtacctgctgcgggtcaagaccaagcggggggagatgctggtgtgccccgaccgggagtgcggctaccgccgcagcgtcaagcagaccaccaacgcccgctgccccaactgccacaagaagatggagctgcggggcgagggggagaagcagctgttcgcctgcgtgtgcggctaccgggagaagctgtccgacttcaagaagcggcgggcccagaagtctgcgggcaagggggacgtgcgccgctacctggcccagcaggagcagcgggaggagaagggctcctccgccctggccgagcagttggccaaatggatggcgcagcagaagggagattgaagcatgagctggttttcgatccaggagctggagtacctgctgcgcattgttctggcagcggtgtgcggcggggccatcggcttcgagcgggagcggcgctccaagagcgcgggcatccgcactcacattatcgtggccctgtccgccgcgctgatgatggtggtgtccaagtacggcttttttgatgtcatcggcctggggggaatctctctggacgcctcgcgggtggcggcgggggtggtgaccgccatcggctttttgggcgtgggggtcatctttacccacgggcggacggtcagcggcgtcaccaccgccgcaggcctgtgggccactgttggggtgggcatcgccgtgggggctgggctatacgtcaccggcggcgtggccacggtgctgatcgtcctcttccaggtaattctccaccgctcatcccccctggtcaagacccagcgtacgggcaccgttgtcctggaactgagcgaggcggagagcgatccggcggaggtgcgccgcctgctggaggagcgggtgtccgccgtggagggggtgcgggtgacccgcctggcagacgggagggcagaggtgaagtgcgatgtgctcttccccgccgggtacaccgccgaggacatcctgcggacattgaagggcatgcccgccatccgttcggtggagatgcaccatccgggctgacacaagagcgaaagagaggcagaatgtatggaagcgataatcagcggaatcaactggctggatgacttcatctggggcatgcctatgatcgtgctgctgctgggcacccatctgtttatgacagtgcgcacaggcttcattcagcgcaagacctttaccggtatccgtctgtccgtgcgcaaggacccagacgcccccggtgacgtgagccagttccaggccctcaccaccgccctggcgtccaccatcggcacgggcaacatcatcggcgtgggtaccgccatattcctgggcggccctggtgcggtgttctggtgctggcttgccggcgtgttcggaatcgccaccaagtacgcagagtcccttatcgccgtaaagtaccgggtccgcacccccgacgggaggatgcagggcggcgccatgtacgccctggaacggggactgaacctgaagtggctgggggtgctcttcgccgccctggctgccctggcctccttcggcatcggctgcggtacccagatcaacgcaatcgccgaggtcattgagaacaacatacccgtgggtattccgcccatcgcgatcggcgccgtgggcggccttctcaccggcgtggtcatcatcggcggtatccagtccatcgccagcgtgtgcgagaagctggtgccctttatggcggctttctacgtgctggggtgtatcatcattctggcgatcaactgggacttcctggcccccgccgtgtccaccattctccggctggctttcacccccggcgcggcggcgggcggactggtagggcaggggctcatggcagccatgcgcttcggcgtggcacgggggctgttctccaatgagtcgggcatgggctccgccccactggtggcctccgccgcacagacccgtaacccggtgcggcaggctctggtatctgccaccggcaccttctgggacacagtggtggtgtgccttatgaccggtctggtgctggtcactaccatcatgaagaaccccgccatcgacatggcacagatatccgacggcggccaactcactaccctggcctttgcacagatccccgtgctcgggcctgtaatcctggtagtgggcatcatcactttcgcctggtccaccatcctgggctggtcctactacggcgagcggtgcgcccagtacctatggggcaagagggccctgctgccctataagctggtattcgttgccgtggtggtggttggcccggtgttggccctggatctggtgtggaccatcgctgatatccttaacgccctcatggccatccccaacctggtcgccgtcctgctgctgagcggggtggttgcccgggagaccaggcactatttggggaatctggacgaggtagaccagactgaaattccacgcgtagacaaatgagaagtcaaaacttcttgacatttttaaaccatgggtgtatgcttcctaatgtaaagattatttgacatgtggaggaatacattatgaaagggatccgcaagatggatgagatggagctgcagatcaccctgcgcgccagccgtgccgcctggttcttcctggtgctggccctggtggtctggtcggtgtgggaggcatttcacggaggggacactaccctgcccgccttcctgctgggggcccaggtaatgattttttgcctggtgcagtggatcggccgggccagagcgggggacgaccgggtaaagcgggaatttgtactgtgggttattctcactgtggccctggtggcattttcattgctgctggtgctgggcggatgaagaacagggtcaaggagctgcgaaaggcccgcggcctgcggcaggaggacgtagccgccctgctgggggtgagccgccagaccgtcaacgctgtcgaaaacgacaagtacgaccccaccctggccttgggtatgaagctggcccgcctgctggagactccggtggaagagctgtttaccctagagggctgagaacgccccccgaaccgaatcggttcggggggcgttcccgcgccgtaaccatttgagagaaatttgtaacgttttttagaagaattatgtcaacaaaagtggtacactgtatccacctgaccgacatgaggtgtatcaaatgcggataaacagcacagcggccttcgctctggccggagtgatcgccctcaccctggcgggctgcggggaggcccctcctccacccaccccttcggagccgccggaggcgacaggcgctctgcaaccggccgtggcgcatggcttcaccttcgcggaactgaggcagtatgagtttgtgtttgccagcggcgcggggagctggggcacggtgctgtatgtgaggccggacggcagcttttccggaaccttcagcgatacgacctgggaggagtacgggggcagcacacgcgccgtcctccactgctccgagttcaccggccagttcaccgagccggtgcgggtgaacgactatacctattccgtgcgcatcgccagcatcgactatgagcgggcggtgggcgaggaggcattcgccgacggcttccactattactataccgagcccaggggactggaggacacggaggagcttttgatctacctgcccggcgcgcccctgggcgagctgccccaggagttccggggctgggtggaccacggcgatcagggggaggcgctgctctcttatgccctcaacaacgaggcgcaccagcagggatttttcagccggaatctggtacgggagatcatttacggcctgatcagcgcccgggatgagtcgggcgagctggaacaacagctccaggacgccacactctctcaggaggagcgggagacaaaggcggaggagctgtaccaggtgtgggacaatgagctcaatgaggtgtgggacgcgctgaaccggcttctgtccccggaggatatggaggtcctgacagcggaggagctggagtggattgcctggaaggaggagcaggccgccctggccggggcggggatggccggcgccctgcgggcggcggagctgacccgggagcgtgtgggtgtgctggaggaatacctggaaacgctgtagcatcagcatgcaaagcgatagaaggtggacagaatgggaaaaaatagaatggttttctgcgcgctggctggtgcgctggcgttgaccctggcgggctgtagagagacggcccccgtgccaccctccggcaaccctgcgcccatggcctctcccgtcccggcggagacggagcccgcggcggagttctccttcgctgatttgcagcggcttcagttctgcttcgccagcggcgcagggggctggtgcaccctgctggccgtccggccggacggcagcttttatggcgagtaccacgacaccgacatggggggtggagagccggacatccgtgcggtgcagtggaactgcaaatttaccggccggtttgcccagccggtgcaggtgaacgactacacctactccatgggcatcgctgagatcagctatgagaaagaggcgggcaccgaagaggtgattgatggcatccagtactactataccgccccctacggcctggaggatgcggaggagattctggtctatctgcccggcgcgcccctggccgagctgacccaggagttccggggctgggtggggtactatgatgagaccgagggggagctgtccttctacgccctgaacaacgaggcgcaccagcagggctttgagagctatgactgggtggagcgcgtccgaaccgacgtggagtgggcggaggagacggcggcggaatacgaaacgaagatcctggaggacacctccctgagccagggggagctcaacgagttatcggcgcagatgttcgacctgtgggacatccagctcaacgaggtatgggccgtcttgcagcagatgctgtctcagacggacatggaggccctgacggcggaggagctggagtggatcgcctggaaggaggagcagctcgcccggacgggcgaggaggcgggcggcggctctctggcgattatgctccaggcccagcgggcggcggagctgacccgggagcgggtctatgtgctgctggaatatcttgcatgacaaagcgcgggtgggcgcggcagtttgccgtgcccacccgcgttttttgctataccggcgaatggtactgggccgcatactccgggtagagggccgtcagctccgccgaaatggaccggtactcctccggcgcgatgtcccgcgtccgctcgtaaacgtacactgtcaccccgtcctggagggggaaggaaacgtccagccgccggtaggcggcgccgataccggtaccctccagcaccggctgggccaggacggtgaccaggtgctggttctcctcccccaggtggtactgaatggggtcggccacgatgaggtagtcgcactccagggcggcccaggagaagccgtcccgcttgtccaccgtggcgaaggtggcgacggcggttttggggccctccggctggggaatgcccgccgagcggagggtgttgtcaaggatgctggagttgaagacgaaggaggaggcgatcaccgccgctgtctttggctcctgggcggacagtccatccacatacacccgcagggccaccaactgggccagatcgctccgctggggcggggcgtaggtgaaggtgggcaggggggccagggagccgatctcctgggggctggcgggctggggacgggggaggagggagctgcccagcatgcacagggccagggcccaggcccccgcccggacgggtctgcgggcgggcagggcctccagccccagggccagggcggcgcacagggcgggcagatagagcagcaggtgctgctgcccgtgggactgcacccgggtgaacaggagcaggcacagcaccggctgcgccagggtgagcagggccgtgtaccgggcggcaggccgccggaggaggcaccacaccacgcacacaagggcggcggccatgagcacccagccgaagtagcggcacagcatcaccgcgtccacccaccggccctggtcgtaggccgagtaggtgtcaaagtagttggagcgcagtacctgttcaaccaggaagctctgcccgaagaacagggagcacaccacgccggaggcggccatggcggcaaaggacttccactgactgcggcgcaccgccagggcggccagggatgccagcccgaaggacacggtaaagaagaagaagtaccgccgcagcaggaacaccagggtgagcagggccccggtgaggatgccgcgggccgactgagggcgctcttggtcggtgtagatcacaaaggcccagatgccggcccccgccgccgccacgtccacaaagccggtgagtccggtgtagagcagcatgggggtggcgcaggccagcagcaggccgccccggcgtacccgccgggccagggccgccatgcccgccagggcgggcaggacgtagaggttggcgatggcgaagaggtagacgtaccgcccggtacccagcacccgcatcaccagggagatgggccaggagagcaggtagttgtactcctgggtgatgacactctggagcaccagccgcacctgggccagatccaggctctgacccgccagcatggtgctggagctccaatagatgttgctatcccagtagtagaccgtggcggagcccgcagcgtagagggcggtgagaacattcaccgccagggccagcagcagcagggctctcccgcggggcagctccaggcggccgaaccgccgggcggcggtggccagggccagcacgacgcccgccagtaccagcccgctgcccagggcgcagaccagccggaaggggagacgcccgatggccatatctcccgcggagaagaggtcgtagctggtgtccagcaaagccccaaggaaaaaggccgccccagccagcagggcggtcctccaggtggggccgaacgggagcagcaggcgggggatcagccggagccgccgcgccgcccccaccaccagggcggccagcgccgcggcggcggccagaatggccgggccgggcacgcggccgtacagcacggcccaaagacgcaccagagccaggccggacaggcagccccacgccgccagtccggccagtccctggagcagggtgcgcggcttcatactcagccgggaggccaggtcatgtcccggcccgccagcacgtggaagtgcaggtggtgcacggactggccggcctgctcgccgcagttggagaccacccggaaatcggtgatgcccagttccttcgtcacccgagagatgacctcaaaggcgtgggccaccacggcggaattttccggggagatctccccgcaggagccgatgtgggccttggggatgaccaggaaatgggtgggcgcctgggggtcgatgtcgtaaaaggcgtacaccagctcgtcctcgtaaaccttgttggaggggatctcccccgccgcgattttgcaaaacagacaatcgctcatgctatatcctccttttccgcggatttgactctagtatagcacacaggaagcggaatgtcattcctttgaggcggaaaaaaacgggggccgcggatgcttccgcggcccccgttcgtgcgctcaacaggagacaaattgattccgctccgggctgtaccggcagtcgatggcggccagccgccggctgacctcgcccacgtcgatctggaggtcgtcgcatagagcgtccagtgtggggtaaaagtcccgcagcttggtattgaggtaactgagcagaatcatagggtcctggggaagcataggtgtaactctcctttgggtaaaaatgtgttcgtttgattctatgcggcaaatgcgataagtgcctctgctgcacacgtttatctgtggggcggcaagcatctgcgccatgccgtagggacgggtgcccgcacccgcccgtcggcggcttacagctccagcttctcggcgaccaggtcgtctaccttggccagcgcgtcacgccccacacgaccatgtcgtgcgggggaccccgcattataatctgctcagggcgaataaatcgccctggcatcaagattttgcctgcggcaaaacgcttgagacgccgcagctgcggcggagctggacgacgcgccttctaccgaagcgggtgcttttgttacagccccagcttctcggcgaccaggtcgtctactttagccagcgcgtcgtccagcttgagcaggtcatttcctccgcccatggcgctgtccggcttgccgccgcccttgccgccgcagatggcggtgacattcttgatgatgtcaccagccttgacgcccttggacacagcctccttgccgcagacggccaggaaggtgatcttgccgtcgttgacagcggacaggacggccaccacattgggctgcttgtcccgcagcatgtcgcccatctggcgcagcttggccgcgtcggcgttgggcagggtggcggtgagcaccttcagctcgcccagatcgtggccgcccatgaggaagcgctcggtctcgccggcggcctccctggcctggaacttctcgacggtgtggcgcatctcccgcagctcggccatgttctgctcggccttctcgcgcagctcggcgggcttggccttgaggacggcggcggtctcaaagagaagggactgggcccggttcatggtctctagggacttaaggccggtggtggcctcgatgcgccggacgccggaggccacggagaactcgctgtcgatgtggaatacgcccaccttggcggtgttgtccaggtgggtgccgccgcagaactccaccgagaagccctggcccatgtccaccacccggacggtgtcgccgtacttctcgccgaacagggcgatggcgccccgctgcttggcctcctcgatggtgagcacctcggtgctcacctcgtagccctccagcaccgcctcgttgaccagggcggacacctgggagagctcctcggcggtgagggcggcgaagtgggtgaagtcgaagcgcagcttgtcgggctccaccagggagccggcctggtgcacgtggtcgcccagcaccttgcggagcacggcgtccagcagatgggtggcggagtgggcacgcatgacggctttgcggcgcttgacatcaatggaggcagagacggtgccgcccaccttcagcacgccctgggtcagcttgccggtgtgcatatacttgccgcccttgttcttctgcacgtcggtaacctggaaggtgacgccgtcggcggagatgacgccgtggtcggccacctggccgcccatctcggcgtagaagggggtcttgtccagcaccacaatggcttccacgccgggcatgagctcctcggcctgctcgttctccaccaccagggccaccaccttggcgtcgtcaatggcggtgtggtcatagcccacaaactgggtctcgggcacgtccttgccgaactccacgccggcccagcccagatcgcccagggcctcccgggccttccgggcgcgctggcgctgctcgtccatctgattgtggaactccgcctcgtccagcttcatgccctgctcctccaccatctccagggtcaggtcgatggggaagccgtaggtgtcatacagcttaaaggcgtcggcgccggagaaggtgctctcccccttggccttgtgcccggcgagcatgtcgccaaagatcttcaggccgctgtcgatggtcttggcgaagttctcctcctcggtgcggatgaccttggtgatatagtcctgccgctcccgcagctcgggatagtggccctcgttctcacggataacggtgtcgcacacctcgtagaggaagggctcgttgacgcccagcagcttgccgtggcgggcggcccggcgcagcagacggcggagcacgtagccccggccctcgttggaggggagcacgccgtcgcagatcataaacacggaggagcggatgtggtcggtgatcacccgcagagacacgtccttggcggcggtctcgccgtagtgggcgtgggtgatctcggacaccttgttggtgatgttcatgacggtgtccacgtcaaacagggaggccacgttctggcacacgcaggccagccgctccaggcccatgccggtgtcgatgtttttctgcttgagctcggtgtagtggccctccccgtcgttgtcgaactgggagaacacgatgttccacacctcgatatagcggtcgcagtcgcagcccacggtacagcccggcttgccgcagccccactcggggccccggtcgtagtagatctcggagcaggggccgcaggggccggagccgtgctcccagaagttgtcctccttgccgaacttgaagatgcgctcggcggggatgccgatctcctcgttccagatgcggaaggcctcgtcgtcggcgggggtggtctcgttgccggcgaacacggaggggtagagccggtcggcctccaggcccacccactcgggggaggtcaaaaactcccatgcccagtggatggcgtcccgcttgaagtagtcgccgaaggagaagttgcccagcatctcaaagtaggtgccgtggcgggcggtgtggccgatgttctcgatgtcgccggtgcggatgcacttctggcaggtggtcacccggtggcggggcggctcctgctccccggtgaaccagggcttcatgggcgccatgccgctgttgatgagcagcagggaggcgtcgttctgggggatgagggagaagctgggcaggcgcagatgcccctttgtctcaaagaatttcaggaacatctcgcgcagctcgttgaggccgtagttcttgtgcatggacagaccaaactcctatctgtaaaaaaataagctccgccccggttaggggcggagcaggttcactccacggtaccaccctaatttgccccggaaaggggcatctcagtcatccggtaacggggatggggcgtcccggtcgtcccgggcagctcggaagtggcgcgcagacccgtgtcgcggagggctctcaccgtcccctctcgctcggcgcggcgtggcctgcttggcttcgtcatcgcgtttcttgtgatagctgaattattctatcacatttttcgccgttgtcaaccgctttttcggcaggagggagcccaaaaagaagagcatgggcggcagcaggccggccatgaacatggccgcgaaccaggcagaggactggaaaaaggcgtttaccccggcgtccctcagggagcctgagagcagatccagggtgaggagcatgaacagggcggaagggctggccagcagaaaggagaagaccagaagggcaaagcccgtgaaggcgagggggaacagcgcctcccgccccgagaagagcagcagaaggccgcagcccccgaaggcccagccccaggcgcacatggcgggatagagcactgccttgcagccggttttccggtctgggcggggccagccccgcaggcgggagaccacccagcctgcgggcacatagagggccatcagcaggaggacataccaggaaaagagggcgcggccgtgcgcgcagtcgggcaggccggccagccccagccatcccatccagcccaaaagggagaggataaaatgtccggcggcgaatccgccgaagcggccggggacggttcctcttggtttcagacagcatcacctcttgcggcaagtatacgccacaataaactgcatgtcaacataaatttaatgaaaaacaataaaaatgaattgagaagcagggcggcctcatgggccgccctgctgtgcgtgattaggacgccggggtttgcttggaagggttccgccggaacagggcgaacaggttgcactcccggcaggcagaggaaaagctctggccggtaaagagccagcacaggggcttgacggacatgagcagggccacgcccaccaggcaactgagcaggatggccagatagtagccgagctggagggggatggtgtccaccgcgggggtgatccaggctgtccacgccttctgccagaactggatggccatggggtgtaccaggtagacgccgaaggacagcccggacagggcggtgagggcccgcccgctgctccggccctccccataggagcgcgccagcaggaacagggccgcggccagcacggcggtaaagagatgcagatagctcttgatgcgctcgtcgtagacgccggtgcggctggtgagccagaaggtgccggcggcgatgacggcaaagctggccgccgtcacgccccacagcgccccccggcgggggagcttttgcagccgggccagccgggcgcccagaaggaagtagcccagatagccgcccacaaagtccagattcagcgtccagtggacggtgagggcgctctgccaggggccggcgggggccagatcgcagagggtgtccatgccgatggtggcgatcagccacaggcccaccaggtagttccagtgggcctcgctcaacccatcggtcatctttttgagcagcggagagaccagatagatgggcaccagggcgtacaagaaccagtagggcaccatcaccggcgtgttgagcaggggaatgagcttatccagggcggcctgggggccggagagcacgccggccagggcgatgacgacacccgaccaggccagcagagggatcagcaccttgggcaggcggcggcgaaacagggtgcccagctccgccgtccgggggtgggacaggagcagcgcaccggagagcatgaagaacaggggcaccgccgccgtggccagggaggagagcaggttggagaagtgccacaggggggtgccaagctggcgcagggcgcctgccgcggtgtggaggtagaccacccccaccatggaggccacccgcagcagatcgtagtcccagcggcgtcgggacagcgcgctcacaggcccaccgccttccgccgcaggagggacaggggcggggcctggacagggagcctcagacggaagggcatctggggcttccgggcctccaggatgggcaggccgtccccgtcggtcaggccctccgcccggaaggagacggggcgcacgccggggcccaccagctccagctcgtccccctcggcaaacttgttgcgcagctcacacagggcggcgccgtcgggggcgcaggaggtgaccacccccaccacctgccagtcccgcaggtagcgggcgtgggcggtgtgctgccccggctcgccgtagtagaagccggtggagtaggggcggtggctcaccttgtccacctcggcccgccacaccggatccagaggctccccggcccgggcggcgtcgatggcgtggcggtaggcggcggtgacaatggcggcgtagtaggcgctcttggcccggccctcgattttcagggaatccagtccggcgtccatcagctcgggcacgtggtcgatcatgcacatgtccctggagttgaggatgaaggccccgcccgcgtcctccccgatggggaaatactcgccggggcgcttctcctccaccagggcgtactggtagcggcagggctgggcgcaggcgccccggttggcgtcccgccccgtcatgtagttggacagcaggcagcggcccgagtagctgacgcacatggccccgtggacgaaggcctccagctccagcgccgggggggccttggcccggatctcccggatctcgtccagggacagctcccgggccaggatcacccggctggcccccagctcataccaggcggccgccgcctggtagttggagacgctggcctgggtggagatgtgggccttcacgccgggggcgtgctttttcagcagggagagcacccccacgtcggccaggatggcggcgtccaccccggccgcctggaggaactccagccactccggcaggcgggctgcctcgtcgttgcggggcatggtgttgcaggtgacgtggacggccactccccggctgtggcacagctctacggcctgcttcagctcctcgggggtgaagttgcccgcgaaggagcgcataccgaaatcggggcccgccagatagacggcgtcggccccgtaggccagggacatgcgcaggcgctccatgtccccggcaggggagagcagttcgattgttttctcagccattttgataccgctcctgtgaggcgataaagttctgctgttcccggtaggtggcgaagaagtggtgctttccgtcgtcccccagggcatagaagtagtacctggtggagtcggggtacaccgcggccttcagcgcatctacaccggggctggcgatagccgtgggggtgaggcccttgtgggtccgggtgttgtagggggtgtcggcgttgaggtccacctcggtgccgccggtggcgtagaggatggtggcgtcgatgttcagatagcccgccgtctcgctggtggggttgtccaggcggttgtagatgaccgaggcaatcttggcctggtcggagccgtcggtctccttctcgatcatggaggccacggtcaccacatcctggatggtgcggccgtcgttctgtacctcctggcgcatctcgtcggtgaagatctcgtcaaagcggaggatcatcttgttgagcacgctcaccggttcctcgcccatatagaactcgtaggtgtcggggaacaggtagccctccagccgcttggggtcgcccaggggcaccacgcccttgaggaaggagaacttgaagtcgtaattggcggcggcctcctccaactgctccaccgtggacacccccttctcctccagaagggagaagatctgggcctctgtcatgccctcgggtatggtgacggtggtggtcatgcggttggcggaggaggagcccatgctggagatgagggcccggtagtccatgtcggtgttcagctcataggtgcccggggtgatcttggccccctcctctccggccttgccggaggtgtgggtcagggaacagaagagcttaaacaccatcttgtactcgatgaggccctgctcctccagcttgtcggccacctggcccaccgtgtccccctcgtcgatctccaccacggcggtaagggcgggcttgttgagggccagcacatcgttggcccagatccagcccacgccggccaggagggcggagatgccaagcacaaaaatgacatagagcaatacaccccagccgccgagacgctttttccggcggcagggggcggagcggcgttctccctccgggtgggagggggcgacccgcctgccgccgtggccgctcctcgactgggccggccggcggccctcattccggtattcttcctgagacataggttcaactcctaacgaaaaaacagatgacccgccgggaaccactttgccgccccccacatagtatgagccagataaaacaagtgaggtgaatcaagaatgtgctgtggtaacaatggttggggcggcggcaacggctgcggctgcctgtggatcatcctgattatcatcatcctttgctgctgctgcggcggcagctggggcggcagtggctgcggctgcaactgtggctgcaacaacaactgcgggtgcaacgacggctgctgctgagccgtttacgtaccgtccggcgaggagcggggcctttgggccccgctcctctgcgcatccgcccggtacaggccgtgctcggtgagcaccagctccaccccccggtcgtggggggcgcgggggacttggggcagcagcagcgccgtccggcacagggcggcggtacagccggcgtaatccgccagccagcggtcataaaaaccgcccccctggcccagacgaccgccggaggggtcgaaggccagaccgggcaccagcacaaggccgatggcgtccttgcccaccagggggcagtcctcccccggctccagcatcccgtaggggtgggggatcagtgcgctgtccggccggacaagccgggcctccaggccacggtccggcagacagcggggcaggcagaccgccttgccccgcgcccagagggcggggaggaggcgggcggtgtcgggctcgccccccatgccgtggtagagcagcagggtatccgccgcctccacctggggcagggccagaaagcgggcgaacagggcgtcatcgctcgcccgccgggcctggggagagagctctctcagatattggcgggcccggcggcgcagctccgccttctcagccgtggtagtggacggcatggcagacctgccgggcggcctccgcccccttgagcacctccaccagcttcaggccgaaggggaaggaggagccggcggcctcgccggtgatgatgtggccgtccgccaccacgggagcgcccttctgcaccacggcggagcccatcagctcctccatgccggggtagcacaccgccctgcgccggtccagaaagcccaggttggccagaatggtgggggcggcgcagatggcggccagccaccggccctcgtcgtagcagtgctggatcagggcctgtacgtggcggtcgccctggagcacctccacgccccccagaccgccggggagcaccagcatgtccaccgcctcccggtccagctcggccagggtcaggtcggcggtgacagtgacgccgtgggcgctggtgacggcggggccgtccacgcccaccaatcggacctcaatgcctgcccggcgcagcagatcggcgggcaccagggcctcgctctcctcaaatccggttcccaacagaatcgctaccatgtgaaacagcacctttcttttctgttcttctatcctaaaatacgggcggccgccgcccagatgtcacggtgaatgtcctccatagagcggagcgcacccgccccgtccacacaggggattttgacccagcccagacagtccgccgcccggagggcggttttgcggcacagggcgagatagccggtgtccacctcgtggatgtcacccttggtatgggtggacgcctcccggctgcggaggaggcgcaccgcctgctccgtgggcatgtccagatagaccaccagatcggggaggggcaggccaagcttgccgcactcgaagtcaaacagccagcggaaaaagtcctcccactccgcctcgggcagcttgctggcctggtggacggcattggaggtggtgtaccggtcggagagcaccagcccgccgccccggtagtagtccccccacacctttttccatgaggcatagcggtccaccgcgtaaaaggtggaggccgcgtagggattcacgtcggaggggtgggaaccgaactccccgttcagatacattttcaaaagggcggaggagggctcctggtactgggggaagatcagccgccggaaggggcgtccctcccgctccatccgctcacagagcatgcggaactgggtggacttgcccgacccgtcggtgccctcaaacacaatcagctttccctgcatgctcacttcccccgcagccgggcgcccgccgcctggaccagcaccagaggcagcttggccatgcgtccgatgcgcttcggttccttggccagacggtagagccactccagccccaacctctgaaagccctccggagcccgctccaccacgccggcgaacacgtccagggagccgcccaggcccaccatcaggtgggcgccggtggcggggccgtgctccaccatccacagctcctgcttgggggcccccaggcagacgaacaccacgtcggcggcggcggccctgatctcctccaccaccgggccgtcctcccggaaatacccgtcatgggtgccgcagacgatgaggccggggtgggcgtccttcaggttggcggcggccagctccgccacgccgggcttggcccccagcaggaagagccgcttgccgtgacgggccatccacgccagcagccgctgggcaaagtcgatgcccggtaccttgcccttcagcgggcggcccaggattttcgcggagtagaccacccccacgccgtcggccagcaccagatcggcccccagcaaggcctgccggaaggccggattgtgcttggcggccagcagaaactccgggttgggggtgaccgcgtagtggaagcccccggcctccaccagggctgcgccggccgccgcagcctcctccagcgtcaggtcgtcgaagccgacgcccaaaacatcagtcctcaaaatacattgcctccgattggaattctgtccataatttcatgccattttaccatagatagcgaaaaaagtccatgcggaaaccgggaaatcaggggcgggaaagatgaagtttctgtgaagaatcacgaagtttcccgttgacaaaccgggcggatgtgctataatagggcacagctaattctttagctgttaaaattgctaaagagcggtagggattggaggaactcgattatgaatggaagaaaactggccgcttttgccttgagcggcgttatggccgtcggcctgaccgcctgcggcggaaacggcgaaccgaatgagtctcccgccggcggctccgggggggaggcctatctggtgggtatctgccagctcgccccccacgacgcgctggacgcggccaccaggggcttcaaggcggctctggtggaggccttcggcgaggatggggtgaagtttgacgagcagaacgccggcggcgagtacaacaactgcgccaccatcgtggacggctttgtgtcggaaaatgtggacctgatgctggccaacgccacctattcgctccaggcagcccagtccgccaccgccgacatccccattctgggcaccgccatcaccaactacggcatcgccctgggcctggacagcacagaggacaaggtattgggcggcaacatctccggcacctccgacctggccccgctggaccagcaggccgccatgctccaggagctgttccccgacgcggagaacgtgggcctgctctactgctccgccgagcccaactccgtgtttcaggtggagaccatccagggctatctggaggagatgggctacacctgtacccagtacgccttcaccgacgtgaacgacctctccgccgtgacccagtccgcctgtgatggctccgatgtgatctatatccccaccgacaacacggcggccaacaacaccgaaaccatcgccaatgtagtcatccccgccggggtgcccgtggtatgcggcgagtctggcatctgctccggctgcggcgtggccaccctctccatcagctatgaggagctgggccgtatcaccggtgagatggccgtccagatcctcaccggcgaggcggacgtgtccgagctggcaatccagtacgacacggccgtgaccaagatgtacaacgccgcgaactgtgaggcgctgggcatcacggtgcccgacggctatcagcccattgagtgaggcgcaaacgtcagaaaaaccgcgggaatggacctccatttcccgcggctttttggcacgtgcctgtctgtaatccactttcgagcgggaggcatgaagaaagatgaatgttttggtaagcctgttcaactccctgcccggcgccgcggggcaggggctgatctggggcattatggccatcggcgtctatatcacctataaaatattggatgtggccgatctgacggtggacggctccctggccaccggcggcgcggtggcggccctgtgcgtcagcatgggctggaacccctggctggcggtgctggcggcggtgctggcgggtatgctggccgggctggccaccggtgtgctgcataccgcctgcggaatacccgccatcctggcgggtattctgacccaactggccctctactccatcaacctgcgcatcatggccatcggggatgaaaatgctaccaccaaggccaccctggcggtgagtgtggacaagaacgacctgctcctgtcctcccgctacgtgcgggagcctgcgctgaacaaccctctgctgctgctggtgctgctgacggcagcggtgatcgcgctgctgtactggttcttcggtacggagcagggctccgccctgcgggccaccggcgccaaccagagcatggcccgggcccagggcatcaacaccaacaccgccaaggtcctgggcctggtggtgtccaacggcctggtggccctggccggcggcctgctggcccagtatcagggcagcgccaccatcgacatgggccgcggcgcaattgtcatcggcctggcggcagtcatcatcggcgaggtgctgctggacaaggtgttccgcaacttcgccctcaagctgctctccgcggtgatcggcgcgatcatctattatgtggtcatcaccgtggtgctccgtctgggcctggagtccaccgatctgaagctgctcaccgccctggtggtggcggtgttcctggccgtcccctattggaagggccgctatttcaccaagcccgtgcggaaggagggcgctccccatgcttgaagtgcgcgaaatttataagaccttcaacgccggcaccatcaacgagaagcgggctatgaacggcgtcaccctcaccctcaacgaaggggacttcgccaccgtcatcggcggcaacggcgcgggcaagtccaccctgctcaatctggtggcgggcgtctacccggtggacagcggctccatcgccatcggcgggcagaatgtgacccgcctgccggagcacaagcgggcccggttcatcggccgggtgtttcaggaccccatgatgggcaccgcggccaccatgcagatcgaggagaacctggccctggccgcccgccgggggcagagccgctccctccgccccggcatcacccgcgccgagcgggagcagtaccgggagctgctgaaaatcctggatctgggactggaggaccggctgaccagcaaggtgggcctgctctccggcggccagcggcaggccctgactctgctgatggccacgctgaagaagccccggctcctgcttctggacgagcacaccgccgccctggaccccaaaacggcggccaaggttctggacaccacggagaagatcgtgcagcgggataagctgactaccctcatgattacccataacatgcgcgatgccatcgcccacggcaaccgcctgatcatgctctacgacggccggattgtggtggatatcgcgggggaggagaagaagaagctgaccgtggagcagctcctcgcgctgttcagcaaagccagcggctcggacgaggccgacgacaagctgctgctgtcgtagccgctggcttctccatcgcagatggggcggcgcctgcgccgtgcaagggttttgccggaggcaaaaccttgccgcgggcggaattcacttctgcccgcgcgggatgaaatccggggcccccggccggcctgggccggctggggcacagcggttcggacaaggccgacgacaagctgctgctgtcctgagcggtaaaagcaaacagagtgccccgccgtccgtggacggcggggcactctgtttaagaaggaagaatcccgaaatagttcagcagggtacaggtcagggcggcggcctcctcccgggtggtgacggcggccgggtcaatatcctccaggggctcccacagcaggttgatggtgttgcccagcagccccttctggctcagggccagcagccagacggagtccctggcccagccggagtaggagagcagcccggcagcctccgccgcgtctgcgggcatctcttgcagggtgaggtccatatacatattgagccgctgggacagccgggccatgatggtgatgaactgctcgtggctcactggcgcgtcgggggcgaagcggccctctcccacgccctccaccaggcccagccgggccacggcgttgacgcacaggccgtaccagtcgtccatggatacgtcggtaaactggctctcgccggtgggaacccggcagttgagggcctgggccagcagggcgcagagctgggcgcgggtgagggagccctcgggctggaaggctccgccgccggttccggccaggataccgtaggtggccagccggtcgatctgggcggcgtagggggagccggcggtgtcggtaaagctgcggtcccggtaactggtgaggacataccgccccaccagctcctccacggtggtgtcggcccagccgtcggggccgccggtgccctccagcacccggacgccgtcgggcagagcctccagcagagcggtaaaggcgtcccggtgcgcttcactcagggcggtgtccagctccacataccagcgccagttgaagtcgatacgcagatagccctccgtggagcccttggggctggaggcggagagaagggtggcgacctcgggggccagatcggggtccaccagcaggtgggggatcaggccaacggtgtcggtggtggagccggagggggcgtagaagcggtaactggtgatcttgatggcgtccccgtcggggaagtagtcgggcagagcgcgttggtccagaaccgtctgggccactcccttgccgaaggtgcgcccgcccaccaggatgccggtattggtgtcccggatgtcggaggcgaacagctcggaggcgctggcggtctccccgtcggtgaggacgatgacgggggagagggtgcgggcgtcgtcgttgctgccatacgcgccgtaggcgccggtgctgtccttgaggtaggccagcacgccggagccggtgaagcagcccgccgcgcccatggccgcgtctacctcaccgccgccgttgccccggagatcgacgatccagtggtcagctccggcggcggtgtcctccatgccgctgacgaagtgggccaccgtctcgccgccgaaggtgtcgcagtcgatgtagccgatgtggccgtcccacagctcggtataggtggcggggacggtgatggcccggcgggtgaggacggcggtgtactccgccccgtcccgccggtaggacagttccacccgggtgccggggtcgcccttgagccaggcggccaccgtgcccgcgtcctgcccggcggtggagcggccgtccacggcggtgaccagatcaccgggctggaggccggcgtcggcggcaggggtgttctcatagacccgctggatcagcggcccgtccgccgtgaccagcgagtagatgcctacgcccacggtatccgtatcggacatggagccggtaaaggccccgtactcctcgggagagaagtaggtggtgtaggggtcgcccagggcctccagcatggcctggatggtgttctggtccagaacgtcctcggggacctcgtcgatgtaatagtcctgtagcagctcccgggcctgatcgggggtgagggcctgggcggcgggagagaggagcagggtcagggccagggggagggcaaacaggcggctgagcggcatacgcttcataggagggcctccttggacaaatatgttatgtaacccaattctacgacaaaatgggagcgggcgcaaggcccactcccattttgtatctatttgtcatttttacgcctgcgccccgcgctccggtattatgtcatccggcgccctcgtgggccagaatccagcgggcgatatccgcgatcacctgggaatccacggcctggggctgctggtactcgtgcaaaacctccgcgatggcgccggtgggggatggcatgaacaggtggttcaggccggggtacagatggaagacggcgtcagggtgggcggccagaagggcctcgtaacggcggaagtcccgctccaccgacagatgggcgtcccggtcgccctggagcaccagaacgggcttggtcaggcggcggaggtactcctccggggggtgtgtcagcatctccttaaagtaccacgcccagaggttccccagaatgtgggtgtgctgggcgtcctcctccgccatgcgggggagggcggcgaactgctcccgcagggcctgaaccagaggcgcggcggcggcgcgctgctccgggggcatggccgccagagaggcctcgttctgctccaggatcagggcgtccagagtgcggggggtgcccgcccagaagatgagcccggcgaaggcgccgccctccgcgtcgatgcggggggccagcatgccgcccatgctgtgccccaggagatagacccggtccgggcggatcaggggttctgcccgcagcagggcggcggcgcacagggcgtcccggatgacctcctcctccacgctgaggcggccctgaagggcgtcggccagccgcttcccgtgggcaaaggtgcgcttgtcgtagcggaggctggccaccccgaggtcggccagcccgacggccagatcccggaaggggcggtttggacccacggcctcgtccctgtcctgagggccggaaccgtggaccagcaggacggcgggaaaggggcccgcgccgtcggggagggtgagcaggccggggaggggataatccgcgtcggcggccacagtgatgggaagggtgcgcatgagacggcctcctttcatatagggcggaggtgcgcctacgcctcgcccgcgatgcgcacggcggtgccgtaggcggtgatctccgccgccccctgcatgacggaggcggaggtgtagcggatgccgatgaccgcgtccgcccccatggcctccgcgtcgtccaccatgcgcttggtggcgatctgccgggcctcggtgagcatctgggtgtagctctcgatttcgccgcccaccagggtcttcatgcccgccataaagtccttgccgaagttcttggactgaaccacgctgcccttggcgatgcccagggcctcgattttcttgccgggaatatactcaatatttagaagcagcatcttcttctcctcctcgaatctgtttgatgcgctgccacagggccaacagcacgccgatgatgaccacgccgggaatggcgagcagaaagagcatcagccccaggggcggggcctccgccggctccaccgtcaggccccagaccatcagggcgatgaggccgcccatcagggccacgaagaccagggcggcggccaccgtcccgccgtagcgggtgacaatgtcgttttttcggatgttcataaactgcgttcctccctcctccatccgctccatcttctccagccagcggcccgcgtccaggctggccagctgctcgcccgactccgccagctcctggcagagggagcgcatggtggccagattgtcctgggcccgctccaactggatgatgtgccgccgcacgccgtcggtgagggtcagggtgccctgctgcatcctccgaatctcctccagggggacgtccagcttccgcagcagcttgatcttccgcagggcctccacgtcctcctcaccgtagtcccggtagccgttgtccgtccggccgggggagagaagcccctccttttcatagaagcggatgtttcgctttgtgacgccgaccagttgctcgacctcgttgatcttcactgtgtatcacctctgacagccctaccatacaccctctaccgggtggaaggtcaagaaaaatctttctgaaaccgtagtatacaccggcgggagggaaattaccaccctccgtcctgatgaacgggccgggtaccggcagatcctctcacggttctgggcaactgtgggggcggccctggtggtcgcctcaatgcccctgcgccggggaaatcctctgcgggcggggacaagccccgcccctacgttccagcgccgttccccggttttctcacatacaggccggtgcggcgggggcgttacagcgtaagcccccgccgccgagaatctaccagcagaacagcccgggggaagttccaagaagggggaatcgcaattcccccttcttggccgtttcaaggggtggattgttaaggcgggggaaatcggaatcccccgccttaaccggctctttcgcccctttctggccgctcagaaaggggcccgccggaggcatgacaagaaaacaggtgtcaaaaagggtaacatggaaggcgcgccagcccggcacaaggcgggccgatgtgggcagaaggtgaattgccccagaggggcaagagaggccgccctggggcgtcggcccctacattgggcgataaggtggcgccgggtttgctgaagtgaggcggcagcccacgcacccttgcggcagtatcatatatttggtataataaagccgtatggcgtgaaaatgccctggaaatgctaccgaatggtagtgtttctgtgggtgatactatgtattttcgccgcatttccgacctgcgtgtggatcacgacctgacacagcgcagagtggcagactatttaaatatgaatctggaggtctaccgccgctacgagaagggactccgggagattccggtgtgggctttagtcaagctggcggagctctaccacaccagcaccgactatctgctgggccggaccgacaacccctctccgccccatgcgtaagctggcctggtttgccgcttcctgttcggcggcggtgttcctggcggtctatgtgctgccggagggggcgctggttccgctgggggcggtgtgcgccctggcggcgctggccgggctggccctccggggagaccgccgccggcgggtgcttttggcgggctttggcctggccgcgggcctgctgtggacggcggcctacggcgcgctgttccaggcccccgcccgcgctctggcggggtatgaggggccggtggaggtgacggtggccgactggccccaggccacggcctacggcagctcggtgctggtgcgcctccacccggtggaaggttggccggtcaggacccttctctatctggacgcccccgcgcccgacctgcggcccggcgatgggctgaccgtccaggcccggctccgggcggcggataccatcgcgggggagtccaccgactattattacgccaagggcgtccgcctgatcgcctacggcgagggggagggggagacggtccgtcccggccggccgcccctgtggacgtggcccgcctatgtgtccaaggccctcaaaggggccgtggccgccgccttcccggaggaagccgcgcccctggtcaccgccctgctcaccggggacaggtccgggctgtccgacggggactatgccgccctccgccggtcggggctggcccatgtcatagccgtctccggcctccacgtctccttcctggcggggctggcggccgccctgctgggggcccggcggcggcgtaccgccgtgtgcaccatcgccttgctgctctgtttcgcggcggtggtgggaaacaccccctccgtcctgcgggcggtcttcatgcagtccatgcttctgctggcgcccctgctggggcgggaggaggacaagcccacctccctgtgcgccgttctcatgctcctgctgctccaaaatccctacgccgccgcgtcggtgtcccttcaactgtcctttgccgccgtggcggggatctacctcttttccgggcctctcaccgagcggtggacggccaggctccccgccaggcccaagggcttctgggccaaaaccggctgtctggccgcccggtttgtcctgtccagcctggcggtgagtctgggggccattgccttcaccacgcccctgaccgcctggcacttccagtcggtctccctggcggggccgctggccaacctgctctgcctgtgggcggtgtccctggccttcctgggcgggctggcggcggcggtgctgggggtgtttctccccggcccggcggccctgctggccctcccggcggcgctccccgcgctctatgtccagcggatggcggacgccctggcggcgctgcccttcgccgcgctttccacccagtcggtatacttgaagctttggctggcgctggtctacgccctgctgctgctctatctgctcgggcggggggagaaaaagcggcctctggtacccctgggcctggggacggccggactgtgcgcggccctggtgttccaggccgcgtcccacaccgccgggcggctcaccgtctcggtgctggacgtgggacagggcctgtcggtggctctgctctccggcgggcgcgccgccctggtggactgcggcggcaccggggcggacaaccccggcgacaccgccgccgactacttccagtccctgggcctgagccggattgatctggtggtgctcacccactaccacgaggatcacgccggcggcatcccggagctgctggagcggctggaggtggggctgctggtgctccccgacgtggaggaggacgaccccctccgccgggagatcacggcgctggcggaggaaaaggggattgagaccctctttctggcggaggatgccgacgtgacctttggggagtccgccctgcgcatttacgcgcccctgggcagcggcggggccaacgaggagggcctctccgtcctgtgcaccgccggagacttcgacgggctgatcaccggcgacatgaatgacacggtggagaagcggctgatcaaatatgggtcgctccccgatctcgagctgctggtggcggggcaccacggctccaaatatgccacctcggaggagctgctgctggcgacgaagccggagctggcggtgatctccgtgggctacaacacttacgggcaccccgcgcccgagaccctggagcgcctggccgccgccggctgcgcgatctaccgcaccgactggtcgggcaccgtcaccatcaccgcaaagtaaggagaattgccatgccgcccaaagcaaagccggacactgcggcctaccagaagctgaaaaaggacatcaaggagggcaccatcggcaccctctacgtgtttcacggggaggaggcctatctgcgggacttctacctgggacagctgaaaaagaagctcctgcccgccggaatggaggagttcaacctccacaccctcagtggaaaggagtttgacgtcaaaaccctggcccagctggtggactgcctgcccatgatgagcgagcgtaccctcatcgtggtcaacgactacgatatttacaagggggacaaggacgccctggcggcggtgctgcgggagctgcccgactacgtctgcctggtgtttgtctacgatctcatcgagtacaaggccgacgcccgcaccaagctggccgccctgctcaaggagaagggaagcgtggtgcccttcaaccgccaggggcagggggatctggtggactggatctcccgccgcttcaaggccatggaccacgacatcggcaccgaggacgccaagtacctgatcttcctgtgcggcgatctgatgaacaacctgatctccgagatcgggaaaatcggttcctacgccgcccaccaccgggtgacccggcaggatatcgacgccgtggccaccccccagctggacgcggtggtgttccagatgaccgacgccatcgccgccgggaacttcgacaaggcggcggaggtgctgggggagctgctccacatgcaggaggcccccatcaagctgctggcggtgctgggcaagcagctccgccagctctacaccgcccgcctggccatcgagcacagaaagggcgtgccctatctcatggagctgtggggcatgcgctcggcctacccggcggagcggctcatgcagtccgcccggcgcttttccctgccctggtgccgccgggcggtgctccgctgcggccagaccgatctggccatgaagtccaccggggcggacggcgaggagctgctaatcggcctgctcatggagctggccgtcaagaaaggagcgtaagcaaatgaaaaagaagacgctgttgggagtggccgccgctgcggccgtgggggccgcgggctggtatctggccgccggcggccgcaaaaaccagatcgagcacatccgccgggaggccaagcgcctgctggcggtgcggtgggacgagctggccgccctgcgctccgctgcggaggagggagagctggacgccggcgccctggggccggtacccctggacggggcggcgctggagtccgtccggatggaggacggggccgcggtgctctccctgcggggggagaaggcggcggcctggctgtccagcgagccgctggaccggctgggggtgtactccgtgccctggcgggggagcgcccggcccggcgtgctctacaccgaatatctgggctccggatggtacgcgggctacgcctgcctggggtggggctgacatgctgcgcatcagggaggccatcgtggtcgagggccgttacgacaagaacaccctctcccagatggtggacacggtgatcgtggagacctccggcttcggtattttcaaggataaggaacgcctggccctcctgcgccgcctggcggaaaagcggggcctgatcgtcctcaccgacccggacggagcgggctttgtcatccgcagccacctgaaggggagcatcccgcccgagcaggtgaagcacgcctatgtgcccgacgtgtacggcaaggagcgccgcaagcgccggggtggcaaggagggcaagctgggggtggagggtatgcgccccgaggtgctggaggcggcgttgcgccgtgcgggggccaccttcctggacgagacgggggaggccgcccccaaacgccaggccatcaccaaggcagatctgatggcgctgggcctgtccggcgggccgggggcggcggagcggcggaaggagctgctccaccggctggagctgcccgaacggctctcccccaacgccctgctggaggtgctcaacgccctgtttacgtttggggagctggaggatacggttcggggagcagatgcgaaaaaattttcctgaaattcgaaaaaaggacttgacgaaaaagttaagttgtgctatcttataaacagaaatgataatcattactgattagaacttctgccacatagcaataaaatatcattattaaaataaacaggaggaattacatcatgaaaaagtgggtttgctctgtctgtggttacgtccatgagggagattccgctcccgacttctgccccatctgcaaggcccccaaggagaagtttgtgctccagggcggcgacaagacctgggccgccgagcacgtggtgggcgtggccaagggcgctcccgaggagatcctccagggcctgcgcgagaacttccagggtgagtgctccgaggtcggtatgtacctggccatgagccgtgtggcccaccgtgagggctatcccgagatcggcctgtattgggagaaggccgctctggaggaggctgagcacgccgccaagttcgccgagctgctgggcgaggtgctgaccgactccaccaagaagaacctggagatgcgtgtggatgccgagaacggcgccaccatgggcaagtttgagctggccaagaaggccaaggagctgaacctggacgccatccacgataccgtccacgagatggcccgcgacgaggcccgccacggcaaggctttcgagggcctgctgaagcgctacttcggctaattgaaaccgcataaataagcactttttgagagggaatggggagacctgttccctctctttttgcgtttccgtcgctccattgtggatatttttgtggcatttctttcttttccatccgtgaaaactttccacatgtggatattcagtttttgccttatatcaagcggtttttaccgcttaataccgaaaaatgaagagaaattaacaacttttgagaagtttttgctttgccgggacaaaaatcaagaagttttgaagtgttttccttgactttcaccgattttttgagccgccagagcaaaaaatccccgccgctgattgcttttcaccgctcccctttcatcttacagccgttttccggctgtttttttcttgctcccattatactacatgttccgattaaagtacaggtttttcttttcccggtgctatacttaaagcacaaagagggacagagaacaagaaaaaaacaaagcccctcaaaacaaaatcaaaatgaaaaaggagattaccaccatgaaaaagaacaccatcatcattcttgacgccaccaaagcccaggtcaccaaggcttttgcgaagcaggcccgtatcttcggcactcccgaatacagagagtggagagccttccttgcggagaaccctggtactgaaatggttaccaagaccatcaagaaggcgaaggacaagaagaacgacgccaagaacagaacctatgagaagatggccgagtacatcagcttgcaggagaacgccgacgagttgatgaaggagttcgaggcgcagaagaaactctccatcgttcagaaaagcccttaccgttttgtcttgaactggttccttgatactttctccgagttgaaggaggacgaggacaaggccaccgccgccgaggaagccgctcccgccagcgaagccgccgccgatcagaacgaagaggcgaaaatgaagcagaccgcttgaagtgcatttttcaaaaatcagaaaaggagcttgatactatggaattcacccgtaactacatgattggctatctgttgctcttctgcaccaccgaggaagagtacgagaaagaggaggagcgcttgactggcctgaccaatgaagcgctggaaatggagttcaccgaccaatacaacagcctgcaaggtgcctgccccagccatcccctctacgaaggcgatacccccgacctctacctggacttttaagacaactcaaaattcagatcaaaattttaaggaggaacaataccatgaagaacacttacaagattgattttgtgaacaacaccctgaccatgagcaaggcttttgaggaagccctcaacaatcccgcctccgaggaatacaagctgtttctgcaactccgcgccgacttccccggcctgacgattatccgcaagacccgccgcgcctccaagaaggccagccccaacaagaacctgacctacaagcacatggagcagtacatgagcgtgtttaagaacgctgacgagctgctggcccagttcgaggtggttaaggagtgttccaaacagcagcccagcccctacaagttcgtgcgggactggttcgaggctcagttcgaaaactacaaggagcagcccgatttcagcaacaatgcctccaaggtgattgacctggaaaccatcaagaagaagcaggaaaagaagaagaagcaggagagtgcttgataacaatggaatacaaaatgagagaggacggtactgctggtgtaccgtcctctcgatttttattggttgctaagttttgctgtgtaatattctataatctggcgtccataagttgccatgctattgagagccgcatccgccagttctccggcttcgccgctgtcctggccggcattcaacgcatccagcgctgtttgtccgtttgtcacccaggaatcaaatgcgtcctcaaaagcatcaaccggcaagtctggataaatacgttttaccgcctcccgatcaaaggcaggcaggtcaggcacagcagcagtatcatcgccaataaaatcttcagtaaagccctcgaaccctgtgacgctataaacgccataggtattgatactgctgagataagacagacagccctgataggacgtcaaaccattgctgaataggttctggaagagcacaccgctgaccatgttgttacatgtgcctctcaccctctggaaataggcggcggcaatctgatagtcggttggattttcctcgatctgataaacgtcatcaaagcgattgattgtgataatgtcctctcgggtaaagttcaattcacaatcatatacatcgcaactcgtcactgtaaaggtggcggttgtatcgtcatttatatcgtttgtattgattttgtagacagacatggagcggataggctcacccccggccagaacggttcccaactctgggggagcggcatagccgctcgccagcataaagtaatccacgttactgggggtggagaagccgtcaatttcataggcagtcggagcgtacagaggctcataggtattgacgccgttcatggtcatggaatagttggattcaaaaacgcccatctccacatttttagattggtctggaataatatcgtagacatggattagataggtttcctgcgcagttaaatcatctaattcttccccttctgcccgttccagcagaaataatcccttgctttggatagggccactttgattttcttgtgaagtagcggtttcttcaccggaggttccgttgcttccggtatccccgcccccacaagccgccagggatagcataagagctactgtaagaaatagcgcgagagttttcctcatgtaaattccccctaatcttaataagttgtcagtaacgacacatggtaaggagattatagcttaaaaatctaaggtagtcaactatttcgggttttagttctgcaaagctgtcctataattttatacaatgttcaggaaagcaggacaaagaggtgataatcgtgtacctacccaaagtaggcgtaaaaatcaagcagttacgaagtcaacgaaacatgtctcaaatcacactggcacagcaactcggagtttcaaaatcggttatcagctcttatgaaaatagtgtgcatttgccgccatacgatgtgttaattcaactggcacggatttttggtgttagtacagattatcttttggggacagcaaataataaagcaatcaatgttgatggactgaccgacacgcaaatcgactctattacaatgattgttaatgaattgaaagctatgaacaaagaaaaatgaggcaggataggtttttttcctactctgcctcatttttgcggttatttccgtccccggtcgtgttctccgtgatttatcagcggtcgggaaaactcccaagaaacgccgccgccgcaaattacaactgtattttcccggaaccatcccccgccgccgcgaggcgtttccctgttccgctccacctggggtactcccagcctgccctttgaccttcttgtgagggaaattgccagccgctcgtgatctgcggttccgctccaaattgaaagtgcactttcaaacatgaatattatgtaaatttacgcgcaaagtattgatattgcgcgtaaaaaagaatagaatagtagtgccatagaaaggagtggtcacaatggcagaaacaacgaacctcaatatccgcattgacaaagacctgaaagagcgtgctgaagctgtctttgccgacatgggcatgagcatgacaacggcctttaatatctttgtgcgccagaccttacggcagggcaaaatcccctttgagatttacgcagacccgttttacagcgacagcaatatgcgggcattggacaacagcattaagcaggccgggcagggcaaggtggtagtcaagtctatggacgagttggagcagcttgccgatggggactaacatcacattcacggaacaggcatttgaagaatatctgtcatggcagggacaggacagaaaaacactgaaacggataaatgccttgttgaaggacatttgcagaagtccatttgaagggattggcaagccagagccattgaaggaaaacttgtcaggctattggagccgacgcattgacgatacgaacagacttgtttatcgtatggtcgatggacaggtcgaagtctatcaatgcaaaggccattatgacgattgagtgagtgaagcggagctgccagccgcttcacttttttgttgtccggttccgctccaaattgaaactgcactttcaaaaccagatctccacgcacaagaattcaacttgtgagaaaaaccgacaactccgaaacaacttttgagaagtaacagcaacttctaatcattcagcaacaacttttagagcaaaggcaacaattttgttgcagaatgaggtaaatacaaggcagaagccgtttctttgacacaaaaaaatttttatgttataatatttacagaaaaaggaaaaatggatttgtaattcattattccctttgtaggcttaaacaagcagtaggatgaaggcgttgcggccttccatcttgtagagcgcttccgttctatgcttccgggcagcaacgccaagtgctggcaacacgcttcctactgtttgcttaaatctacaaagaaaggaagcgtacaagatggcgaattagaacctgttgccagcaggggacaatccgaagtacaacaactgttttactttgggtgagaagtgttggcacaatggaaggctgataaaagttcctgtttttatcgaccattacgatgatacaattcaaaatttgtatggtagtaaaaacggcgataaacgcaaatattatgagctttcttatgaagaagcccaaacagaatattatcgttttagaagtagcgaaaactgggagaaaagcaacaaagttttacgtatcagtctttggcttgataatgccatgtttggcaaccttcacatttttgtgattgactttgatgaatttgacgtagagagccattttttcaaagaagctcaccgtttagcggataaagtaacaaggtcacagggcggcggctatcacatgttttatgggatagacaagaaaaaggcagagccgctttttgatagtatcaatctattggcaagtgagaacgctgcgagttttgtttgtaagaccggggctgtcacacgggacgggacaaacaaagtcgatctattttgtgatacaggacactttatttacgaatgggaacagtgggacaataccattggcctaactgataagacgcaagaactttaccggcttatcaaggaaaactttgaattatcgcgtcccatgagcagcggcaagggtaaacgcacaagcggcaaaggcggcaagagttatgccatgctggaagagcttcccgaagaagagctgttgcagcagatgagcgcagagcagcgagaagtctttgccgatctgaaaacaaaatcctctgactgttccagctcccagtggttcagtattggcattgatatttaccacgtctttggcgcggagttgggcggcaaggtgttcttcttatggagcaaaccggggcgaagtttccagccgcaaggctgctctttaacatggtctaatatttgtgaccgtgggcctgatacagagcttgtcaatgggcgatgggctgacattatgcagggcgataacaagggcaaagagcttgacgagctatctttacatgaagcgctcgaaccagagccacaagtcccgctgccgctcgaagaggattggcccgatatgctggaagatgaaaccgccgccgtgcctcttccaaacgagcaatttcagtttggtgatctgattgtccagcttcaagagaattcagaccgcttcttattgcctgacaatggaagcaaatcggtaactgcctatgatgtaattgcgcagttatccgggagcgcgttcaagtcctataaaaagcaagtgaagccgcttaatgataaactgcaagtgctcccgtacagtgagagataccgggcaatcttttatttcagacgtgagtataaaatgccgcctcttcttgaaaacgggaatgagattgtaaagtttatccagttcgccttacgctacaccacgaatattgaacttagccaaaactggcaagcgtgtttagatgtgtcaaatacagagaaagaagccgccgcgttgctggcttattatgggtgggcgtcgaatttgaaaaaggagttgccgcgaagtgaaaacgccttttacacagtagaagcagagaatggagtgcggcactatgagattgtacctgacgatattactttgcgctttgaggcaatccagcaagaggcctgcataaaccttggcgttcctttggcgatcagaagtacaaggctttcccacaaagagaaatataaccgtttacaagctatcctaaagccccgcctttggtggcgaaatggtgtaagaatgggactaaccaaaccggcgttggacgagtgcgatttaagaattgggagttacattgaagcgctgttagactacaatgcccttgataatatttcactcggagagcatatttacagggtggagctggataaaagtgaccctggctttgcatgggccgctccaaggtcatttgatgtgagcatgtaggatttggcctttgaagattatcaatacaacatctcccccgactacaacagagaaaatgccgccgaattaggaaaagccagaagccgagcagcggcggagcggaactttgcagcggtcacaggtgatgaatggacagccgccgaattaaccgcacaggggatagataaagacaaaatcccacgtcttattaaaaatgggttgattgagcgcgtgggcagaaaccattatcgaagaatttcaagttaagtctgccgctgttcgcgtgtaccaagtttcctataaataattaaatctaaataggattttaggtacacgcgaattgtcgcttccacacttgaaagtacactttcaaaaatatcaatgaaggaggaacacaacgatgttcaaagaattacttcaaattttgtaggatttcgagcgccaagataaggccaaccgtacccactggattgaaagcgtccttgctgcacagagcggttccgctccaactgctttagagaattacaagagggcaaaggagagctggcaggacgaacagagccgccgccaaaggttctatgactatctcatgcagcgccgcgatttggtgaacgccctggcccaaagcgtgatagacagcagcgccaaggagatacaggtcaaaaccgaacaggaacttgataaggccgtgaaagaaaaaatagataagaccgttcgcctttatttcaaatgatggtcgcgcagatctgataaagatgtgtcgttaaatcaagaagtcggaggaagatgtaaaatcttctctccgacttctcttttgtgttcaagactttttggaagttgatgaaagttgtgtgttttctttctcgtcttcatccttttcgccgggcttcttctcccagccgagtatttcttccatgataagggcagggggcaaatccgtatctccgaacatggcggcacctcccaagtatcgcttgaagctggcgcgtcgtggcgaacgtcacgacgcgcttcctgttttttcgcgctgcgctggattttcgtactactgtaatcaacattagtagtctttcgtagttcccataaattacctgtcgcctggggcttccctgacgtattccagtaaatcgccgggctgacagtctaaaagcgtacaaatagtatccaaagttttccacgataccaattccccgtgtcgtaattgctgtaaataggattgcccaatcaacttttcttcccggattttggtagaggaataccctttttctttgagttttgccattatgtctaccttgtagcggattgccatgaaaacgcgcacctcctccattgtccttattttaacacgggattgcactaaaatcaagtgctaattgtgcacaaatacggcactaaaaattagtgttaaatgtcaatggacagcaccagatattagtgctattataaagacagttaaggggaacaccacaaacaaaaagcaaaggagaatgaaccatgagcaagaacgaactggtagccaagatcgaggccctgaacgagtgggaagctgttatcgaggaagccaaagcggaggccgaggccattcgggacagtatcaaggccgaaatgatggagcgcgacaccgaggaaatgaccgctggaaagtatatcgtccgctggacttcggttctctccaatcggtttgatactacggccttcaagaaggcccacggcgagctttacaaggaatacaccaaacagagcgccagccgtcgcttttccatcagcgcctaaagaaaagccccttgtccgacacgccgaccaaagcagacggacaaagagcttacaccccaatccaaacggagagggtaagaccattatagcttgccctctccccaaaatcaagaacaggagagaaaaatacatgaaagaactgacaagctataatcgggtagccgggtatctgaacaaggttttcgatctgctgaacgcggaattctttgaaaatgcactttcaaggccgacgatcaccattcaatctacgccccgcgcctacggccatttttccttgcgtgaggacacatgggtttccaagctgggcggcacccacgaaatcaatataggagccgggacgctggcccggcccatcgaggaagtgaccgcgaccctgcttcacgaaatggtacattactacaactacgagaacggcatacaggattgcagcaggggcaacacctaccacaatcgccgcttcaaagttgccgccgaagcccacggcttaatcgtggagcacagcgacaaatacgggtggagccacacaagcccctctgacgagctgctggacttcatattggaaaacggcttgaccgacattctcataagccgcaacgagttcgccgggttccatatcaccgggacaggaacacacagcggagcagagggcgccacaccgccgccgcgcacgtccagcacaaggaaatatatctgcccctgttgcggcaattctgtccgagccacaaaggaagtccacatagcctgtttagattgcaacgcgccgatggtgcttgcgggatgacagggaagggtggggagcaatccccacccaattcccaaagttcgtataagtgaagaaatacgaacaccaaaatcaaggtattccgggatttttccgccgccgcccatcatacacgaactttcccgcttgaaataacgaacttttgacgatggaggccaccatgaacaagaaaacaaaggcgctcaccaccgagcaatataaagagataatccagaccatgcgcgaggggttcagcggttgccgccccaatgagcgcatagccaccgcccttgtgctggaagggaatttaggcttgcgtatcagcgatatattgaagctgcggccttgtgatattgtccgggacggggacagataccgtctggaaatcaccgagcagaaaacaggaaagcgccgcgtgttcacggttccgctggttatccagcaatacatagagaattattgcttgcgccacaatatccgccgcgaagatctgatttttcccattaccgagcgagccatacagaagcagctccatatcgtgtgcgactacctgggctttgagggtatcagtacgcacagcttccgcaagtggtacgccaccgagatatacaaggcaaacggctacgatattgccctggtgcagaggttactacaacacagctccgccaccgtgacacagcgctatatcggtattgagccgcaacggatagaaacggcaatacagaaccatgcacagcttatttgacaggcagggccgctcatagtgagcggccctctataacttcgctgctgccttttccctgattttatggtacactggatatatgaccgggaaagcgaggcggcacacatggcaagagcagaaaagcaaaaagtgaaaacgctttttgtggcgaaatactttctggaaaattcagatgaaaaccacccaattactgctggggacattgtggactatctgcgggaagattgtgggattgaagcggagcgccgcgccatctaccgggatattgccgccctgcgcgatgtgtacggcatggacatagacggaggacaggggggcaaatatcggctattgtcccgccagtttgaatttgacgatttgcggctgctggccgagtgtgtccacgcggccaaatttatatccgcgtccaaggccaaggagcttgtaaagaccatcagcgagttttgcagcatctaccaagcggaagagctgcaaaaagaagtgttcctctgcgaccgtgtgaaaacgacccgtaacaacatattgctgactgttggtattatctatgcggctatggctaccaagcaggacggaaagccccacacgccgcagaaaatcactttcaaatatttgaaatatacacttcaaaatggggtaacacaggtagagcgccgcaaaggagctacctataaagtcagcccctacgagctgttaataaatgaaggaaattattatctgctgggttatgggcctgttggcaatagaaaaacacctcaaattgctacctatcgtattgaccgtatgaaggaagtaaaacttgttaatgagccgcgagaaggagcggaagaattttcaaagattgacatggagaactacacccgtcgtgtgttctctatgtttggcggtgaacgaaagcgcgtcagtattcgtttccgtaacgacttgctcgatacggccattgaacgatttggaacgggcaaagatacgttttatagacccgatggcaaagaatattttgtcgtgaccgccgatgtggaagttagcgaccagtttttcgcgtgggtgtgtgggtttggtaggcgaactaagattatgggtccgatagatgtagtaaatcgttttcaatctttcgttgaaaaaatatggaatatgtacaatatgtaagcacattttggaaaggatgattaaattgaaaagaaagcaaaagttatctttctccattcctccgagttataatggccttcgtttctttgcagaattagctgaagaactactattttattttagtcatgattcatttaaagtcccaacattaaattttcattttttgtgttttgaggcattagatgtaatagataagattgaagcaggattactagaaaaagggaatattatacctattgttcaagagtttgttcgttcttataaagatgacccgataattgttgaattttatggggatgacattaacaacttgtttttaacaaaaaatgcagagggacaatatcgaactgttcttaaagaattgatgcaatcgccgacaagtgattcatccattcagcgcttaaagaaatgcgtgctttttttgcgagatgatttaggcagaaaatctagatactataatagtggaatttcaaaaatagaaagtttaattgttaagcaaaatattagccattcagaaatggaacagctccagaagtatacaaaaattattttgacagaattgattaacataggatacagtcaagaatatatctatacatcagtgctaaatgttttctttaatggggaacggccaatagaagatgctaaagaaggctttgaacggtttatttcatttttcccgttaaagcgacggaggtatgtcatctatttgcctttaaagaattctaaaataacagaggaattagctccatttactggactagatatagccgaaaatatttatgaaatgtttaataattcttgctcatttgtagtaaaagtatcccaagaggcaatggacccggaaaaagcaaaagcaaaggcgattgcactaatagatttctgcctttcagtttcccaatattgtcgacacaacaaaagagggtattcattcaaagaagcagaggttgttgatatagaatcaaaagaagtctacaatttaagaacaatggcggctgcgatttcgcggcagaagcgaatacagatagatgaagaaaagctggtaaatacatgcttcgatttggaatctggtatttttgatgcaataggtttacatgcttcggcatttagttcaaaggatgaaaaaaatcagttgctaaacttatggacagctatggaagttttaattccaattgagaagagtgggagttctagcaaaataaatcagatttcaaattcggctgcaacaatattgtcctcaaattatataagaacattgatagttcaattagatgcacagatcaaggggaaaataccggatgaatatgaaaaactaatgtcggatattgttggaaccgataatgcagaaaaattattgcttattctagtattatcagattatagtgacaaatttgatagtcttatggaacaattaaattctacgcagctccttatgttcagaatacaacaatacaaaaatattttatcctttgggcatagtgtaaaagagttttatgaaagacatgctaaacgagttgcgtggcaaattatgagaatttatagaaataggaatatgatagtccatgatggaagtacacttccgtttttatcagtgatacttcaaaatcttcattattatatcgatacaatcatcgacactttttgctcaatgaatgataaaaggtttcaagatgctaattccattattatgaagctaatgctaaatgagcaagtttatctaagtagattagatactacgaaaacattttcgagagacaatgccataccatatctttttgggtatatacttgacgaaagttaataaaagttgagcaggtatagcaaaaaaatcttgatttttgctatacctgctcaataagttttcaattatagccgattgaggttttcccgcaaaatgtcaatccccgctttggagagggcgatataataccgctgtgtaacttgtatgtggccgtgacccatttgcgaacacagaaggtgcgtgggagtattcagctccgccatcatagtcccataggtatgacgcaaatagtgatacttgaacattatcccgcatttggccttaacctcccgcgtgtggaacttcatggagtttaccgtctggattttcccatctggcagacagttcacaagctccgtggaggaaattttgcttccgtccaaatcctcaatgatacgctggttctgttcccgcaagtcggcaaggtggagctggtcttgctcccgccgcttcgccaaattctgaaaatacactttcagtttgtcgcacatttggattgtacgctttgcgttgcgggttttgagggacacaagcttgatacgcccctgctggtattgcatttgccggtcaatcaaaatcgtgccatttatcagatcaacattcgcccatttcagaccgtagcactcattgatacgcagaccgcaataccgtcccagcaaatacgccgtttctgcattggtgccgtggaaataatcatccagtacggcaagctcttcccgattgaatgatacaatatccaagtcatcatccgttttcagctttggcatgtggattttggtatctttgttgacacagagcttgttgtaactgtccacgtagagatagttccgggagtaggcttgcccgaagagcagatagaacatcttcaagaagccctccacatagcgataggagaggccgcggctgcaatacagttccgtcaagtagtccaccacctccgccgcgctgatttcatcaatgtaccgctccccgaaccgggtgcaaaggtggtttttccagaggctgtcctgcttgcgtttggtagtgtatgcccggtcacttcggccattagcacagtattcttgatagacctcttgaacagttttccgtaccgtgggctttggcttgcgggagttctgggcgctgtcaatagccgcttgccgcgccttgattgcttcacgctttgtcttgaaaggagcgccaaattcatcctttgccttccgaacctctttgcggacaccattcaccatgagaacatagcgataagcccaattcccatttttcaatttgtagacacccgcgtcattttgctttgccacttgcaaatcccccttgtggatttttttgtggcaaaaagccaaattccagcgtgtgaaaaatgtccacttgtggataaagaaatttcctgtatcttcctctttttcacctgtttcccggcgccgaacggcgaagccgtttggctacttcaccggcgagtgcaccgaggtcggcatgtatctggccatgtcccgcgtggcgtatcgcgagggctatgccgagatcggcgagtattggcgccgggccgctctggaagaggctgagcacgctgccaagttcgcggagctgctgggcgacgtggtgaccgactccaccaagaagaacctggagatgcgggtcgaggccgagaacggcgccaccgccggcaagttcgagctggccaagaaggccaaggagctgaacctggacgccatccacgacaccatccacgagatggcccgcgacgaggcccgtcacggcaaggccttcgagggtctgctgaagcgctacttcggctaatcaagcagaatacggaaaagggcggagccttcgctccgccctttctgattgtatgaaccggcgataggcggcggacccaattccggtatccgctgtgataggagtatgtacggatgaataaaaaagagattttactggcgcggcattttgcgacgttggccatggtctatgcggtgattgccatggcattgggcgtattttatagggagtttaccaaattcagcggctttgcgggcagaacctctctgtctttcctgcatacccactattttgcactgggaatggtgttttttcttatcctgatgctgctggaaaagacatttgccttctcaagccgaaacagcgggaagttcctgctggtctatcaactaggtctcaatatcacagggctgggattctttctgcgggggatgagccaggtgctgggaaatgagttgagccgaggaatggatgcctccatttccggaatctcgggcattggtcatattttactgggtatcggcatgctctctctgcttttgcaggttcggagggcggcagacggaaccggtgccggacagaaccaggacggcgcgctgcggggctgatgttccgcagcgggctttttctagcttggcggccggaagcctattgacccgggaaatgggatccactatgatggaggaagaacatgggaggagggattatatgcccaacaacgggaacaacttccggcatgctctggcagagtatatccgaggctggggcgaaggactggcggtcgaggaggagaaatacatcggctggcgctttatcggcacaccccgtaagctggatatcgtgatcatgaacccccagaactgccgctccatggccatcgaggccaagctccaggagaccagcggttcggctttcgagaagctgagctacgccctggacgactgtatggcggcccccatcccgtccattattgtcttttcggggcggtatatccgggacgacatgaaggcaaagctgatttcctccggtcatggtattgaagtgggctatgaaaacggggcgattgcggatcggtatgagttgctcaagcagcgcatttacatcgaactggggatgaattatttccccttcctccgtccatagccgtgcagaaggggaaaaggccgtgtgccgccaaacgcggcacacggccttgaaattccgatgctgggacgtatgggaagggaacaggcgccttacgcgccatgccggtcgaaacggatatcaaaatactgcttcgcaatatcggggtggtcgtgctcgaactcagacatgtagcggaaagcagagctggtcaggccgttggcctcgcagaactgccggaagctcttcttcttgagaaagctgggttggttgcaccagcgggccagggtgatgaacatccctttgtaaggagagcggttgtagtactcgtggcgcatgatgtagggcagacactggtactccatcaggatacggatgcgctcaaagatggaggcgatctcctccgcgccctgggactcatagccggagagcacgtagagcttggtggacttgtcggagtgtctccgccaaattttcaggccgcgcaccacctgttcggcctcgttgatgtggtcgaaggcgaagatatagtccccgtgatacttcacgttcgccagccgcctggccttctcctcggtcatcagacgcacatccaggccctggcggaactgaaagcggcggccggtttcatccagctcgtccagcacctcctgccacttgggaaagccgaaaaactggtcgtcccacagatatatgtgcttgcgggaggggtcgaagaactccttcaccggagagtggcggaacacatggtcatacttctggttgacacagaaggggcacttgcggaagcagccccgagtggtaaagccgatgctgtaatccatgtagtcactgtaggtctggggcttgatgccccgggcgatctgcctgcccacatattcgtcgtagaggtggtagtcgggcatatggtgttcgacctccaggggaaggtccggggcggtcatccagaaaaagccggtgcctccaatgtgcagattggggtagttcttgggatcaatgggtacgttggtaaaatcaaatacccgggaaagatatacctcgtcgtatttgggaatggagtagtaatcctccagcagggtgacgtcgttgcccagctccttttgatagccgctgattttcatgagagccaggttggggtgacgggtcccgttatcgagcagatccgcgtcgataattccgattgtcttgggcatgttttcaccgtccttccgacccagtatagcaaaagtcgatcgacctgtcaatccgggatctctctggatcattttaaaaatgatccgaagagatcaaagcgaaaatggtccggtttataggacggatgcaccttaacggacgttttacttgcaatctgcgccggacgggcttataataaaaaagcaaatgacaatactggaaaaggagtgatatgcgctgtgagcggtgaccctgtgagtcgagaatgtcccatatggagcgcggcgcattggctctgcggctgaccggcccgtccggtagacccgcacgccgtgtcgccgcttggcctgtgcagaaaggatattttccgcacaggcggcaaagacaaatgcgtgcggggatttttatacccttttgaggggcccgcgccgagaaaggcgtgagatcgttgctctctatttttaaaacgattcaaggaaaaatgacccggctggattccgtgcaggacggctgctgggtgaacctgacctatcccagcgaggacgagctgaacaccgtagcggtgacgttgggcgtggagccctccttcctccgggccgccctggacgaggaggagacctcccggatcgacaccgaggacggacagaccctcatcatcatcgacgtgcccgctgtggagaaggatgacgcggtggtgtactccactctgcccctgggcatcatcgtcaccgacaagcacatcatcaccgtctgcctgaaggagacctccattctgaaggattttcaggacggactggtgcggtttgccgaaacccagaagcgcaccagcttcattctctatatgctgttgcaggttgccaaacgcttccttcagtatctgaagcagattgacaagatctacaactacatggagcggcagctctacaagtcccagcgaaacaaggagctcattcagctcctggatctggaaaagtcactggtctacttcaacacctcgctcaaggccaatgaggtgaccctggaaaagattctccggggccgcatcatcaccctatatgaagaggaccacgacctgctggaggacgtgctcattgaggtgcgccaggccatcgagatggctaacatctactcctccatcatctctggcatgatggacgctttcgcctccgtcatctccaacaatctgaacgtgatcatgaaggtgctgacctccatcaccatcctgctgaccatcccaaatatcttcttcagtttctacgggatgaacgtagccaatctgcccctggaccagttctggtggttcccgctggccctgtccggcgtggtgatcctggtggtggctattatcctgaaaaaacgggatctcttctgaagaaacggtggaccatgtccaccgttttttgaatcaaactttatgtgtggattcatattctggtaacaattacatgttatactggattatattggagagatgcacatttcacaaaggcgttctgcggtacgcaaggcagagcggaagaatggaggttttctatggcgagcaatccaaactactgcgatatcacccctgagattgaagcgctggcggcccagtccctgcaaaacagcagcattgacgcgggggactatgtgaagtacgacgtcaagcgcggcctccgcgacctcaacggcaagggcgttctggcgggcctgaccgagatctccgacatcatcgccaaaaaaatggtggacgggcaggagatcccctgcgacggcaagctctactaccgcggcatcgatgtagagaagctggtggcgggggcgctgaaggaggggcggttcggctttgaggagaccgcctatctgctcctgctgggccgcctgcccaacgcggcggagctggagagctttaaaaaccagctggcctactaccgtaccctgcccggcaacttcgtgcgggatgtcattctgaaggcgcccagccaggatattatgaattccctggcccgcagcgtgctgaacctggcctcctatgacgagcggtgcgacgatatttccctgcccaacgtcatgcgccagtgtctccagctcatcgccctgttcccggtactcagcgtctacggctaccaggcctacacctacaagagcgggaacagcctttacatacacgccccccagccggagctgtccacggcggagaacatcctctccctgctgcggcctgactcctcctactccttctgggaggcccacgtgctggacatctgccttacccttcatgccgaacacggcggcggcaataactctacctttaccacccatgtggtcacctcctccgggacggacacctactcctgtatggcggccgccctggcctcactgaaggggcccaagcacggcggcgccaacatcaaggtcattcgaatgtttgaggacatgaaagagcaggtgaaggactggaaggacgaggacgaggtgcgccattacctccaggccctgctggacaagcaggcatttgacagagctggcctcatttacggtatgggtcacgcggtctactctctctccgacccccgtgccaacctgctccactcctttgtggagaagctgtcccgggagaagggccgtacggaggagtatgagttgtactccctggtggagcggctgggccccgagatcatcgccggggagcggaagatgtataagggcgtatccgccaatgtggacttttattccggttttgtctaccacatgctggatctgcccctggagctctatacccccctctttgccatggcccgggtggccggatggagcgcccaccgtatcgaggagctcatcaacatgggcaaaatcatccgcccggcctacaagtatgtgggaacccacgcggattatgcgccgcttgcggagcggtgacctcaaatccatccgaaagaagtgtgtgcggagatgaagtttacgctggtaaagggcgtgcctgagcggctcgaggagtatcgggaggtcttttatggctccaagctgtacgacgcctacttcgccgagggggacagcctgaatgagaacctgctccgtgcgatggcggacggcgatctctatgtagccatgagccctggggacgaggccgtgggcgtcatgtatatgacccggaacggcctggccggcctgccctatctgaatctgctgggtgtgaaaaagaagtaccggggccagggcatcggcacggatctggtcaaaattttcatcggggttatggaggaaaagaactatcccaatatgttcatcatgaccagccagttcaatacgggggccaagcggctctatcagttcctgggcttccagcccaagtgcctgttgcacgatgtgattcgcaagggcgtgtccgagtggctcttcatgcgacccaaccggaagctggcgtaaagaacataaagaggaatcccccggcggtgccgggggattcctctttatttgatccggcgcacctccagatagtagtgctcctggtccggggccagcggcacggaagtaagtcccgccgccagatcgaagccgaagttctgacggacgatggcaatctgctccgtgtgggccagcgcggcggtctggcgtgtgaaggagagggcggaacccagccgcgttaccagatcatagccgtaaatgccccggttctccgtgtgggcgcaggcgaagtcaaagctggcctccttgggcagggcggcctccacctggacgctttccccggcgggaatcgtgagggcggcctccgtatagaagatgcgctcctgtatgttgacccaggagaacacatcctccagcatggtcatgtctgccggcaccgccgtgcccaagccccggcaaagggtgtcaaaaaatacctccctggagagggacgcggcgtccgtctcgccgccgtacttgtgggccagggtatccggggagggacagagggcgttcagcacttccctcagagtggactcgtaccgggtgacggcggcgctcactccgtccagctccccgccggggtcgcagcccccgtcccgatagccctggagggtgtagccctccagagcgccgcctaccgcgatgagcaggcggggttcctgggcgtggggggagtccggctcgggcagggagaagctgcgccgggcccaacccgcctcccggtcaatggagctgccgtgaaagccgtaaatcagcacggcgggggcgtcctccgaccaggggcaggtcaccgccagggtgggggccgcggcgtcgctctccggccgggtgaggtcggtgaaggcgtagaccgtcaccggcgtgtccagggcggggatctcggcgtgggccgccgccagatcgttcccctccaccagggcggcgtactcctcccaggactccagactctggctcccgcccacgccggggcggatgacggcgtccagcgccgcgccgtccgccgtcagggtggggggatagagggcgtagaagctgccggaaaagggatagaccagggtgacgctctggtcggtgtcggtggggttggtgagcacataggagtcggtgacgtcgatgtcggtggtgtgcccgtcgccccagggggcgaagtccagtgtgatggtgcggcgggcggtgagcccggcgtcctccagggtggtcaggggaaagaccggtccggcgtaggactggaagatgctccccccggcgtggccgcctccgccggcggagctgccccccagccggggcagcagcagggttccccccagcagcaggacggccaagcaggcgcacacccccatccaggggcggagtctccggcggcgggcgggcgtcccggccagcccggccacccgggcccgcagctccggggaggcgcgaagggcctccacctgggccagatagtctgatttatgcatcgtcaaagcctccgatcatccgctcccgcagggcctgccgcccccgggccagccaggagagcaccgtgttccgcttggcgcccagtatcctcccgatctccgcggcggtatagccctcaaagtagtggaggtagagggtactgcggtagggcgcgggcagggcgcgcacctcgtccaggacggagggctccgccgcctccggggcgggaatggcctctgtcaggggcacctccgtccggcgcttggcccggtagaggtttttgcacttgttgacggtgacccgcagcagccaggcccgcaggtgttcgggctcccggaagcgcttgccgctgcggagcagggcctcaaagacctcctgggccacgtcctcggcgtcctggggcgagggggcggcgtggaaggccgcgcggtatacggtgtccagatagtgttccacggcgtaggaaaagagggcgtccccccggagctggtcggccatggctctcgctcctttctgccctatacacacctgagaagggcggatgattgcatggattgtaccatttttttcggaaaagcgccaggggcgcggacgaaaaacgtccgcgcccccggcattatttcagcgcatttgccacccggtccagggtggcggtgtggttctgatccagcaggtgggtgtagatcttgcccgtggtggcgggggtggagtggcccagggccttgccgatgtcgaacaggggcgcgccctgggcggaggccacggtggcgaaggtgtggcgcaggccgtggagggtgattttgggcaggtggtgggcctgaatgaagcgggtgaaggccagggatacggcgttgggggagtaggggttgcccttggcgtccaccgccaccatgccggtgtccggccaggcgtctcccagggccagcttgcgctcggcctgccgggcgcgttcccgccgcagcaggcggtagagatcgtcgctcatgtggaggatgcggttggaggagcggttcttggtctccttctgcacgatctccgccccggcggcggtgcgggcctccttgatgtggagcttgcgcagctcgaagtccacgctgctccaccgcaggccgcagatctcctcccgacgcaggcccaggctgcccgccagcttgacgatcagctccagccagtggccctccaccaggccgaacagccgcttgagttccgccggggtgtagaatcgggcctcatgggggatgacccggggcggctccacccgctctgtgggacagcggagaatgatgtcctgccggagcgccatgtgcagggcgcaggagagcagatcgtggtgccgccgtaccgtattggccgacaggcccttgtcccgcatgagcatggaatagtattgctggagatgctggggcgtcagcttttggatggggacggagcccagcgcgtcggacaggtggttgtcgatgatcttgcggtagccgtagatggtggtggcggctcggttgggctgaatgacctcctccatccagtattccagccactgatccaaggtcatggagcggggggccacggtctggtgggtgtcctgttccgtctgaaaatcgcgcaggccccggcgggcctgggccagcgtggggtaggtcttgtacttcttcactcgcttgccggtttcatccaggccgtaatccatgcagacatagtatttctgtcgcatttcgtcaaaagatatattagtttctactttttttcgagccatcgcttcaaaatccctcacttttcgacagaattggacttttacagtatcatacgaaattgtgaaagaccataataatccccattctggcgttattatgcgccaaaatggggtttttatgtaaaaaatatgcttatttggaagcgatggcctcggcgacccgaatgccgtccacggccgcgctggtaatcccgcccgcgtacccagccccctcgccgcaggggtaaaggccccggatgggggactgaaagtcctccccacggaggatgcgcaccggggaggaggagcggctctccacgccggtgagcaccgcctccggcgcggcaaagccgtggagcttgcggtcgaagagggggagggccccccgcagggtgtcggccacgtagccgggcaggcagcggtccagctccgccggggtgacgccggggcggtaggtgggagcgatgcgccccagggccgtggagggccgccgggccaggaagtcggccaccgtctgggccggggcgcggaagccgccgccgcccagggtgtaggcggccgcctcccagcggcgctggaattctacccccgccagggggtgctccgagccaaagtcggcgggggacacccccaccaggaagccgccgttgatgttggccccgtcccgggcgcggcagctcatgccgttggtcaccagccgcccctcctccgaggcggcggccaccacctgcccgccgggacagacgcagaaggtgaaggcgctgcggcccgtgggcagatggcaggccagcttgtagtccgccgcgggcagccgctcccatgccgggccaaactgggcctccgacagggtggcctgcgcatgctcaatgcgtaccccgatggcgaagggcttgggggccatgggcaccccggtatccagcagcatctggaaggtgtcgcgggcggagtggccgggggagagcaccagcgcgtcgcagggcaggtcataccggccgccggggccgtccaccgcaacggcccgcaggacgccgtcccgcacgtccaggcccgccagccggtgcccgaaacgcacgtcgcaccccagggccagcagctcccgccgcacattgcgcaccacgtcccggagaatgtcggtgccgatgtggggcttgtgctggtagaggatgtccgccggggcgcccgcctccaccagcgtccggaataccgtggagatgcgggggtcgtgggtgccggtggtcagcttgccgtcggagaaggtgcccgcgcccccctcgccgaactgcacattggaggtggtgtccagcacccccgtggcccagaagcgctccacgtccgccgtccgctcatccaccggacggccccgctccagcacaatggggatgaccccgttccgggctaaaaagagggcggcgaacagcccggcggggcccatgcccaccaccaccggaggcaggggggaggtccgccgtaccggcggaaaggcgtaaggccgctctgcatggaggctcacgtttttgtcccggcagcgggccatgatccgggcctcgttgtccacctccacatggacggtgcagacatagtgcacgtcggattttttgcgggcgtcgatggactgccgggccagggtgagggagcggagctggccgggattcagccccaggaatctggcggcccgcttgcggagctgctcctctccgctgccgatgggcaggggaatgttttgaatttggatcatgacgttacctctctgttgaagttgggggaatgggtgcggcaatccggcgcaccgggttcatgccgcccgcgggcggggacaagccccacccctgtattccggggccgctctttccatacaggccggagcggcggaggcgttacggagtaagcccccgccgccggaaatctaccagcagaacagcctgggggaagttccaagaagggggaatcgcaattcccccttcttggccgtttcaaggggtggattgttaaggcgg

SEQ ID NO: 4371 - DNA, 1361 bp, Unknown
  gut microbiota DNA sequence
gaccgcagcgtaaagcaaacgtgccggtggcacgtttgtagcgtaggccgcagcggctttgccgcgaggagggaaccagcgaggggcccgccggaggcaggacaagaaaacagatacaaaaagttcatatggaagatgcgccagcccgacacaatgcgggccgatgtgggcagaaggtgaattgccccagaggagcaagagaggccgccttggggcgtcggcctcctacgcggaagggagacagtcgtggcacccggcccaacgcatagcggcgtaggggcgacccttctggtcgcccgcgggcggccataaaggccgcccctacatggttgggcgagtccctgccagaaacaaggtgcttatagtataacaaaaaatcaggattcgtcaaagtcgataatgaataggtcgtttggagtacagtttagaagaaaacacattgcttcaatgttttcataacggatggactttgtttcattgttgaccattcgattaaaattttgatagctcataccgagctgcttatacagccaatacttactttttccttttgcttttaacagggagagaatatctaacttaatcatagtctatgccctcgctatctaatgtaataattagatattagggtaaccagactataaaactatagacttttacattagataatgctatagtctatattgggggtgactttaatgttggaaatagaggagctattaaacgaacgcaaggactacatgcgggaaacctgtccggcctaccgtctggtctgtgccgagcatgaggccctcgtggagattctgggaagctggccgggaatcagcgaggcgttccggtcttatgaggcatatcgccatatggttgccctccgctattgcgcagcctgctaccaaaagaataaaaagctctccgatctctctgccgagggcatctttacctatggagaggacgacatctcccaggaaaaaatattggcttccccccaggcagaggacaaggcggagcggacggcatttcgtatgctgagcaggttggtcgcagaaaagggaaagccgctgagctcattttgggacagctaccggaccgccgtgctataccgggacgatttcgaggccatgtatagctgttatttcggctgtcaggcgggggcggggacgccggagtacaaggcgtggattcagcggtacatcgaaccgaaccgggaatatgaataaaaagcaggtgtcccgccgggacacctgcttttttctgtgtctatttcacatgctcggggcaaatgaattgccccctgcgccaaggttttcgcctcgggcgaaaacgcttgtacggcgcttatcgcgccgccccatcttgcgatg

SEQ ID NO: 4372 - DNA, 524 bp, Unknown
  gut microbiota DNA sequence
gacgcggaagggacttgaaccctcgacctccggcgtgacaggccggcgttctaaccaactgaactaccgcgccatctttctatcaaaagacagcggtcgctgtaatttgtcatggcaggggcagaaggattcgaaccctcggcactcggttttggagaccgatgctctaccagctgagctatacccctaaatggtgggccttcacgggctcgaaccgtggaccggccggttatgagccggctgctctaaccaactgagctaaaggcccataccgttccacagcgtttaaaaagtaggcttgccgtcacagcaactgtggcggcaagccacattctggctccccctgttggactcgaaccaacgaccctgcggttaacagccgcatgctctaccgactgagctaaggaggaatatgaaagggtccggcctggtcaggccagacccttcttttgtgtcggcgttacctatcttcccggtccgtctccagacaagtattttcggcgcaggtgagcttaacttccgtg

SEQ ID NO: 4373 - DNA, 1198 bp, Unknown
  gut microbiota DNA sequence
gatctgatcaaggaacacgcgccgaatatccagaaggtgctggacgaggacgccagattccgccagacggcatactctctggacggcaatatctaccagattccgaaaaatcaggagctcaaggctgccgagttctggtggatcagacaggactggctggataaattaaacttaaaggcaccgaccaccgtcgatgaactccacgatgtgctgtatgcgttccgcaacgaggatcccaacggaaacggattaaaggacgagattccgctgttcgaccgcgccggatggaagcagccggatgagtatctgtatctttgggataccagccttgaattctatccgagagacggaaagatgaaatacgaaccactggaagagaacttcaagacaggcgtttccaacatgatcaaatggtaccaggaaggactgattgatcctgaaatcttcacgagaggcgcttcctccagagataccctgctgggcggcgatctcggcggctgtacccatgactgggtgagtacggcaaactataactccacgcttcaggagaccattccgggcttccagatggtagccatcgtaccgcctgcggatcagaacggtgttgtaaaggaacgtgtatccagatatccgggtgtgggctggggaatatcctcccagtgcaaggatcctgtaaccgtgattaaatttatggattacttctttacagaagaaggaagcgacttaatgaactggggaatcgagggagatacctttacaagagatgcggatggcagcaaacactttacagacacggtacttcagtctgaactgacaccaatcggatatcttcgttccatcggcgcccagtaccggatcggcatgtgccaggatggagactacgagtatgcgaccatgaaggaagacggaatcgaggcgaataagctgtacaatggccatgatgagtggtttgacgattctcttccgccttacctagatggaaaaatggcgttaaagtatacctctgatgatgagaccgagtataagaacataatggcaagcatcaagccttatgtcgatgaaaagttccagtcctggattctcggtgtcaatgatttcgattctgagtatgacatctttatcaaagagctgaaggccagaggcatcgaccgtgcgctggaaatcaaccagaaagcatatgatacattcctgggagaag

SEQ ID NO: 4374 - DNA, 763 bp, Unknown
  gut microbiota DNA sequence
cgagtgtacctatttcccatccatggcagatgatgaccccatcatgtcggcatacagctacgcccagcggctgggggtacgggagggctttgttcccgtgctcatcaaggcggatgatgaaacgctgttggagtgtctggtgatgaacgccgatccggagcatgatgcggacttctacgaatttgacctcaaaacagtagaggagtatcgaaagaagatgctctccgctcccatcaaggacggaaaggcggttctggaggaattgaccggccagcgcaaggaagaagccgaggacgatgacatggactgggaggcggaagtcctgggcgagatggagggcggctatgacaatgaccgattctcctgctattgggattcggatagccacatgacctatccgctcattctggccaaaattccggtcaagaacccctgggagatcttcgcctatctgccctttggaaattggaatgagtgccccgacacgccggacctgatggcagtggcgaaatactggttcgagcagcatggtgccatccctgccgccatgagccacgatgaattggagtttgaacttccgactccgatctccaaggaaagagctatggaagtggctgtggagcaatatggcttctgcccagatctgaatcagaatgaggatggaagcattggctccttggcagatgtcctgtggcagtccactgtctggtatttctggtgggattgatgggaggtgcgaccaatgacagaatatcagaaaacc

SEQ ID NO: 4375 - DNA, 40060 bp, Unknown
  gut microbiota DNA sequence
ccatcaaccccgtctcccgcaagtacccccgcagctgcatctacaccggcatatccgccatcgacggctgcgccaccctcatccgggggcagaagctgcccatcttctccggctccggcatgaagcacaacgagctggccgcccagctcgtgcggcaggccagggtgcccaaccaggacggggaattcgccatcgtcttcgccgccatgggcgtcaagaacgacaccgccgagttcttccgccgctcctttgaggaggccggcgccctgagccgggtcgtcatgttcctcaacctggcctccgaccccatcatcgagcgcatcctcaccccccgctgcgccctgacggcggcggagttcctggcctttgagcacggctaccacgtgctggtggtgctcaccgacatgacctcctactgcgaggccctgcgcgagttctcctcctccaagggggaaatcccctcccgcaagggcttccccgcctacctctactcggatctggcctccctctacgagcgggcgggcatgatccacggccgcaccggctcggtgactcaggtgccggtgctcaccatgcccaacgacgacatcacccaccccatccccgacctcaccggctacatcaccgaggggcagatcgtgctggaccgggagctggatcagaagggcatctatccccccatcgccattctcccctccctgtcccgcctgatgaaggacggcgtgggcaagggcttcacccgggacgaccactacgacgtatccaaccagctctttgcctcctactccaaggtgcaggacgcccgcagcctggccagcgtcatcggcgaggacgagctgagcgagctggacaagcagtatctggccttcggcgacgccttcgagcgcaggtttgtccaccagagcctggtggacaaccgcaccattgcggagacgctggaccttgggtggaagctgctgaccatgctgcccaggggcgagctggaccgggtggacgccaagaccatcgaggctcactatgtggagggggcgtggaaggagctctttgagcggaagcagtcatagccggaaaggaggtcaaccgccatggccaatctgctgcccaccaagggcaacctgatcgccgccaagcgctcccggatgctggcccggacgggctacgagctgatggaccgcaagcgcaacatcctcatccgggagcttatgggcatgatggacaccgccaaggagttgcagggacagatcgacgccgtctttaccgaggcgtacaccgccctccaggcggccaacatccgcctgggcatctgcgaccgcatcgcggaggcggtggatgtggacgactccctggctctgcgctaccgctccgttatgggggtggagctgccccgcatccccggccagtcccccccgccccggccggagtacggcatgggggatacctgctccgaactggatgagtgctacctcaagttctacagggtcaaggagctgacccgccggctggcggaggtggagacctctatctaccgcctggccgacgccatcaaaaagacccagaagcgggccaacgctttacagaacattgtcatccccggcctggacggcaccatccgcttcatcaccgacgccctggaggagaaggagcgggaggagtttgcccgtttgaaggtcatcaagcgggtgaccacaaaacagaagtgaggcggaattccgcctcacttttgtttcagtatgtgcgcacacagacctcccggattttggcctggaggctcttcaagtcctcaaagctctccggccgcttgcggggatcccgcagcagggcggaggggtggtacatggccatcatccacaccccggccttttcgatccactggccatgctcacgggtgattttgaagtcctccttgatgagcttcatagcggcgatgcgccccaggcagacgatgatcttcggtttgagcagggccacctggttgcgcagatagccgatacaggcctcctgctcgatgttcaggggatcccggttctggggcgggcggcacttgaccatgttgccgatgaacaccttctcccgcttcaggtcgatcatggccagcatatcgtccagcagctggcccgcccggcccacaaagggccggccggtgcggtcctcctgctcgccggggccctccccgatgaacatgacctccgcgtccctggctccctcgccgaacaccacgttggtccgggtctccgccaggccgcacttctgacagtggatgcactcctcatagagggcgtcccaatccttcatagtctctcacctcagtgtgtggttttcgacattgtaccacacccgcgcccccggtgcaaaaaaattttgtgcttgacttttgccttcaaactgcgtatactacgctcaacaaaggcagagagaacgaccgccccccgtgagggccgacagagaatccgggtcaccgactgagagcccggtccggcaggatgggatggcgcaacacgtttgagccggcgtcccgagccctggcctcagggggtaggcgcgcccgtcccacccgcgttaagggttccgagtggcgtccgttgcacacgacggcgcaattttgggtggtaccgcggagtttattccgtcccgaagctggaaaaccggcttcgggatttttttattctttttttgcagaaaggtgtgattggcatggaagttctggcaacgaaattcgacgcggcggtggtgggccggaataaccgggccgtcaccctgcacgggatggtgcacgccctgcgggatctgggtggggtcaccttcctcaccctgcgcacccgggaggggctgatccagtgcgtctgtccccggcgtcctgagggggtgcgtgaggagtgcgccgtctctgtctccggcttactccggcccgaaccccgggcgcccggcggggcggagctggcggaggcccggtgcacggtgctctcctggcccgccgcgcccccgccggtgcccctgtccaaaaagagttccgtcagcctggacacggagctctccctccgcccagtgaccctccgcgccccccgcgcccgggcggtgttccgcatccaggcggccgtctgccgggccttccgggagtttctccagggggagggctttaccgagatccacacccccaagctgggccaggccggggccgagggaggctccagccagttccggctggactatttcggccggaaagctgtgctggcccagtccccccagctctacaagcaggccatggtaggggtgtttgagcgggtgtatgagatcggcccggtgttccgggcggagaagcacgccacccagcggcacctgaacgaatatacctccctggatctggagatgggctttctccactcctttaccgacctgatggcgctggagcagggctttctgcgccgccttgtggccctgctccggcaggaatacgccggagagctggccctgctgggtgcggagctgcccgatgcggagcacatacccgccgtccgctttgacgaggccaagcgcctggcggcggaggcctacggctatgccatccgggagccctacgatctggagccggaggaggagcagcacatcggccggtacgccaaggaggtgtggggcagcgacttcgtgttcgtcacccactaccccggcaggaagcgccccttctataccatggacgatccggaggacccccggtacaccctctccttcgatctgctcttccggggggtggagatcaccaccggcggccagcgtatccacaattacggccagcaggtggaaaagttaaaggcgcggggcatggagccggaggatttttcgggctacctgctgttccacaagcacggcgcgccgccccacggcggcctgggcatcggcctggagcggctgaccatgcagctctgcggcctggacaacatccgccgggccagcctgtttccccgggaccggaccagactcgagccataaggagcgggggcgggcgcggtttgccccccagacagagataaaaaggaggaacccttcccatgaacattaccgaagcacggatcgaccatctgtccgatctggcccgcctctccctccccggcggggagaaggaggagatcgcccgggagctggagcggattctggactacatggcggtgttggacggcctggacaccgccggcgcggagccgctgagccacgttttcccgctgaaaaacgtcctgcgccccgatgaaaccgccccctccgccgaccgggcggccctgctggccggggctccggccgccgacggggagagctttctcgtccccaaagccgtggagtgaggtggaatatggagctgtatgaactgactgccctggagctggccgggcagctccgggccggagccgtcacccaggccgaggccatttccaccgccgccgggcggattgccgcctgccagccgggcaacaacgcctttatcaccgtggcggattcgcccgcccccgcccccgcgccgtccgcctcccccctggccggggtgcccatggcctacaaggacaacctctgcaccagggggatgcgcaccacctgcgcctccaaaattctgggggacttcaccccctgctacgacgccaccgccgtggagcgcctgaccgccgccggggcggtgtccatgggcaagctgaacctggacgagttcgccatgggctccacctgtgagacctcctgttacggcccggcgaaaaacccctgggatctcacccgctcccccggcggctcctccggcggggcggccgccgcggtggcggccggggaggtgtggtacgccatcggctcggacaccggaggctccatccgccagcccgccgcccactgcggcgtcaccggtatgaagcccacctacggctccgtgtcccggtacggcctggtcgcctacgcctcctccctggatcagatcggccccatcgcccgctccgccgccgactgcgcggcggtgctggagctcatccgtgggcgggatccccgggatgccaccagcctggctctccccgccggggggctgctccgcgccctcaccggcgacgtgcggggcaggcgcatcggcctgcccgccgagtgcttcggcggcgcgctggagccggaggtggccgccgccgtccgggccgccgccggggtgctccgggcgcggggggcggtggtggaggagtgctccctgcccctgctggactacgcggtgcccgcctactacatcctggcctgcgccgaggcctcctccaacctggcccggttcgacggggtgaaatacggctggcgggcggagggctgcggcagtctggaggagctgtaccgcagaacccgcaccgagggcttcggcccggaggtgaagaagcggattctgctgggcaccttcgtcctctccgcggactgctacgactcctattacaaaaaggccctccaggccagggccaggctgaaggccgcctttgacgcggtcttccagaggtacgacctgctcctcaccccggtagcccccaccaccgccccccggctgggggagggcctggccgacccgctgagcctgtacctgagcgacatctacaccgtccccgccaacctggcgggcctgcccgccctgtccatgccctgcggcttcgaccggagcggcctgcccatcggcgcccagctcatcggcccggccctgggggatctggcggtgctggacgccgcccacgcctaccagcaggagaccgactggcaccgccgccatccggacacgcctgcagccgccaaaggaggtgacgcgctgtgaactgggaaaccgtgatcggcctggagacccatgtggagctggccaccaaaagcaaaatcttctgcgcctgcaccaccgccttcggcggcgcgcccaacacccactgctgcccggtgtgcaccggcatgccgggggcgctgcccgtgctcaacgggaaggtggtggagtacgccgtccgggccgccctggccctgggctgcaccgtcacccggtacagccggttcgaccggaaaaactacttctaccccgatctgcccaaggcctaccagatctcccagctctatctgcccatcggccgggacggggcggtggaggcggggggccgcaccgtgggcatccacgagctgcacatggaggaggacgcgggcaagctgattcacgacccctggacggagcagaccaaaatcgactacaaccgctgcggcgtgcccctcatcgagattgtcaccgagcccgacttccgcacggcggaggaggtggtcgactacctggagtggctgcgggagaccctgcaatacctgggcgtctccgactgcaagatgcaggagggctccctccggtgcgacgtgaacctgtcggtgcgcccggcgggctcggacacgttgggcacccgcaccgagctgaaaaacctcagctccttcaaggccatccgccgggccatcggctatgaggcccggcggcagatcgaacggctggaggcgggcggccgggtggtgcaggagacccggcgctgggacgagaacaaggacgcctcctatcccatgcgctccaaggaggacgcccaggactaccgctacttccccgagccggatcttccgcccctggagctgagcgaggcctacatccaggcgctgcgggccaaccagccggagctggctacggccaagcgggcccgctatcaggccgtctggggcctgggcccctacgacgcggagatgctcacctcccagaaggccctggcccgctttttcgaggagacggtggccctggggtcggagcccaagcaggcggccaactggctcatggggccggtgctggcccagctctccgcccacggcctggaggccaaggacatggccctgacgccccccaccctggcccggctgatccaactggtgaaggaggggcggctcaaccgcaacaccgccgtcagggtgtgcgaggcggtcttcgagaccgacggcgacgtggacgcgtatgtggccgcccacggtctggcccaggtgtccgacgcaggcctggtggcccaggtggtggagcaggtgctctccgccaatgaaaaatcggtggccgactaccgctccggcaaggagaaggccttcggcttcctggtggggcaggtcatgcgccagctcaggggccaggcggccccggcggtggtacgccgggtgctgctggaacagttggcagagcaataacaacgtgcgggccggtcttttgaccggcccgcacgttgtttgccccttccgccgcggcttcacaaatcactacgaaagcccggtacagccgtccagcacctgtccgccctggagcagctccagcttctccagcgcggggctgccctccagcaggaagtggaaggtctggccgggatagacccgctgggtcaggctctgcccgcctccataggtgaggcggacggtgaggctgtccccctgctcgccgcccaccgcgccgaagatcacggtgccgcccccggagcccagccgggcggcggagagtttgcccggctccggcgcgggacactcgttggcggtcagctcatgccagcggccgtccgtcccgctccgctccagaccgctggcccggagggtggtgtgggcctcatcccaggaaagaaccacatagccaggcccagcgggaaagacggcgtccacgctctggttcggctgctcccgctggaagtccgcctgggggcccgaggacagggggccgaagcccgcgctgcccacgcaggtctggcccgcctcgctcaccatgaactccgccagccgccgggcgggggcgtcctccggctcgccggcccggagcaccaggtagttgtaccccgccagggggtagcttccgtcggcgatggtctcatccgaggggagcaccccatccaccgccagcagcttgagctcccctccgcccgcgtcgcccaggagccaatagctatttacataataatagtacacactatagcccatggcgtaagccagggggtcggtggtcatggccccggccacatcggtgagggcggaggacatggcgtaggaggtgaggacattgtgcacgtcggggctgagggagagctttccgccctccaggaaatactgctccattagggcgtgggagccgctgtcggtgttgcggcggtagggtagcagctccgcgtccgggccgcctatctgattccaattcgtatatttcccgtacacatatatgtcctgtatttgcttttgggtcagcccggtgacagagttctccgcgttggtgaagaacaccatggcgtcataggcgatgggaatgtactccagttccacccccgccgcctccgcctgggccttcagctcctccgagggcagggtggcggcgaagagggcgtccacctccccgttgatgagccgctcgtaggactcatggctcttggagtggctctccgggaactgcggatggttgtcataattccagaagagcgccccgtacaccgccctggtataggggtaggtggaggtggagccgtcgacgacgggcatggtctcgtcaaagccccagtcgatggccgtctgggtggggtaccagggcaggcgggtacgggcgtcgtccaggaaggtgatcgcctcgccccgggtagcgggcctgtcccactctgccagctcctccactccgggctccccgtagaccgggtcggtctctccggtggaccgctgggtgaagatgcccaggccctgtttatcaaaggccagataggacgctaaagcccagtccggaatctccccggcatcgaccagagtcagctccgccgccgttcccccctccggtatggtcagccagcccaccgcctccatggcccgggcagccatgacggtgagctctccccgggtcaccagccggtcggggtggaaataggcgtcctccgccgccagtccgccggcccgggcggcggaggcggtatcataataccagtcgccgggctccgcgtcggcgtagccggggtcgccgccgggctccagggacagcaggcggcagatcagggcgaaggcctccgcccgcgtcagggcggcgtcggggttcagattgcccgcgtgatccccctggagcactccccggagatacagctcctttgcgccgccggggtcgttgtagtactcgtgccccttccagaccgtgatgcagtcgggaaagcggtgcgcctccccctgaaagacctccaggggccgctccgcctccgccgccgggacggtggcgaagagccagccctgctggtagtcgctggtgaggggtactggctcccccgtgtcggcgtaccgcaccgcgaggagggtctgctccgaccagtccagggcctccccctgggggcagggcacccggagggtcacataatctccgcccggctcgctccggctccaccccttcgccccctctgccgcccgggcggcggggcacagcagggccagacagagacccagcgccagtatccgcttcatggtacacactcccttcaacattcgattcctatttgtattatagctcccctggttttcccggacaagttacagagcaataacaaatggtaaaaaaagctggtacagccggggggttgacagggggcggtctttctgttatcttaatacccgacagatgaatgccctgtggcttcccgtttatcaccggataaatgtgaaacgtgcctgaaccgattccgtaggtcttagaaggaatcggcccaggcacgttttttgccgctctaggacgtttttaggagggatcgaagtgaagcggagcttttttcagtatgtaagcctgaatgtgctgggcgcgctgggcctgtccggctacatcctggccgacaccctgtttgtggcccaccggctgggcaccgacgggctggcggccctcaacctggccatctcggtcttcggcctcatcaacggactggggctgatgctgggcatcggcggggccacccggtacgccatctgccgcacccagggggacggagtgcgggccgaccgcgccttctcccgcgctctggcctgcggcggggcgctgggcggactgctggcgctggccggtctgctgtgggccgtaccgctggcccgcctgctgggggcggagggaaccatcctgcccatgtgctcggtctacctgcgcacggtgctcctctttgccccctgcttcctgctcaaccacattctcaccgccttcgtgcgcaacgacggcaatcccaagctggccatggccgccatgctgctgggcagcctgtccaacattgtgctggactatgtgttcctctaccccatggatatgggcatcttcggcgcggccctggccaccggcatcgccccggtagtgggcctgtgcgtgtcctccctgcacatcctcacccgcggcagccgcttccgcctgcgccccttccgccccgccctccggccgctggcggatctggccgggctgggcagcgccgcctttctcaacgagtgctcctccggcctggttctggtggtcttcaacctgctgaccctccgcctggctgggacgctgggggtggcggcctatggcatcgtggccaacctggcgctgatggccctcgccctcttcaccggcattaatcagggcgtccagcccctggtcagcctggcccacggccggggggatgccgccggggtgcgcaccctgtgccgcatggccctggggctggccctgtgcgcggggatgtgcatggccgcgctggccttcttcgccgccgggccgctggtgtccctcttcaaccgggacggagatccggcgctccagcagatggcggagcagggcctgcggctctactttctgggcttcccctttgccgggctgaacctggtcaccgcctccttcctgggggcggcggagcaccccggccgctccctccggctctccctgctccggggctttgtggccatcgtggccgccgccctgctgctggccgccctgctgggcctcaccggcgtatggctggccttccccgccgccgagggggccgttctcctcgtcagcctgcgcttcagccgctccctccggcgcgccccgccagagcccgcccctcaggccatcaccaccgcgctcaggtaacacgcgaacgccccgtactccgccggggtcagcgcccgggggctggagagcaccaccagctcatggcccgggtactccggccggtaggggggatggacgtggggataggggttgacggcgaagccgcaccgctgatagaagccctgccgccgccgtgcgatctcgtccaccggcgggtcgatctccagtaccacgggtttcccgtcccggcccagctcctccagcgccttggcgccatagcggcggccccgcagctccggccggatgcagaagtgctccacatagcggaagtcctccgcctcccagtagagcagcagccccacgaattccgccccatcaaaaagctgggtgaaatggtactccgggtgggacaggacggcccgctgctcatcgggcagccgctgctcgtggcggggaaagctggcctcgtagagggccatcgcccttccaaacgccggttcctccggctgtgtcagccgtctccattccatagcagtctctcctcttttctaaaaaatgcgctcccgttttgggagcgcattttattttttcctgtttacgctccctccagggccttttccaggtcggccaggatatcgtccacatcctcgatgcccacggagaagcgcaccaggtcgggggccaccccggcggcggccagctcggcgtcgctcatctggcggtgggtggtactggcggggtgaagcacgcaggtcttggcgtcggccacatgggtggcaatggaggccagctccaggcccgccatgaacttagaggccgcttcccggccgcccttcacgccgaaggacaccacgccgcaggtgccgttcggcaggtacttccgggcccgctcgtagtaggggtcgccctccaggccggggtagcgcacccagctcaccttggggtgtcccttcaggaaccgggccacggccagggcgttttcacagtgcctggccatgcgcaggggcagggtctccagccccacgttgagcaggtaggcgttcatgggggcgggaatggcgccgaagtcccgcatgagctgggcggtggccttggtgatgtaggctccctccagtccgaagcgctcggcgtaggtcacgccgtggtagctctcatccggggtggtgaggccggggaacttgtcggcgtgggccgtccagtcgaaccggccggagtccacgatggcgccgcccaccgcgttggcatggccgtccatgtacttggtggtggagtgggtgacaatgtcggccccccactcgaaggggcggcagttcaccggggtggcgaaggtgttgtccacgatgaggggcacgccgtgggcgtgggccaccctagcgaacttctcaaagtccagcacggtgagggcggggttggcgatggtctcgccaaagacggccctggtctcaggccggaaggcggcctccagctcggcctcggtgcagtcggggtcgacgaaggtgaagtcgatgcccatgcgcttcatcgtgacggcgaagaggttataggtaccgccgtagatggaggaggagcacaccacatgttccccgcaggagacaatgttaaagatggcgtaaaaggaagccgcctgaccggaggaggtcagcatggccgcggttcccccctccagggcgcagatcttggccgccacgtggtcattcgtggggttctggaggcgggtgtagaagtagccgctctcctccagatcgaagagggctcccatctgctcgccggtggcgtagcggaaggtggtggactggacgatggggatgttgcggggctcaccattcccgggggtatacccggcgtggaggcactgggtgccgatgcgctgctgactcatgggcaggatcttcctttcctgtttcaggttgagtgttatgctacacccccgcccggcccttgtcaagaggcgggcggggtgggactgggctccggctcctccggcggcacatcggtgccgtcggtgagcagcagtccgtcgggaccgagctgctggacgcggcgataagggatctccctcccctccaccgtcacatagaccgactccactccctccacctggcacagcgtgagggtcaggcaggcgtcggccacggtgagatccaccccggacaggccgccgtactgctcggagaggtccaggtggaggcggccctcctccacctcccagctcaacaggcgcaccccctcggggaagggggaggtgaggccctgggtctccggcggggacagcagggcattcaccagggcggggatggggtcgccggcgctcccctcaaagggctcgcagtccagcggcaggtgggcaaagcggtcggacagggcggagtagtacacgcagtagccgccctccggctcctccgggcggggggcgcagcccccggcggccagagccagcagacagcccagcgccgcgatgcgtcgtctcatcggcccacctcctctccattccactgggcaaagctgacctcgaagcaggtgccctccggctcccgccgccgggcagtgacggctccgccgtgctggagcaccgtatcccgcacgatggacaggcccagtccggtgccgccggcggcccgggagcgggccttgtccacccggtaaaagcggtcgaagatcttgggcagatccgcctccgggatgcccacgccggtatcctccacccggaggaccacccgcccgccgtcggcagtgagggtgacgagcacccggccgccgggcaggttgtacttcaccgcgttctccatcagattgaaggcgatctggtagaggtcgtcctcggtggccagcaccacgcagcccggctggagcttcagctccaggcttacctccaccgcccgggccaggggggagagcatgtgctctacccgttccaccaccgcccccacatccacggggacgtcctccgccgccggggcggtgtccagccgtgtgagggtaagcagcttctcggtgatgcgggtgagccgatcagcctcgtccccgatgtcgttgaggaactcccgtgccgtctcgccgtccatgtggtcggcctggagcagggagtcggtgagcaggcggatggaggccagtggggttttgagctcatgggaggcgtcggagacgaagcgccggcgcacctcctcggtggtctggaggcggccggtgagctcgttgaactcgtcggccaggcggctgagctcgtcgccgccccggacgctcacccggtggctgtactcgccctcccgtaccgtgtggatgccccgcaggagctgggcgatacgccgggtgagggccttggagaagaccacccccatcaccagcgacaccatacagatgacgatggagataaagcgcaggttggtctggatcccctggagcagcgcgccctgctcggcgtcgtactcgtagaggtagaccgccccctgggtcatggagcggtaggtaatgggcaccgccgcccagcttcggaaggccccgtcgccgtactcagagcggaacacgttgttgccccgcagggcggtgaccagctcccagaacagggcgtaccgcccggcggtgtcggtccgccccacgccgtcctggaaatcgcagagcaccaggccgtttgggtcggtgaccaccacccgggtcacccccaggctgctccgcagcagctccaccgtccgggtggcaccctccgccgtaagggcctccggcccggtggccagggcggaggccagcaccgaggcctggttgagcatggaggcctgcttggactggtaggccagcttttccgacaccaccagggggtaggtgttgagcagaatcagcaccgccgccacaatcacgatataggtcagggcgaacttggtctggagggagcgccagaagggcacgcgcctgaccgcgccgctccccttatccatgcttcagatagtagcccacgccccacttggtgaggatgtactccgggttggcggggtccagctccagcttctcccgcaggcggcgcacgtgcacgtccaccgtgcggtaatcgccggcgtactcatagccccacaccacgttgagcaggttctcccgggagtacacccggcccgggttgcgcagcaacagctccatcaggtcgaactccttggcggtgagatccacgctcttgccgtccttccaggcggcccgggcgtccacgtccagggtgatgtggcccatggacagccggccgccgccctgcttctgggccgccatgcccgcccggcgcagcagggcccgcacccgggccttcagctccagaatgttgaagggcttggtgatgtagtcgtccgccccacactcgaagccgatgatcttgtcggtgtcctcgctgcgggcggtgagcatgatgatgggcacgttggagaactcccggatgcgcatacaggcctggagcccgtcgatcttgggcatcatcagatccaggatgatgagatcgaaggagccgctgcgggccagctccaccgcctcctccccgtcatagcccgcctccacctggtagccctcgctctccaggttgaacttgatgcccttgaccagcaccttctcgtcgtctaccaccagtattttcatcggttctcctccccagtcgtcacgtagtcaatgaggccctccagaatgccctcgccgatgcccggcacctcggtcagctcctccgggatgcggaaggggccgttggcccggcggtaggcaatgatgtcctccgcccgcttctccccgatgcccggcagggtcatcagctcgtccaccccggcggtgttgaggttgatcttcgccccgccggcaagggtatcctccttgctctgggcggagggggagggcgtaggcgcgggcagcgccaggggcgtctcctgggtcagggtacgctcggtctccacccgcacgggctggggcgcggcctgcccccgaaaaaaccagcccgccgcgaaggccgcaaagaccgccgccagcagcagggccacaaattccagtctggaaatcttcatctttttgtatccccctccccgttgcgtcccggtccggggtttgttataatagccataccgttattataacatagtcaaatggagtttcctatgaaaaaatcacgactgctttccgttttactctgcctcgccctgctctcggggctgttgaccacctttgcctccgctgcggacagcggcagcgccattctggacgagatggacgtcaacgccaaggccgccgttctggtggaccccgacaccggcgaaattctctacgagaagaacgcccacgcgcacaactaccccgcctccatcaccaaggtgatgacctgcctgctcaccctagaggcggtggaccggggagagctgtccctggagcagaccgtcaccgccagctccgcccttcacaccggcatcggggagggcgcttccacggccgatatcaaagagggggaacagatccgcatcatcgacctgctctacgccgccctgatcccctcggccaacgaggcgtgcaacgtcatggccgaggcggtaagcggcgatgtggcctccttcgtggagctcatgaacacccgggccgccgagctgggcatggaggacacccacttctccaacacccacggctaccacgacgacaaccactacaccagcgcctacgacatctacctcatgtgccgggaggccatgaagcacgagaccttccgcaccatcgtgggctccaagaactacaccatgcccgccaccaacctgcaccccgagccgcgcatcatccgctccaccaacgccctgatctccaacttccgcgtggcgggctacatctacgagtacgccaccggcatcaagaccggctccacccctgaggcgggctactgcctggccgcctccgccacccgggagaaccggaacctgatctccgtggtcatgggctgtgagcgtgagccgggcacctccggcagcgagggctatatctactttgacgagaccatccgcctgtttaaatggggttttgccaacttctccacccagaccattctggacaacaccaagcgggacatcccggaggtggaggtcaccctgggcaaggacgccgcctccgtcacccttatgcccgacggaaagctgaccgccctgctgcccaacgacgtgtccgccgagaactttacgtatgactacaccctggaaacccggagcgtggaggccccggtggagcaggggcaagtgctgggcaccatcacggcctatttcaacggcagatcctacggcaccctggatctggtggccacctgttcggtggagcgggacccctggctctaccggctggaccggattcagaagttctttgacaatctgctggtgcgcatccttctggtggtcgtcctggtagtaatcgccgccctcctgctgcgggtgatgttcttccgcagcaggggccggacaggccgccggggctacgcctacagcggccggggccgctacaccggcagccgccggcgcagaggctaaggtacaaaaacgtggagggcggtgtataccgccctccacattattatccatcaataacccctcctgcgaaggcgttcggagggaaggatgtagttcaggaccttttgactcctgttttcacaaactgctaaacccctgaccggcagctcccggccaacgtcggccgcagttgctcaatcctgcctccttcctgctggggccgctgatccgtagcccctgcaaatacacgttttcctccagtgtcgtgttgccataggaaatctgggctgtcatcttattacaaaagataaccgtataacggtttacccgttcacgcatagcgtaacggataaaccgttataacaagcgaaggaagatggactgtgaaatttacagtccatcttccttcgccacttacgcttgctttacaacgcaaagaatcgtccctgtttctacagtgtccatattttcaataacagcatagtaattggtcgaactgtttagattagaaaatgttaccgtctcacttcctcctcctcccagcggggtagaccacggcaagttaactgtactcgttgctacactaacaccggaacttttatataatgtcaccttaacatgaggtgatgctccccctatactctgcaatgtaactttaatcttgctctttgatatatcatatgtatctgtagtatatttctccccagcatctagaaccccaaccgtaaacgcaacgcttccacttgaaagatctactgtacttttgcgactttccaccatactttcttcaaatacgttaccatacatttcaaatatgtctttttcttcatgctctacagttacgataacatttgcttctttgccctctacggccatagctgtagaaggcagaatacaacaagcaaataacaaaacgctacatatcatccttgtccatacttttttcatagaaagttccctccatttcattcctcaatgtaaaaaactagctttttacctttactatctctagttccatcaattttgaaatagtattgcttctctcctgatagatttgaaaaaacaagtttatctcctacactttctatttctcccgtttggatactttcttcatactctatatcatataaatctacttttaaatttgaccaagctccttccgcatatttaatctcaattgttccattagctggacatatatagaactcagtcattaatggcatattcccaatttcacttatatcaaaactaatctcacctatattggagggcttaagtgtatcgcctgttaaatctgtagcatctttctcttctgatgagtatgaactgcatccgatacaccccaatagcagataagccgttattaataaaatcggtatgattttccatttaatagtagacatatcccaatacctcgacgctatttttagtattatttcgtaccgcaaaataatactttcctgtatcctcgatctggatattggttttgatactgccctcactcccgctggtaaaatggaacgtattatccggggtgatgaacccgaagtcaaggtctgctgtcctgggggagtacgtgcagtttatcgtaaccacctcgtccgcctccagggagtacgcggtatctgccttcataatcttcccggaagggatatcccactcaatccggctggtggcccgcgtcatgctcccgcccttactttctgaaaggacagcagggtcaactgcttgcgttgaaagctctttaaagccgatcatttctgtcctggtatcagccgccacgatactgcttttatcaatcgaaactgagtaacatacgtctgcgctgctttccgcagctccggccggggtcagccccacaccgcccaccacaagcgcacaagccaataccgtcgctgtaactgattttttcatcgccgcatcattcctccctatgaaattggcccgcttattactgcatcggaatcagagatcctttcctcttccagtccttcaaacttcactgtattttgttcttccggttccgtgtccttctggttcagatatgtaattacgattgctgcaacaagggccgcagcggccaggataattagaatcacttttagtacagagcgtccctttctatttccgctgccttgcgtcttttcactctccgggacgctgacaactttatcgccgcccataagttcatccgttggaactccaaacaatttactcaacgccagcagattatccatacttggaatagcaattccaacttcccatctggataccgcctggcgcgatacattcaaagcctctgccagatcctgctgagacatccttttgtcttttcgtaaagaaattaacctttcatttaatttcactgttttcacctcaaattctatgcaaacaatcgccatatgtaaaccgcaagctgtttacattcaggcaattatgaattgcttttgggttgcgctgcaacttttttaacaaaacaggggcaacaccaccgtcaccagtccgcccatcgggcgctccctccctcacaaaagctgcacccccagcagggggatcagatccaccgcctgggccgggttgatcttcatgccccgcaactctcccaggctctccgatacagtgatgccctccagcgcgcagtcggaaaaatccatccccttcagcggcgtgcgaaaaaagtccacctcctggaaccccgtccggtgtgggctcaggccggccacatccgcctcggccagcacggcccggcgaagctggcagttctccatgcggcactttttccatcgcgactgtgtaaaattggcgcagcggaaggcgctctcgcccagggtacagccccgccaccggctggcggtgaaccggccgccgtcccccttgcagtcccgcaccaccgtgtccgtccagaccgtcccgccgaagcggcagttggagaagtcgcagcccctccactccacccggtcaaagaccgcccccgagaagtcgcagttctggaaccggcaccggtgcaggcacacccggcggaactccagccccgacaagtctgcgcccgccaggcactccccctccaccgtcaagtcctccacgtcccgctcttcccgccgcgcccggcgcacttcctcctccagcatgggtcagcactcctttctccccctactctactacaacatgccggctttgtatacatacgattgcaaaaacgcccccgccgtcggcggggacgccagtatgtcgaaaaagcctcgcagagttcgcgcccgcaggcgcgaatcaagtaccaatctggtttccccggtgacatgtgcgtcggggaaaacacttctcaggctgcaagtgttgggtctggccgccgcaggcggacaaaccctgcgcgcggcagactgcggctttctcgaaaaagtggctttgccactttttcgacagactgcgcccccgccgtcggcgggggcgtacggattccgctacatcaggaacagggagagcaccactgtgatcagcccgcacaccccgatagccagcccgctcatggccccctcggtctctcccagctccagagccttggaggtgcccaccgcgtgggagctggcgccgatggccagcccggcggtcatggggtccttcacccggaacagcttgatgagcagcggggccgcgatgctgccgaagatgcctgtgatcagcaccgccaccacggtgatggggccgatgccgccgtgggcctgggatacgctgatggcaatgggggtggtgacggatttgggcaggagggacgcggtcatggccgcgtccagcccaaacaggcggcagagcagaaggatgctgcccatggaggacgccgagcccaccacgcacccaaccagaatgggcagccagttctccttcagaatacggattttcccgtagatggccaccgccaggcaggcggtggcgggggcgagaaacatgttgatgatctctccgccctgatgataggactcatagggaatgcggaacagcagcagcacccccaccaccaggacgatgccaatgagcaggggattacagaccaccaggccggtctttttctggatgcgcaccccaacccagaaggccaggatactcaaagcgatgccaaaaaagggggaagcaaacagctcagacacgggacttcctcctctccagcaggcgcagggtgaaccggatgctcagggcggtggcgccgaaggtgatcaccgttgagagcaggcagaccaacaccagcgcgacggccgagcggcccagcacatcgaagtagttgatgacgctcaccccggcgggcaggaaaaagaaggccatgttggccagcagaaaatccgccttttcccggatatgctcgattttgagcagcccggtggccaacagcgccagcagcagcagcatgccgatcacgctggccgggaatggaactggcagcgccgcctcaatgagctggctgaaccagcacacggcaaagatgacgccgatttgacagatgattttcacgggaatacgcctcctgttttacacataaagacgattgtagccccgatctctctccctgtcaaccagcttcctccgcctgttgaggctgtcgataaacccttcaggcagagatttcggagggaacgatcgtgtgaaagaaaaccgtcaggggtttctttcgcgtttgatccaccggctttttgaacttttttgaaggttcgaaaagtccctcggcctgtcgaaaatactttttcgacaggctgaacaggcgggggaaaatcccccgcctgttttgatcatttcctttacttctgtttgcgctccaactggagcttgtcggcgatcatggcgatgaactccgagttggtgggcttgcccttggcgttgctcaccgtatagccgaaatacttttgcagggtctccagatcaccccggtcccatgccacctcaatggcgtggcggatggcgcgctccacgcgggaggccgttgtgccgaaacgcttggccacctccgggtagaggatcttggtcaccgcgttgatcacatccatgtcgcccacggcgatgatgatggcctcccgcagatactggtagcccttgatgtgggcgggcacaccgatctcatggataatggaggtgacggtgctctccaggttctggctctcaccagagaggcgcccgggctcctccccgccgctctggggctgtcccgccagttggcggatgcgctccatcacggcggagagtttacacggcttcatcatatagtagtccgcgccatgggccgcggccagctccgccatattgccccgcgcaaagctggagagcaccagcacccggggccggccgggcagcgccgccagctcggacagcacctccagtccatccatacgggcaagcacgaaatccatcaccacgatgtccggggagagctcctttgccaggcggaccgtctcctgcccgtcccctgtctctgcggccagctccaggccggattcctcctccagcgcacccgtaaagacacggcggaactcctcactggcatcggccaccaagatcctctttctggtttccaatattgacaccctttccagcaggtttccctgccctatgtttgctgcctggccaaggctgtttaccggttgcctataatttaccataatcagacagcaaacgcaagggtttttctggtaatttatgggtatttctcctcgacttcattcgacctttttacgaccgttacgactggttctccccattttccgcctccaggagcatattctccgccaaaatgccgtagccctgggtgggatcattgaccaaaacatgggtcactgcgcccaccagcttgccgttttgcagaatggggctgccgctcatgccctggacaatcccgccggtggtttccagcaggcgggggtcggtcaccttgagcatcaggttccgggtatccgcgccgttggcgggatacacccggataatctccacctgatactcctcgacctggtcgccggcgatgttggagagaatcgtggccgccccggtcttgacctccttgcgctccgccacgggcaccggctccaggccgtcggtcagcgtaccgtcttccaggcggccaaacacgccgctggcagtattggcgtacagctcgcccagatcccggttcacctgaaacgcgccgtggagctcgccgggggctcccttttcccccttcttcacatcggtgacctccgaatacatgatggagccggactggagtggcatgagctgggcggtgtccacgtcgttgatgccgtggcccaaagcgccgaaccgcccggtagcgggctcgcagaaggtgagggtgccgatccccgccatggagtcgcggatccacgcccccagcttgtactggccgtcgctgccgcactggaccgcctgagcggtgagctgtacggtcttgtcgtcccgcaccgcccggatgctcatgggttttccgcccacctcctggaggacactctgcacctcctcgatgctgtccacctcctcccggttgatgtgcgtgatgatgtcgccctcccgcagtccacagtcccgggccggggcgctgctgccctccgcgccggccacctcggaaaagcccaccaccattacgccgtcggaaaagagtttgatgcccaccgcgcggcccatggggatcaccgtccgctcctccgcggcccgggccggggccgccgataccaatgacgccagcacgaacatcaccgccaccgccagggccgcccatggcctcgttttggattcctccttcatttgaccaccccttttttgaattgaaacgtgaaaaacggcgcacgctgcgcgccgtttttaatatggccggaacgcgcgccgccgcctctggcaatgaaacgctcctttggcttgtcgtttccttccagcgccggccccgtcggccttcctccttttattccgccagatttcccctttgtcccggcaatttcctgtttcggttataagaagattctggtaaagtgcaaggtaaccaaaaattggcgagcggttcaaaccgaatcaagctctttattccgggagcctgttggccgcccgcgccatggaagcgggcccccccgtcgccgctgcctgtgccgccgggctgctggcctcggaatacaaagccgcacaggacccggcccctgtgccgtgcagacattccctgcccctgcggggtatgtccgccccgctctgcgcatatactccactatcacaaaacagggggtatcgctatgtcccgtttgtccaaggcggcgctgatcacctttgtggtggccacgctggcgggctcctgcctgcacttcctctacgctctctggcccaatggcctgaccgccctgctggccccggtcaacgaaagcctctgggaacatgtgaaaatcctctactggccctgcctgctctccggtgttctgctggtgcgcagggagccggagagcctgggcgcccgcgccttctccctgcttctctcggctgcggtcatgctgggcgtgggttacctctatcatgtggtgctggagggcgactccctcttttttgacgtggccctctatgtgctggtgatggccgcctttttcctgctgccctgtttcctccgcactcccgtctggagccgcacacgcctgctctgggcggcgctggtgctggcgctgggcgccgccacctttgtatttacctggtgcccgccggatggcctgctgttccgggatctctccctgcccgccatttattcgcttccctgttgagtatgagccatttcggccgtgagtatgtccctgcagggccggagggattttttcacagaaaaaggcggaaagcacacgtctgtccgcgcagacctttcgccccgcaaaggggacgctgctccccgcctgccccggtacgtctctaccctgtaggggcggggcttgtccccgcccgcgggcggccataaaggccgcccctacaggctgttcagcagaataaaacccccgcgtccgggagtacgccgggtgcggggtttgttttccctgcaaagggggtaatatgcatggcaaaatatacggaacactatcgcctgcaccaatgggagccggaggacagcttcctccgcatggactttaatgaggattttgcaaaaattgattcggcgatcgcagcgcggggaaactgcctccaggtggtcggaacttacacaggagacggcaattacgggaaagggaaggcgacggttctgcacttccccttccggccgctggcggtcatggtggtgggcgggagttaccaggcgacctcgctcttcctgcggccggggacaaagggtgcggccaatgataccgccggtatgggcagcgtgctgtccctggcctggggagaggacagcctgtcctggtatgtgaccggctgggccagtggaggctctacttccggcggcaccagcgcggagggccagctcaacgaaaagggggcgcactatacctacttagtattgggttaaaagagaacccccttccggaaatccggaagggggttcgttatgctttcacaaccgcggtcaggcgatggtgaaggagcaactgccagatacggtgtaagtgttggtgtcagcgttatcacccttgaaggtgatcagcacactgacatcataggtgccggtactgtttgcactgatggtgagaccaggtacggtcaacgcgttcatcacatcagcataggacttcactccagaaagattcttggtgaaggtctgctcatccccgttgttcttggatacagtgaactcgatcacggcatccttcagattccaatcatcaatgtctgcacaggaggcagtcacctttacggttccattctcctcgcggcttgcggagatagaatcaaacttgaagtcggacttgatgtcaggcttgccgccgtccttaccattctcggtgatgaacagggccacaacctcgccgtcctttacaatggccttaaaggcgtcatcgctgtcgcggacggagttgatgctggaggtattgaactcatcgtcctcgatgcggaagacaacaacatccttcgcataggtgtagtaggtggtggagccattctgggtcaggcccacggtaccatcggtggtcttcttggtgcccacgccggagatgtagtagtcgtccttcttggtgtcattctcgtattcggtgatcttggtgaccacgtccttgctgttgatggtcagtctgctggccacgatatcgttcttgatattcttctcagcataatccttctcgacgtcgaccgtggtgatcttgccgtcgatcacagcgtcgtaggtgtagtagtcgcccttctcgctgtcgctgatcagcttggactggctgccggccaggatatagatctgagccttgttggagtcggacaccacatcggaggcggcggagataaagacatacttggccacgctgccgggcttgccgtccttggagttcacgtatacggtggccttgccgtccatgctgggcacattggcaatgccggtgtagacgctgtactccttctcttcctcgtcatagaccaggaagatggtgctgctgttggcgtagcgctcgccacccttattgttggtaccgttgatgtcaaacttggaggtgcccttggtcaggtagatggagtcacccgcatcggaggtcacatccttcgctttcagagtgtagatgccatcgtcatccacggtgtaggagacaaacttgttcttaaaagtagaagggtccttgtcgtctgtatcagcctcgatgacagtgccatcagtcaggagcagcttggcggtataggtcttgtcggtgtcgccgtcccagccttcactattcgtcttgaaattcagcacgaaagcgacgctggcggagccagcctcatactcctccacatacaccacgtagccgtagttatcggtataaatatcgacgctgctcttcagcgtgatatcgtaggtgcggtgattcttgttatacttgtaggtttcaccgtcggccacaaacttggtgtctccggttttggaggtgacttcctgatcctcgatcttcttcgccatggtcacggtctggatgtcgccgtcggccacggtgtagagcaccacatcatcctcatcaaaggaggcgttggtctcaaacttaccaccgttgccggtcaggccggcgatctcgatgtagggctcctcgtcctttttcacgctgtcagcgtcgaccaccttggaaacctcacccacataggtgttgataaccacgagggtcacgttgtcatcgctgtccacaaaagcctcgaccagaacgccgttgccgctggcctccagcttggtgtcgtcgcccttcttcacggtgaagtcggcggcggtcttaccgtccacaatcacgtcggccttggtggtctcgcccaggcccaggtcggagtagatggtcttggacttgacttcctcggtgtaggaggcatcggcggtggaagcataggtgccgatctccttggagccgttcttccactgctcggagggacggccgaagtcatcgctgccattattgttcacagacagatcggagaaatacttctcgcagaactgctgcacctcgtcacggtcggcggaaacggtgcggtagtcgtcggtcttgctgttggcgaccttcacaggggcggaggcgcccacaacaacctgagtgccgtcgggagtgttgacggtggtgcccttgttggtgtagtacaccatgtcggcggtcagggtctggaacgccatctgggcggcctgctcacgggtcatggcgtcggccagcacgatgcccttgggggcgatgcccgcgttcaccgcgtcggcggccacgttgatggcccagtcgttgcccacatagttagcaaccttcgcgtcatagcccagggccaccagcatcatcttcgcaaaggccaggccggtcagctcgccctcggggtcgaagttgccgttgccggtgcccgccaggatgccctgctgcacgcagtagccgatgtagcccgcagaccagcggttggcggccacgtccttgaaggtggtggagttggtggtcagcttgctggcgtcctcctcgcccaggagcatgacagccacgatcttggcggcctgctcacgggtcaggatgccggtggggttgaaggcgcccttgtcggtgccctcgaacacaccgatggcggtcatcacatcaaccgcctcagtgttggtgatttcagcagagtcgttgaaatcactgctcacagcgctggcggagacgaccatcatgcccacaatcagggccatggccattaccaggctgagagtccgcttgaggtttctcatttggatttcctccttctgaattttgagccagaggggcgtatgacgccccttgcaagccatgaaaaaggagggattccccccacatgcagttctaaatggcacaaaagagcggcaaaaagtggcgttggtagacatctggtagacacgccgggcatgccaagcgcaaaaagagcccggaaccgcaacggttccgggctctttttggtagacatttggtagacattttcctcttacgccgcctgcttgtcctgctccatacgcaccagcttgatacaggcgccgatgacaccgaacaggaaccagtaggtaaacatattgcgggggtaataccaggtgtactccgccacgccaatgaccagtataccgcagaaggcgccaatggcggcggccatcatccgcttcacccgggggtccagggcggcacagaagcctttcacacccgacttcagttggtagagcagcagagacaggtaggccagcagaccgagtatacccgtctctccccacatctggagataattgttgtgggtatgaaccggataggagccgtcgaagttggtgggataggtctggaagaccttcttcattacatcggtgcccaggccaacgcccctcgcccagtagtcctccatcaggttcctggtagtctcatagataccgaaacggtactgaaccgaactatcctctccggcgttgaagatggtgaggatgcggttgtagatggtctcgggcaggaaggggatggcggccagacccaccagcaggaagaccggcacccagcgccagttcagcagggccaggaagaccagcactgccccggccaggccgatccaactggcacggccgtaggttgccccgatggccaccagccccacccccagggagagcagggaaaggagcttcccccgccagtgggaattgaggaagagcgccaggttcaggggcaggagcatggccaactgctcggcaaagttgttggggttgtcaaagaaggagtagacccggcccggcatgccctgattgaggttcatatcctgctgggaagccacgatatccacgccgatatagctctgatagcagccgtagagggcggccaccgagaggcccagcaccgccagggccaccatgagctggagctgctcatacttgcgcaccatgctgaccaccagcagcaccagcaaaaagccggtcaggtggaaggcgaagaagcgcagggagaggcgggtggacagggagcccgccaaggcgatacagataaaggccatatagaacgtcatatagggccccaaggtgtccagctccagccggtgtttggggcgcgaggcgctgcccaccacaaaaagtccggtgagggctaccgcacccatcaggccgtagacgttgttccacatagcgtggggagtcatgagcatgaccatcatgaacagtcccaggaagaggaaggaggccccgcccagcgcccctatcaggcggcagaacagactggcgtcccacacccgttttcccgcccggtagacggccttgagaagagcgcaggggatgttgatgatggcggtaaacaggcggcaagcgatgctgtggggccacgccctggggatgcggccctcccgccagacgaaggtacagatggcgctgttctccgcctgccggagaaaccatccctccagccggtcgcaggcccgccccagggcactgttggcggccgcgttcttcaagcacagccacagggacaggaaaaagcggacaaagaggctgttttcagtaatagacataaaaaataatactcctagcaatcaatcgtggagggctttttcatacacgccgtaagtggccctggccattttgtggatttcaaacttgtcctcgatggtcctgcgcgcgttctcccggcaccgggctgcgaaagccggatcctccaggaagcatttcatggccacggccatggagtcggggttgtcgtactccaccagcatgccgcaccctgcctcgtcgttgacgatgtcggagttgccccccatgtcggtggcgatgacaggcagcccggcggccatggcctcgatgatgaggaaggacagggcctcgtgctgggaggagttgacgtacagatccgaacccttatataggttcttgatgtccttgcggaagccgatgaacttcacgcagtcctccagccccagctcctgtacctgggcttttgtaggctccagcagggggccgtccccggccagcaccagggtgaagggcacggcgcacagctcggtcagccgcttgaccgagtcgatgaggtacttgtgccccttgtccccggcaaaccgggaggcgcacagcataacgaagcggctgtcgtccagccccagctcggcgcggagggtggactggctgcggtctcccgcccaggcgtccagatccacggcgttgaagatgacctggatgcggtcggcgctccagccgttggcgacgagctgctccttccccttgttgcacacggcgatcatctgatcctgccgccggtccatgatgcggttggagaagcgggtcacgaagtcgttggccaggacaaaatggttggtatagaccacgcggatttttttattgtacttcttggccagcagggcggtgtagtgctcccgcagatagtggcagtgaaccaggtcgatgtcccactcggcgcagagcttcgccagttcacgggcggcctttttgtcgaagcggcggcgcatctccacccggcggcagggcacgcccatggcctccagccgctccaccagcagcccgccctcgttgtaggcaaagaagggctgtaccagcccatcggcggcgagatacttcaccagggtctccacgtaccgctcggtgcccgccttgcctgcaaaattcagcagatagagtaccttcagcatgaagaataccccctttatccaaagagtaagcgcggagccatgccccgcgcctttcattttaccggaaaacccccgggaaatcaacccgcttttcgcccccagccgcagaagatcagacccccgcagagcagataagggatggcggactcatgaagggccacaagggccccgtgcacaggcaacagcagcacgcccagaagaagcagggccgcgcagcccgcccccgcccagaacagggcacgccggagtgccagccgccgggggcggagctcccgccagatagagaccagggcgcacaccgccattcccagcagcagattcagggcgggccagagcagcagccagcccgccgcagagtagtcatatttatcgtacatcgcctcaagcgccgggagcgcccagagctggtaggccagccacagcgccgcccagacggcccacagcgccccggcggtaaccgtgcgcctccgccggtttgccggggccgccgctccctccgccggccggggaccatagagcagctcgtccacgccgacccccagaagctccgccgcggagaggagtatctccagctcgggcaggttccggttccgctcccagttgctcaccgcctgccgggtcacgtggagccgggcggccagctcctcctgggtcagccccctctgccgccgcagacacttcagattgcgggcgatgtcgtgcatacgcctcccccctctcccctccatcgtagcagagaacctcccgtttgtcacgcaaggcccgcttgcacggggaaaaacggcggcggggcgggcctgccagaacgcggcaaaagcggcgcgtcagggatgccgcgccctacacagggcgggaaggcggcgggcatgaccgctccatgacaaagttggtgaggagcaccccccggcgctccacctgctgctccttcaccacatgccagccccgccgctcaaagaagggccgggcggtgatggaggcatgggtgatgcgggcggcggggagggcgtcgcagagggcggaggccacccccctcccctgccagtccctgtggacatagaggcggtccaggtagccgtccggcccgagatcggcaaagccgacgatcacgcctccctccaccgccacccgggtgtcgtgggcgcggaaggaggcgtcccaggcggccagctccacccggccatccgcccaagcgtcgagctgctcggggctgtagtcccgggcgttgacggcgtgaaccgtttgataaaacagctccgccaaggccgggcagtcggagctgcggtaggggcgaatgtgcatgcgttacctccgtttccgcagatgccgcccacggttcagcaggcgctccccctggtcgaagaggcccaacatgaagcgcatgatggagtaggccagccccaggaacaccagcagcaccaggaaggcctgcgtacccagggggctgaggccgaagctgccaccgaagccgaggattgtcaccgccgaggagcccgccatggccccccacagcacccgccgcttccagtcaaagggcttgcacacctcatagagcaccatgatgccgatgacgatgaggaggatcgccgacatggtggacagctccgcctcgctgaagccgaaggtgaggaagaagacctccacccccagcaccacgaacaggtcggtcagtccgccgggcagggcggcgcggaacacgttggacaggaacttgccctttaccagactgtggttgggctccagggccaggaagaaggagggcacgccgatggtgacggcgctgagcagggagagctggaggggggtgaccggataggggaaggtggcgaacagggagatgagggccagcaggaaggagaagatattcttcaccagatagagagcggcggcccgctggatgttgttgatgacccgccgcccctcggccaccaccttgggcatggcggagaagtcggagttgaggagcacgagctgggcggcgtggcaggcggcgtcggagccggaggccatggcgatgccgcagtcggcgtccttgagggccagcacgtcgttgacaccgtcgccggtcatggccacggtgtggccctgccgctggagggcgcgcaccagcttgcgcttctggttgggggtgacccggccgaagacggtgtactcccgcaccgcgcgggcgatgtcctcatcggagcggagggtggcggcgtccacgtacttctccgccccctcgatgcccgcctggcgggccacctcggagacggtgacagggttgtcgccggagatgaccttcacggccaccccctgctcggcgaagtagcggaaggtcttgggggccgccgggcggatgcggttggacagggccaccagggccatgggggacacccgccgggggtccagccccttctgatcgggcaccccgccgtactcggccaccagcagcacccggtagcccttctctgaccaggggtccaccgcctccttcagatcggcgtagcggttccccatgatgaactccggggcgcccaccacgaaggcgccgtggccggggaacaccgccgcgctccacttggtggcggaggtgaaggggatggtctgggcggcgtgccacagggacttgccgtggaatttctgggccatggcccgggcggtgtcgttgtccgcctccatggactggtaaaaggcgttaagggtctcggtgaccacagtctcggcgtacttctcctcgtccaggtacaccacctcccctacctccatgtggggctcggtgatggtgcccgtcttgtctacgcacagaacgtccacccgggccagggtctcgatgcagttcatatcctgggccagcaccttgccctgggccaggcgaatcatgctcaccgccagggccacgctggtcagcaggtagagcccctcggggatcatgccgatgagggcggccaccatggacaccaccgcctcctgggcggtgcgctccaggaagacgaactccttgacgaacagggccacgccgatggggatgagcaggatgccgatgatgcggatgagcttgtccagggaggacatcatctcgctcttgcccacggtgacatccttcttggcctccagggtgaggcgggcggcgtaggactccgcccccacccggtccagccgggcccggcagcggccggacaccacgaaggcgccggagagcagctcgtcgccgggggccttggtgatggcgtcggcctcgccggtgatgagggcctcgttgacctgcacctggccggagaggacggtggcgtcggcggggatctggtcgccggaggccagctccgccacgtcatcccgcaccagttgggcggcgggcacggagatcaggttcccctcccgcactacgttggcccggggggcggccagcaggttgagcttgtccacggtctgcttggagcggagctgctgaacgatgccaatgccggtattggccacggcgatgagcagaaagagcatgtcgtcgaaggagcccaccgccaccagcagggccgccagcaccacaaagatgaagttgaagaaggtaaagacgttttcgcgcacgatctgccccaccgtcttggtgggggagtccaccgggtcgtttgcccagccgttctgctgccgctcttttacctggtgcagggtgagcccctgctccggatcggggctgagccgggccacctcccgccggggctggggggccgggacctgcgcggccggctgctttgtgtgcttgcgtttcatgcttccgcctctgatttcctcaaaattcggtccgatacctctgtagtatagtggatcccgccgggtgggacaagtacgccccctcaaaatttaccgttttttcacatccgaagcagcctgctggtctacccggccctgtcccccgctatacatggagagaaggaggcggcgcctatggaaaccaaaccggacaaacaacagaccgtcacccggctggccctgtgcgtggtggttgcggtggcgctctacgcggcggccgggaaagtcccgcccctggagccctaccgtccctggctggaggagcacaaggtacaggccatcgccatcacggcggccattctgttcgggctctccctgctccttttcccgccggaggagggcggggcagagccagcggccccggaagagggcccctgcgccgggtacgaaagaacggaggacctgccgtaagggaggtcctccgttgacgttgcggcgccggagcggagttcagccctggagctctaccggaacagcggcagcaacgccgcgccaatgaggcccgcgtcgttgcccagggccgcccgtaccagccgggtgcggtggaggttgttgcgcgcgtagtcctcccggttgaggatgtagcgcaccggggccatcagggtctccccctgggcggaggggccgccgccgatgcagatgacctccggctggaagatgttgaccaggctggccaccccgcagcccaggtagtccacatactcgtcgatgaccttgcccgcagcgggatcgccctgggcggcggcgtcaaaaggagtgcggccgttgaccccctccagactccccgccagctcccacagcctggaggtgcggtcctcctccatcacctggcgggtgcgcttgatgagggcggtggcggagcagtaggcctcgaagcagccccggcgtccgcaggtgcacagccgcccgccgtgctcgatgacgaagtggccgatctccatgcccgcgtaattgaagccggtgtagagcttcccgttgaggattgcgccgccccccacgccggtgcccagggtgacggccaccatggactggctgcccttgccagcgcccgcggcgtactcccccagggcagcggcgttggcgtcgttctccagcaggatctccttgtccagccgcgccttcatcagggcggtgatgggcacattggtgaagtccagattggaccagtatttgatcacgccggtgtccggctcaatggcgccgggagcgccgatgcccaccgataccacctcgtccagcgccgtaccggcggcctccgccgccccgcgggcggccgcggccatctggtcggccaccgcctccgcccctctcggggtgggcaggctcaccttgcccaggatggtcccctcgctgtccaccacggcggcggccacgttggtgccgcccagatcaattcccaaatacttcatagcttgcccctcctgcgtgaaacgtattcacattataatgcaggacgggccgccgcacaagagggaaaacggcgctcaggtgacaactgtgccccgggcggtcttagggagccggggggacaccgccacaggctgccggttccgggtgcgcaggtgcaccagcagcgtgacgcagccgctgagcagcaggaaggaatagaagctgatgccccgggagaccagcaccgccggggtcaccagtccggcgccgaagaagagcttcatggctgccacaaagccgccctcggaggcgcccaccgccccgggcaggggcagggaggccaccgccagggtgaccagggcctgggtgccgatgatgtccagcgccccgctgccggtcaggccgaaagcgtagtacaccaccagcgggacggaaaacagggcggtgagctggcagaaggtgaggcccagcagagcaggcaccagggcggggttgcgcctgacgcagtccgccccccggcggtactcctccatctgcttctccagcttctccctggcctcctccgggcggcggaccagacggacgcgcaccagcaggctcagtacgccgccagtgagccttctggccgcattgggcaggaacatgaggcagagcatccccgccgtcagcgcgccgttgaccaccgcgccgaacagcaggagcaggcccagcccgccccccaggttggccaccagatcaaagcggagcagcgccaccgccagggcgtagccgatgaccaccacctgataacacacggcgatgagcatcatgttgagggccccgtgggcggcgggcacgccgtccctggacatgtagtagatctgggcgggctgtccgccggtggccgacggggtgatggagctgacatagaagcccacgaaggagtagcccaggcagcggcggaggggggcccggtggcccagccgtcccaggatcaggtgggagcacgtggcctcacaccccacgaaggccagcatgagagccagccccagcagcagccagccgggcctgagctggcccagggtgtggagcagccgggtaacgggctggtccctgaacagcagccagccggtgagggccatcagcgccgcgatcaggccgatccccaccaaggactttttccggttcatccgacgcgtacccccttctcggcctccaggcccgccagcatgcggttgaggctctcctcctccaactgtcccttcatggcccgcatgttgcccgccatccactccagcgtctcgtcgtcgtagatcagcgcgcgaatggcggacaggcactcctcgggctccttggccgctacgcggccaaggccccgcttcaccaggaagcgggcgttgttcttctcctgctccagaaagggctcccacgccaggatgggcagctcggagaagatggtctcaaacagggtaatgccgccgggcttggtgagcaccagatccgcccgggccatgtagtcgtatacccggtcggtgaaacccagcacctcgatgtgggcatacttgcccgccaggcggtcgtagagcttgcggttgttgccggtgataatggtggtgtggacgccgggcagggcgtccagcgcctcataaaagctgtcccgcttgggcagcaggcccagcccgccccccatgatgagcaggttgcgctcccggcccgggcggcggcgcaccggccgcttgaactcgcagcggacggggatgccggtgacgcagatgatgtcccggtctacccccttggcggccaggcggctgcggatgtcgttggagcccaccagatagcagtcggtgtatttgtgaatccactcggaatggctggacaggtcggtgacgcaggtgatgaggggcagggcgctccccgtctcccccttccagcgggacaccatccgggcgcagagggggtgggtggcgatcaccgcgtcgggccgccgggcggcgacaagctcctccagtttgtccaggaacaaagtctcaaacagggggcgggcgtcggcgggcagatcctgggtcagcttgtagtagaggttgaacagcccgctgccacgggtcaccagcaggttgaagcacttatacatggcctccgaggcgttgggcatggcctccgccacgaagtccagcacctccacctccgccccggggaacgcccgcagcagttgctggcgcagggactgggaggccgaccagtggcccatgccgaattttccggtgagaatcagaatattcacggtgttccctccttttcatatatcagtataaaggaggattctttagaaaacctcgctcgaattcttaaaaagccattaagaatttctaacaaagagctccaacgggccctgaggggttgggcagcaggccgccgcccgccaggtttcgccggaaaaggcggaaaagaccagcccatccagctctcccgtctcccccggccggaggagaggaacggcgatgtcccgggggggccgccgcagaccctccccggtgcatttgaccctggcctccttcaacgtccagagggtgtaaaacgccccccagtccccgccctgccgctccagccaggcggattccgcctccgagcacacataccgcgccagcccggggcggcgggggcgcagcacctccacgtccacccccaggggggcctcccccgcgccgcagagggccaggcccccgctgtggctcacattgaagtgcagctccggctcccccggaaagtaaggcttgccgtccgccccccgcgccatcgccgggagaacccccagtccgtactccgcccgcagaagctcccccagcagggcataggcgtccccctcccccagccagagcaccatgtccaccgcctccttttttcctaggataccacaaaacggggccatttggtaggggcggagcgatgtaggcagaaggggaatggccccgcagggcaagagaagccgccctggggcgtcgccctctacggacttccaggggcggcgaacgagtgtgtgcctgtgccggaaacgtaggggcgggtgcccacacccgcccgtattcgacaaggccgcgcacaccacccggcgcgaaggggcgggcggccacaagggccgcccctacgggca

SEQ ID NO: 4376 - DNA, 1463 bp, Unknown
  gut microbiota DNA sequence
ttgcaatcatataagcaataaacggagcctgccaattaatctttaataactggccagcgataaaagtaatcgcaattcctcctgccccttcaaatgctgattgtaatccatacattgatgaacgctctttagcatcataaaaataattgatcatcgataccaatagtgaattaaacagaccaacaccaaatcccaacattgcacgactaatcaaaataatcataaaattatcaattaataacggtactatccctgcaatcataacaattcccagcccaatagtaattgtttgcttatacccaactcttttagcaattaaagaacttgttaaaacggaaatcatcaaaaataatgacggtaccgtcgttaacatttctaccattgataatggtacttgatcaaaatgttgtgccatggccggaatattagcattaatcgctgcagcactccccactaataatgatgctgataataaggcaaatctaagtatttttttatccataataattatcctcctttgattacactttcattataatcaattgcattactatgtctaatacttatactttatttatactatttgttttatgtatagttttatttgaaataaaaaacacatccttaaaagaatgtgttttcaacattacatattccccgacacttaattacttaagcggaatatgtatccgtcggctctttgatatcataacagatatacttagaatgtcaataagagaattagatatctaatcgtgttaactttactcatcgtctttctcagctataatttcattattaataataggagcattttctatttttttagcaatatcaagtttataagtcagattatcatggtaatttaatgaaaataaacaagcgtatagggtgtttaaaactatactgatagattctaatgatgaaaatccagcaatttttgaaaatgatttttcccttgtcgtaacacgcaaagtaaccgcagctaaatctgaaagactattattcccaatactcgtaatagctataattggacagttattttcttttaatatccgagcggtcttcacaatattagaagactcacctgaataagagatacaaatagcacattcatcaggtgaagacattgcagcatcatgaaatagattatcttgtatagggtgaatataggcttttttatgaattcgatttaatttaaatacaaattcttctccagcaaaatttagatttgacattgcaaatacccgtatctctttactttggtgtaaaattcgtactgctttttgtaatgaatcatgttggaacaaagacaaagtatctttagcactttcaatgtgtaaatttacgattttactagctattgtcataatagaatcttggttactgaacggtaaattagaatcaatattacaaaaatggctatttaaataatttgcttcttctaaataggcgtctttaaa

SEQ ID NO: 4377 - DNA, 702 bp, Unknown
  gut microbiota DNA sequence
agaaaatgtaccacttgggaacgcagaaaaatctgatcagaatcgggcttccgccgatgatcagtgtgatggcgttccggctgatccaggacttccactccgcccatccggagatcgagctggagctgtatgatgaggcttcccttaccttaagaaggatgcttcaggaggataaggtggatgtaatcattgttagcggcatgaacacggactttacgaacctggggttctgcaagcttcagaggagcgagctcctgttctgcgtgaaccggaatcaccagctggctggtgagccgtgcgtatccatagcacatgcggcgctggaaccggtggtgatgtttaagagcagcttccatgtaagggaaaaggtgctggagcgtttccatgaaaatggctgtacaccccgtgtcatgtggacgacgcagcagctctatacgcagcttcagctgatccggaacgggatggcggctggttttctgttccgggagatcgtcgaaaatgaagaggatataaccggaatcccgctggacccgcctatggagaccgacattgagatggtgtggctgaagaacgggaaggtataccaggacatcaactgttttatccggtttacccaggaacactgccggaaatacggactgaagtgtgtgaaggaatgaggataaaaatagtacagacaaaggaattggacaggaaagagct

SEQ ID NO: 4378 - DNA, 180 bp, Unknown
  gut microbiota DNA sequence
cttacatccagtgctcctcgccgtcatagacacggtagctgtgggcgttggtggcctccacaatgtcgtggtaggcccagtaggaggcgctcacatcggggaactggcgcagctcgccggcgtggtcgtccacgtagtcctcgtccgccgcccggtccagcaggcggttggtgatggccg

SEQ ID NO: 4379 - DNA, 422 bp, Unknown
  gut microbiota DNA sequence
tggactccatggagcagatggtggaggacgcggtggccgccatccccgatgacagcagcatcgaactcaaagccgcggatggtaaggcggacagcagcgaggtattccgcgagctgatcacactgtcacgcagtgagatctccattgcattacttggtcagaatcagaccacggaagcgaacagtaacaaggcctctgcacaggccgggctggaggtaacggctgatatccgcgatgcggatgcggacatcattcaggcagcagtgaatcaggttatcagaacggtggtcaccctgaacttcggcgatgtgccgtgtccggtctgggccatgtgggaacaggagaccattgatgacacccgcgccacccgcgacgaaaaactcacccgggcgggtctgcgtctgaccccgcaatactttaag

SEQ ID NO: 4380 - DNA, 337 bp, Unknown
  gut microbiota DNA sequence
tcatgtccggcaaggtattgtactgtctttggatcaacgcccgcatagagaagattggtgatgtaagtgtgccgcagctgatgaggtgtcacatcaaagtccagcgtatatttgatttggggttgattcttctgggtcatacccagcgttggagtaaccgtatatttgatactctccccatttacatacttataatagttccggggcttagtggagcggacaacgacatactgccacactctttggaactgcgaggcagccagtggctctcctttgctgtcagcgatcacataatctgatatggaattttctttcgtttctctcagacaatccacca

SEQ ID NO: 4381 - DNA, 521 bp, Unknown
  gut microbiota DNA sequence
tttgccgccggagtctttagcaccgtagaaaccacgggtctgttatgctctgtacgccatgcccgcctcaccgatagataaggtgtatcctcgtccagaaacacacaatcccattgcagtgcaagaatttcttcccgacgcagaccggaatacaaaccgagcataataaacaaatatggaggaagccccttgactgtatccagaagcacggctacctgctgatctgtcaatgcttccttcttttttgtcggttttccgcctttaccggatattcccgcacagggattgtgttcaagaatttggtttctctctgccgcataaaaaatgcacttgagcagcatattgaccttattgtataagccttccgatttctttgacaatggaacaagagccagccgaatatcgtcagcagtcacttcttccatatacatctctcccagaggtttgatgatatagtttgtcatatccctcgtataacctctgagtgtagacgcagacacctttgccgactgcatcagcag

SEQ ID NO: 4382 - DNA, 311 bp, Unknown
  gut microbiota DNA sequence
gtctgctttcctgttttttcatgccctccgtgaggcgctcagttagaataccagctttcctcctctttgtcaacccttttttcaaaattcttttctttttcttgaaaaagggagtcaacttgtccatgtgtgtctctttagccttatcgctcctggcagcgcccggtatttttgacatggcagaccaccggctggccatccagctccacatgggcaacaaagcggttcgggcgctctacaaacaccccgcgccgcacccctgaataatgcacgctctctcactcctcttcaagaaaagaaaaaacggactt

SEQ ID NO: 4383 - DNA, 7696 bp, Unknown
  gut microbiota DNA sequence
ggggcttgtccccgcccggaggcgggccgatgtgggcatcggcccctacgtgggacacgggcggccacaagggctgcccctacgggaaagggggtgtatagggagaacgtaggggcggggcttgtccccgcccggaggcgggccgatgtgggcatcggcccctatgtgggacacgggcggccacaagggccgcccctacgggtaagggggcgtatagagggtgtaggggcgggtgcccacacccgcccggagcttatcccttctgatccagatagcggctgtaatacacctgcatgtcgaagtccttgtagagctgggtgccgtccttggcggtgacgccgaagtgggccagggcggtgtcctccacatagtccaggaagatcacgccgtccacggtgttgaaccagttgaactccatgccctgggcggcgcagtcggcctccaggccgtcgatgagggtctggacatagggcagatactgcccggcggtgacgccgttggtgaagagcacgtcggcgggcttgaggtaggcggcggtgaacatggcgtagtcggcgggagtgaagctctcccgcagctccggccgggcgacccgggccaccatggcggcggtctccgcccgggtgagggtcttgtcgggggcaaaggtgccccagtcgtccacgccggtgaggatgccggcgttgtagaaggacagcacggcggcgtcggcggtgtcgggcagggcggtgatctggttgatgggggtcagcatatcctcgggcaccacggcggcaagcatggcgatgaactcctggcgggtggcctgcttgacgggatcgggcacctccacccccagtttttccagatagtccacataggaggtgtaccagggtagggtggaatccaccaggtaaatggagtcgccggtaatagcctcgttcatgcgggcggcgatggcggccacctcgcccacggtgagcacctggtcgggggcaaagccggtgccggtgccggtgccggtcatgaggcccacctcatagcaggtctgtacggtggcggcgtaccaggccgaaccggccacatcggcaaagccgggataggtgttgacggcggggaaggcctcctccggcgcgatggcggcggaggagcctgccagcagggcggtggacagggccagggcgatgagctgctttttcatggaacatttcctcctgtacgtcgggttttccccatttagacggggacatggggagaaagttccatcaggcctccggctcctggatgggagtaccgcccgcccgggccgccagcccggcctgtaccagggccacggcctccccggccgtcacggtctgctgctgcccggtggtcagatcctttaccgtcaccttgttctgctgaatctcgtcctcccccaggaaggcggcgtaggggatggacagcttgtccgcataggacagcttctgcttgaacttcttcttctcacagtggagctgggcgcgcacccccgcgtcccgcagagcggtggcgaaggagatggcgggggagagctcctcggtcatggggaggatcagcacgtccgccggggcggtgaccagggcgtcgttcagatagccctgggcctccagtacggagaacaggcgggtcagaccgatggaaataccgactccggggagttgtttatcggtataatattccgccaagttatcataacggcccccggagcagatggaacccacctccgggtgatccagcatgacggtctcgtacacggtgccggtgtagtagtccaggccgcgggcaatggtgagatccaccatgaagtgctcctccggcacgccgaaggcggacatatacctgatcacggtctccagctcggccacgcccagatcgaagagctcgttcttccccttgaagggctccagcgcggccatgggatcgccggcggccaggagggcgagcagggcgtcggccgccccgccgggtacggcgaagtcgtccgtcaggatggcgcgcaccttctccgggccgatcttctccagcttgtcgatggtgcgcatcacgtccccggcctgcttctccaggcccaggatggcgaacaggccgttgagtaccttccggttgttgacccggatcttgaagcggcgcaggcccagggcggtgaaggtcttgtagatgatggaggggatctccgcctcgttggtgatgttcaggctgccgtcgccgatgacgtcgatgtccgcctggtagaactcccggtagcggcccttctgggcccgctctccccggtagaccttggagatctggaaccggcggaaggggaaggtcagctcattctggtgcagggctacatacttggccagaggcacggtgagatcaaagcggagggcaaggtcggagtcgcccttggtgaagcggtagatctgcttctccgtctcgccgccgcccttggccagcagcacctcggccgcctcgatggccggggtatccaggggggtgaagccgtacagggaataggacttgcgcagaatctccaccatccggtcgaactgtacctgccgcgcgggcagcagctccataaaaccggacagggtgcggggtttgatctgggccatagtgatgctcctttttaacagtaattgaggctgctgcccgcctcgccgcgaaagcggcgtcaagcgttttgcgcagcaaaaccttggaacaggccgaattcacttcggcctgtttggatgaaaaagaggggctcccggcgggtcagcagctccataaagccggacagggtgcgtctcgtctccacactggccgggccgatgtgggcagaaggtgaattgccccagaggggcaagagaggccgccctggggcgtcggcccctaccgggcggcggagggactcagaggccggggtgggccgtaaaaaggcgctctcgtcccctgccacgggacgaaagcgcctgctttcgtggtgccacccatgttcagagcggaattccgctccctctgtccttctgttgcgggaaggggaccacacccgtctccgggcccgctggtaaggccgtctcccggcctcctgccgcggacgctttcagccggaggcgtccttctctgctgcggcggtgtgggcggtacttgccccgtcagggcggtttttgctccacaatactaccccaaagcggggaaaaagtcaaccgggaaccgcccagttacgcggtaaagggcttggtcttggggttgatgatatcgcgccagtccaggtccccccgctccaggccgtggatgagaatctccgccgtggccacattggtggcgaaggggatgttgtactggtcgcagagggtggtgatatacttcagatccgcgtccagatcgttggactgggggtctgagaagaaaagcaccatgtcgatctcgttgtaggcgatgcgggcgccgatctgctggctgccgccgtgctcgtgggagaggaagagctggacaggcaggccggtggcctcggccaccaggcggccagtcgtgttggtggcgcagatggtatgcttggagagaatgccgcagtaggcaatgcagaactgcaccatcagctcttttttccggtcatggctcatcagggcaatattcatcgtactaacctctcttccacagcgtgttgcgcttatcgcattttcataaggggggccttctggccaagcaggcgcttggcaatgttgagataggcgacggcggcgccccggctggcccggagaatgaggggctggccctggttggcgcacagcatcacctggggatcctccggcacaatgcccagcaggggcaggccggcggcgtccatggcgtcgtcaatggtggtgtgaaggcggcggagcagccggggctgtacccggttgaccaccagatggatgcgggggatgcggttccggagcaccgaaaccgtgcgctgggcgtcccgcagggcggaggcgtcggtcgtggaaaccaccacggcccggtccgccgcacagcaggccaaacggaacccctcgcccagccctgctggcgaatccatcaggatgtagtcgtacccctccctggcccggtgaatcagctccttcatggccgcctcgctgagcggcgcttcgggcagggtgacgggggcggtgaggaggaacaggccttggatgacggggtgggggacggcggcccgctccagtgtgcagcggccgcagagcacgtcagtgaagtccatcagcgcccggtcgctcagacccaaggtcaggtccaggttgcgcaggccgatatccatgtcgatgcagagcacccggtggcccagcgcggccagacaggaggctacaccgccggtaatggaggtctttcccgtgccgccctttcccgacgtgatcacaattgcagtggacataggttcactcccgttgtttgacgtaaataccatatcatacttccacagtggaatcaatgggtttttgtgcagaatagtgagaaaattcctgctacagcggggctttctgtatctttgcccaccggcgggggtagccattgggggtgggtgtgcacttctccaccagcaccacccggtggcgcacattggcgccgggaatgacatagtccacactgggcagcagccgcccgccgaggatggagatgcaccgggcggcgtggttgatctcctcgccgctgtccacgcccttcatggccagaaatctgccgcccaccttcagatagggcagacacagctcgcacaggagctccagggaggccacggcccgggacacggcgtagtcgaagccgtcccggtagccgtccaccagggcctgctcctccgcccgggcgtggaggcactccaccccctccaggcccagggtattgcacaccgaggcaagccaattcacccgcttgcccaggctgtccagcagggtgagctgaaggctgggctccaggatgcgcaggggcaggccggggaagcccgcgccggtgcccacgtcgatgagccgcttgccccggaggtcctcccccagggtgagcagggcggcggagtccagaaagtgcaggtcggccacctggtcgggctcggtgatggcggtgaggttcatgacctggttctgctccagcagcagacggccgtactcagccagccgggccgctgcgccgtcgggaggcgtgaggcccagggcggtcaggccggaggcaatacgcgcttgcatgctcacacccccagtccggccagcagggcgggcacgccctgcaccaggccgattacaaggatcactccgcaggccgccgccagcagggccatgcaggcctttttggagtaggtgcactccggccggcggaactgccagacggcaatcaccgccagaccggcggcaccggggcagaccagcaggggggccagcccccggagataggttccgccgtggaaaaacgggtagaggttgagggcgacgaagatcagcatgtaggccacccccacccaggcaatgatccgcttgacaggggaggcaggcgtataggaggacggctccttctggtttttattatctggtagttcagccatttttttgctccttcaaaagatcccggatctccgtgaggagcgcctcctccgccgatggcttggggggcgggggaggggcggcctcctcctttttgtggagacggttcagcagcttgacgatgcagaacaccacaaacgccataatcaggaagctgagcacggcgttgagaaagctgcccagcatgaggtcgccgccgccgggcagggggatagacaggccagccagggcctcattgtccccggcgaagatgccgagcaccgggttgaggatgtcgtttaccagggagtcggtgattcccttgaacgcgccgccgatgatgacgccgacggccagatccatcacattgccccgggcaatgaatttgcggaattcggccaaaaagccggtggttttctctttagcagacataaaaactccttatttaaacgataagcgacaaaagaacggggagaatagccccagttagggattcttgacactccagccccagtccatatccatggggggcgtgtgcggggtgggggattccaggccgtacttttctgagatagcgtcaatctgctcctgggtaagcgtctcctccggctgggcggattccgcaggctggggcccggcggtacagccgcccagcagcagggcggcggcgagcaggagagcggcggccggtaagcggtgcttcatgacaaaggcgctcctttcaatacgtgggagagcggcttactgcttgggcgtcagcacttccttgccgcccatatagggccgcagggcggcggggatcttcacgctgccgtcggcctggaggttgttctccaggaaggcgatgagcatgcggggaggggccaccacggtgttgttgagggtgtggggcaggtaggtgccgttctcccccttgacccgcatcttgaggcggcgggcctgggcgtcgcccaggttggagcaggagcacacctcgaagtacttctgctggcgggggctccacgcctcgatgtcgcaggacttgaccttgagatcggccagatcgccggagcagcactccaactggcgcacggggatgtccagagagcggaacagctccaccgaccagcgccacatcttctcgtaccagtccatggactcctcgggcctgcacaccaccaccatctcctgcttctcgaactggtggatgcggtagacgccccgctcctcgatgccgtgggcgcccttctccttgcggaagcagggggagtaggaggtgagggtctggggcagcttgtcttcggggatgatctggtcgatgaacttgccgatcatggagtgctctgaggtgccgatgaggtagagatcctctccctcaatcttatacatcatggcgtccatctcggtctggctcatgacgccctccaccacgttgccgtggatcatgaagggggggatgcagaaggtgaagcccttgtcgatcatgaagtcgcgggcgtaggccagcaccgcctcgtggaggcgggcgatgtcgcccatcaggtagtagaagcccgcgccggatacccggccggcggcgtccatgtcgatgccgtcgaaggactccatgatttgggtgtggtaggggatttcaaaggcgggggttgctgcctcgccgaagcgttgcacctccacgttgcaggagtcgtcgaggccgatgggcacggagggatcgatgatgttggggatctggagcaggatgcggcggatctccgcggccagctcggtctcccggccctccaggaaggccagccggtcggcgtcggccttgacctcggccttcagcgcctcggcctccgccagcttggaggggtctttcttggactgccccatcagtacgcccacctgcttgctcttggcgttgcgggcggtgcgcagttcctgggcctcctggatggtacggcggttctctgcgtccagctccagcacctgatccaccagggggagcttctgttcctgaaatttcttcttgatgttctccttcacggcgtcgggattttcccggataaatttaatgtccagcatggttgattctccttcaataaagtggtgtgagataaacccgtaggggcgacccttgtagtcgcccgcgggcgaccataaagccgcccctataggggagagaaaagtgcgaagcgggttgcgtggggaagcggagggacaagggagtg

SEQ ID NO: 4384 - DNA, 238 bp, Unknown
  gut microbiota DNA sequence
cgatggggtagttgttggtggtgtagctctggatcatctccacgtccagggcgttgtagatcagcagggccgcgtcgtcgcggttcaggggagcggacaggtccttggtgaagccctcgaagatgccctgctcgtcggcgcggacggacacgttgatggcccagtcggcgccctcaaagccctcgatagcggggtcgtagcccacggccaccagcagcatcttggccgcctccagggc

SEQ ID NO: 4385 - DNA, 3006 bp, Unknown
  gut microbiota DNA sequence
ttcatgaaggacggcgttccagattacacgttaaaccggaacagcacaatgtcgccgtccttcatgacgtactccttgccctcggagcgcaccaggcctttctccttggccgcgttcatggagccgcaggccatcagatcgtcgaagttgaccacctcggcgcggatgaagccccgctcaaagtcggtgtggatcttgcccgcggcctggggggccttggtgccccgtttgatcgtccaggcgcggcactcgtcctcgccggaggtgaggaaggagatcaggcccagcagggcgtagctggccttgatgagccggtccaggccggactcggcgatgcccagatcgtccaggaacatcttcttctcctcgccgtccagctcggcgatctccgcctccagcttggcacagacggggatgacctgggccccctccttggcggccagctcctccaccaccttgtagtaggcgttggcgtggcagtcggcaaagccctcctcatccaggttggcggcgtagatgatgggcttgagggagagcagctcggcggcggcgatgatggcggcgtcgtcctcgtcacagtcgaaggagcgggcggagttgccgtcgttgagccagtccttcagggcggagaacacctccacctcgcggagatacttcttgtcccccttggcggccttctgggccttgtcgatgcggcgctccaccatctccacatcggccatgatcagctcgatgtcgatgacgccgatatccccggcggggtccacgggcacgttggtgctggtgtcagctaccacatgcatgatgttctcgtcgtcgaagcagcgcaccacatgcacaatggcgtcgcactcccggatgttggccagaaacttgttgcccaggccctggcccttggaggcgcccttgaccaggccggcaatgtccacaaattccaccacggcgggggtggtcttcttggggtggtacatctcggtcagcgcgtccagccggtggtcgggtacggccaccacgcccacgttggggtcgatggtgcagaaggggtagttggcgctctcagcgccggcgttggtaatggcgttgaacagggtgctcttgcccacgttgggaaggcccacgatgcctaatttcatcggtaaaaaccctctttcggtatgttcgtttccacattatatccgatcccggtggaaaaaacaagcgcgccgggccaattcaaacagccgcctgcgcagcggtgggatgttctggccgtccgggcatttttgcaggggaaaacggcgcgccccccttgcttttccgacaggaagcgtgtagaatcttaacgctcctttaacgatacgacaaaatatggagggatctcccatgggactgctgcgccagcccaccagtgatatcaccaagggcgtgatctggaaacaactcctcgcctttttcttccccctgtggttcggcacctttttccagcagctctacaatacggtggacaccctggtggtgggccggttcgtgggcaaggtggccctggccgccgtgggctccacctccgtcatcgtcaacctgacggtgggcatcttcaccggcctggcggccggagcggtggtggccatcgcccagcacttcggcgcccgccgctgggacgaggtgcacgagtgcgtccacaccgccatgctgctgagcatcctcatcggcgcattttttatggtgacgggctttgtcctcaccccctgggccctgcgggccatgggcaccaccgaggatgccctgcccggggccatactctatctgcgggtctatttcctgggtatggtgcccaacgtcatctacaacatgggtaccggcgtgctgcgggccatcggcgactttcggcggcccctctacttcctcatggccgcatccctgtgcaacattgtgctggatctgctgctggtggtagtgttccatatgggggtggccggcgtggccatcgccaccatctgttctcagcttctgtccgctgtgctggtggtgatctcactcatgcgctccgagatgacctcctatcagctctttcccaagcggctgcgcatctatgccatgcccatgcgcagcatcctgatgatcggtgtgcccaccgccctccagtcggtgatgtacaacgcctccaatatcgtcatccaggcctccatcaactcctttggcaccgacgctgtggccgcctggaccgcctacggcaagatggatatcattttctggatgaccattaccgccatggcccagtccatcaccacctttgccgggcagaactacggcgccggggagtatgagcgcctgaaaaagggcgtccgggtgtcggtggccatgacggcgtgcttcaccgtcctgctcagcactgcctttttcctgctggcccggcccctgctggccatcttctcccccgaccccgacgtactggaggtgggggtggagatggtgcgcttcctggccccctgctatatcacctatattctcatcgagctgctcactggagccatccggggggcgggcaagtcggtagcccccatgctcatctcggtcttcggggtatgcggcctgcggctgctgtggctgttcaccgtcgtgcccgcccaccacaccctgctggctgtggaggccagctaccccatcacctgggcggtcacctccgtggccatcctgctctactaccgcttcggccggtggctccacccgcccaagaaggcgtaaaagcgccgcccccatattttgcggggggacgccgtcattgcagagccgtaggggcgggggcccacacccgcccgcggtcaatctgcggccggatcagcgggccgatgtgggcatcggcccctacgttgttcaggaggcggaacgatacccgcaggattgcaggggcgggtcctgtccccgccgcagggttggggcgggcggccacaagggccgcccctacatttggagggagcggtaccattgcagaactgtaggggcggggcttgtccccgcccgcgtctccct

SEQ ID NO: 4386 - DNA, 1172 bp, Unknown
  gut microbiota DNA sequence
cccgccgggccggcggtgcggcagtgtggagacctgccgtaacgtccgcagagtgacgctctctgcgggcaagagggtatttgcggaggcattgcccttacggccctgaacatggcaactgtatccctgaagaatgtgaagaagatctatgacaacaaggtgaccgcggttcacgacttcaacctggagattgcggacaaggagttcatcgtcctggtcggcccctccggctgcggcaagtccaccacgctgcggatgatcgccggcctggaggatatctccgagggcgatctggtcatcggcggcaagcggatgaacgacgtggagccgaaggaccgggacatcgccatggtcttccagagctacgccctgtacccccacatgaccgtatatgagaacatggccttcgccctgaagctgcgcaaggtgcccaaggaggagatcgacaagaaggtgcgggaggcggccgagattctggacatcacccagtacctggaccgcaagcccaaggcgctgtccggcggccagcgccagcgcgtggccatcggccgcgccatcgtccgtgatccccaggtgttcctgatggacgagccgctgtccaacctggacgccaagctgcgcaaccagatgcgcgcggagatcatcaagctgcgccagcgcatcaacaccaccttcatctacgtcacccacgaccagaccgaggccatgaccctgggcgaccgcatcgtcatcatgaaggacggcttcatccagcagatcggcaccccccaggaggtgttcgaccagcccgccaacctgttcgtggccggcttcatcggctcgccccagatgaacttcttcgacggtgagctggagaagaaggacggcaagtaccagctcaaggtgggcgaggccaccgtggtgctgggcggcaaggcccaggagctgctgaccgggaagggcgtgggcgagcgcaaggtgactgtgggcatccgtcccgagcacatcgcctttgccgccgcccctggcaccgataccgtgtccagcaaggtggacgtgtccgagatgatgggcagcgaggtgtacctgcacgtcaacgccgtggggcgcgacgtggtgctgcgcatccccaccaccgacctgcccgccgagcaccgggccggcatcccctacggcacggagatcaactttgc

SEQ ID NO: 4387 - DNA, 608 bp, Unknown
  gut microbiota DNA sequence
tcacatcggagaagggattctccccgccctcgggcaggcgggcaaagcgcatggccatcaccgtgaactccgcccgggtgatggtgcgctccggggcgaatttcccgccgcctacgccttccaccatgcccagggaggccagggtctccaccgcgcgggcgtaccaggcgtcggcgggcacgtcggtgaagcggaccgtactggagacgtcctgatccagcaggagattatagaacatctgcgcggcctcggcgcgggtcatgtggtcgtcggggccgaagaggccggttccgtagccattgaggtaggccatatggtcggtggtgttgagccagcggtccacgcccgtatccggggccttctccacggcgcggaactccgcctcaatggtgtggttcttacgcacggtttcaaaggtgtaacggctgaccgcgcccacactttcgccgtccaccagcacgtcggcaatctcatacccggcatcgggggtgatgcggaaggtcttgtcgctgccgcggctcacccgcaccctgccgtccgggctgatcccgccgccatggcccgcgctggcctcaatggtgtaccgggccgtgccggtgctgccgccg

SEQ ID NO: 4388 - DNA, 6082 bp, Unknown
  gut microbiota DNA sequence
gggccgatgtgggcatcggcccctacagaggtctgctgcggcaggcaccgcccggccaaaatgctccgtaggggaggggctgtccccgcccgcgggcggccataaaggccgcccctacatttccggggttccgtctctggcgggctatcttgcggtgctcgaagcatgtaggggcgggggcccacacccgcccgcaggccgttcggcaggacaaggcccccgcgtccggcggtacgccgtgcgcgggggtgcttttatctccagaggaggtaatcagaatggcaaattatacacagcactatcacctgcaccagtgggagccggaggacagcttcctccgcaccgacttcaacggagattttcagaggctggacgaggcgctggcgggactggatgggcgcaagccggagctgcgtctggggcggtacaccggggacgggacgcagaaccgggcggttgcgctggggtgtgccccccgggcggtcctgctcttctgccgggatcgggaggctctgctggcctggccgggcgcgccctatgtctacgcttataacaaccggcccggcaatatgctgattctgacggagaccggctttcaggtgcactacgaccactacgaggtgggcctcagcgacaacgactttctccccgtcaccaacaaggcgggggagaactaccgctatctggccctggtatagcagagagcccccggacccgattgggtctgggggcttaacctgtcgaaaggacgttttgacagagagaacccgccgcgcaaaaatgcggcgggttctccgatttagggacaggcttgattaccagtccagatccagggtcacggtgtaggtagtgccattgatggtcaggttgttgggcgtgtaagcggcatcgttgcccaccagcatatactgagcagcgccggcttcatcgtagaatgccaggacggcgaactcagtagagttcttgagatcattctgactggtggcagatccgccggtgcagtacaactgcgcaatggtctcagcggggttggccgggtcggtgccgaaaccgggaactttggtattcacactcgttccggtgaccggtccgctcacggtaatcgcgttcgagccggtggccacgatgtcgaagtcaaaggtcacatagccagagttcaccagatccacccaatagccatatcgggcaggatcctgcaccttccagtactcagtgtactccaggtgagcattcttgtcggcagtcgtcacagtgacgtgattgtccgttgtggtgcaggtgtagttgtcaccgttcttggtgtccttgatcacccaattaccagtactatccacctctacttcgatgtcggagacgctgacacccagaacctttgcggcctcagccttgacagcatcgcgcttctcggcaaaggtggcatcctccgcaccggtaacggaaatattcagtttccgagtcatggggtcaaactgcacggtgatgctctcgttgacgataccatcgtcacgatgctcctcgtccacttcccagatccaggcggtgcggatggcgttgtcatcctcgacaatgacggcgttcaccttggtattgtaggggaaggtgcccagggcggtcttgtcctcggcggtgtccacgtcggtgacatcccacacgttggccttgccggacagggcgatgtagcccttcaggctgctgtccacagtgccgttcttcagcagcttggcggtaccggcgttctctacgtcgtcgccgatgtcataggtgccgtcggcattctcggcgtaggtgtaggccttcatgtagctggcctcgtcgtcccagtcgtggccgccgtcgtcgtccacctcgatggcctggacggtgccgtcctcaaagacaacgttcagctccagcagatccttgccgatggcgttggcggacagaaccagcatgtagttggcgctggtggccttggcctcagcctcgaagaggatcacgtcggccaagtcggtagcctcataggtcttgtaggaggtcttgtccagaacggggtagacctgaacatcgacgcccggattcacatcgctcatgtggtcccagccggtggccacgccgtactcaatctcgcccttggtgttcgtccagtagtagaaggcaacggtgttcttgtccacggcgtaggtcttttgagtctgtccgtgcgccgtcacattgatggagccgcggccgccggtgtagccgttcatagccttatactgaaggctaccattattagtggtgtccatccggatgacgttaccgtcgtcacccacaccggcggtgctgtcggagttcacggtggaatcgatctcgctgccagtgcccttgaggctgttgccctggaggacgctcttgatggtcagcacgtcatcgtcggacagggtgtaggtgatgatggagccagcggccacgccggtcttgttgtaggagccgctgccgggctggttaacgtcgcgggtgcccaggtaggtctccagcttcacgtcgttggacttgctattgacatcattagcggcagtaattccagtgatatcctccatcgccttggcggagttcttccagttgatgctgtaggtcttgacggtgccgtcggtcatgaggatcttgacctgaccggagcggtccagggcgttcagggtccaggcggagtcgatcacgagggcatagttggtgacgatctcctcagcggggcggacggcgatcacatagccgttggagtccaggacaaagtcgtagctgttgtcaaagccgggctcgttcttggcgtcggcaatgtcaaaacgggtcagatccacgtccaccagggaggcggcgtccagaatgtaggactggcggtactcttcaccatccacggtgataaagagctcgtcggccttgtcgcggtccacgcgggtcatcttgccggtgacaacctcgggggcggagatgtaggtgcggccgccgtactgcacgtagaggatcaggtcgtcggtggtcacctcgtcgttgaacactacgtcctcaaagtcctccgtctcagtgacagtcttgttggccagctcgttgttcttgtcatagccgggcgcatagaaggagattgtctcgttcttctcgctgtaggtgcgcacctcggacagagtctcgcgggtgaacagcacgtactcggcgtcgccatcgttgttgttgtcgatgatctcaacgtccacaccgttcaggttgaacttgtcgctgttgttggcggcatagctgtagtcgttgatcaggttgtgggcatcctcttcggtcttgcagtagccgtagttcacgtagaactcggtgcccttggtgacggccacgccggtgcccttcaggtaatccttcacggtgctctgagtggcagcggtggcgttgatcacgttcacgtcgtccttggtggacacgcccagcaccttggaatcggacaggatggtggtcttctcgatgtacatggtcacggtcttgcccaggaagtcaacgggggtgtccacattgaaggcaatcttaccggactgggccacgccctcgtccttggtggtgttggaggtggtggaggagtacagaaccacgttgtccagcacggtcttgccatccttcagagcggagtcggagtcggtcttgtccagctcagcccacttgttgcccaccacaacgccctccaccttgtacacgccgtacatggaggacaggatggtgcgggcatcggagtacgccatggcgtagccgttgttggtgtagctctcgatcatctccacgtccagggcgttgtagatgagcagagcggcgttgtcgcggctcagaggctcggccacggagcccttgaagttgcggaagatgcccagcttggaggccagggcgttggtgttgatctcccagtcggtgccggtcaggccctcgatagcgggatcgtagccagcggccaccagcagcatcttggcggcctcggagccggtcacgcccgcgtcggggtcaaacttgccgttgccacggccggcaatgatgccggtggtgtagcagtagttgatgtggcccttggcccagtggctgctgatgtcagtcaggccggaggggctgttctcatacagggcgccgttatccacgccctgattcatgatgacggagatcatcttcgccatctgggcgcggtccacgccctcggtgggggcataggagccgtcgggctttccttcgatgacgcccagcgtcaccagcatggaaacggcgtccttgttcacgatctgatccttatcggtgagatcgttgtagctcgcagcggaggcggagacaaccatcatgccgatgagcatgatcgccgccagagccaggctgagagcccgcttgaggtttctcatttggatttcctccttctgaattttgaagcccaggggcgtatgacgccccttgcaagccatgaaaaaggagggattccccccacatgcagttctaaataacacaaaagagcggcaaaaagtggcgttggtagacctctggtagacacgccgggcatgccaagcgcaaaaaggcccggaaccgcaacggttccgggctgcttttggtagacatttggtagacttaaacttaacacaccatccaataatataatatattgaggtttccgcctgcgaactatatcattcggtacagggttctctatatagagcaaggttcggcctctgactttcatcctctatgccattttgggttatgcacgaatttgattgtccaagtttttactatcgtccataacgacaaattccctgcaattttaaaaaggcaaacagggaccgacttttgaagaagtccagaatacggttccaaaattcgaccctcgttcattatgttttgggctcttatcgggatatatttgtttttacaacttttaattccgtcaaatatctcaccatatcggctatttttatctgattacagaaacctgccacttcaggacaagtggagcttttccgcccgttgccactgctccgacggcaaccacttgtccatagcggtattgacgctgccgtagatggcatggatgtcttcatccataccatctacggcagccgagtacctcatgaggtatcgcagtcttttcaagtccatactgtcattgtccatgttggtgcagtcattactgaatgaagtccttctatagcttctgctgcttcggtgacagggcaatccgcttggtggagtcgttctgcgccacgtcggacatcttacagttgaaggtgctcctgatcaggatatcctcctcgtaggacatctgaaaagcgggtttcacaatgccgcgaacgctcgtgatgtgctgtaccccttgccgtcgttctgaaatttcatatttcttacgcaacttacccaaagtctttgcgtaaacagtctggcgcttgccggttcctccgctgtttaatatgttatcaatagtcataaaacacccgcatatatctcttcatagacattgaaccccttcaaattaggccaatgaatgaggatatcagcgccaagctggcttcgggtatcagtaggtaatctggtacaatcagctctgcctgcacgcgtcctgcaaatcagagaccagcacctttttcagccgtgcatagcgggggagggagtgttcctgcggggcccgagggacgccctgaatcagggggagcacgtagtcgatgaagggctgctccaggccgttcccatcggcgttgatccaggcgcggggaaccgtcttttccgcgttggccacaatatccaggggttccagcacagtctcgcagcggtagcctccctcccgggtgcaccggaaggccaccatcttgtcggaatacccggcgaccgcagcctccacggccgccttgcccgccagaaacgcctcgtcgatgtcggtctgggacgcgctgtgggcgccgcagcgctggggtagggacaactcgatgccccgcaccttggcggagggctcccgctgccggagaaggtcggccagcagcgccgccagccccccaagctgggtgtggccgaagccgtcgttggcggcggcggaaactccttcggcgatgaaggcgccgtccgcccggtggattcc

SEQ ID NO: 4389 - DNA, 14234 bp, Unknown
  gut microbiota DNA sequence
gggacagaatgacctcctcccgtcccgtggacgacgcctccgccgccagccccgccagcagccctacgtattcctcgtccggcaggcttgtcagccgctccatggccctgtcgtaggccttggccagcatctcctgcttggcggccagctccagcttgcgggcgtccaactgggccacgctggcaagccgcgcctggcgctcctccgcgctgcggcggccgcgggccgcgatctcctccgcctcccgcttggcctgggcctcgtagcgggcggtgatctcgtcggcctgccgccgggcctcggcctggatggaggcgatctccgcctcggtgtcggccgcaatgcgcccggtgattttctcaattccgtccatagccgcctccgctcagaagccgaacatgatcatcaggaaggagatgagcagggacaggatggcgtagaactccacgatgatacacagcaccatgcccttggaccagtcgttggggttcttggccacaatgttgaccgaggcggcggccacccggccctgggcgatgccggagagcaggccgccgatggccatgggcaggcaggcggccagaatcagcaggccgttggcgatggacagctcggccacggtgccgtcgaacaggcccattttcatcagggccaaaaagccgatgaccagcccgtacaggccctgggtgccggggatgacctgcaggatcatacacttggagaactgggaggggtcctcggccagcaggccggcgcccgcctcaccggcgatgccggtgcccttggcggagcccacacaggccaggccggcggccagcgccgcgcccaggaagccaaagaacgcacccgcgtactgggtcagaaattcaccgatcgtcatgttactgttcctccttaatatcgacaaacttggtcgcaatgttcaggggccgccaggggcgtccgccctccttgtagaactgcttgaagaactccagatattgcaggcgggacgtgtgcacgtaggtgccgatcacgttcaggccgatgttgaaggcgtggcccacaataaaaatcacgaagaagatgggaatccccaccgccgggggcaggccgccgccgggcatggcgcccaggatgttgaacacctgcccgatcaccgagccggccagcatcatgaccatcaggcgggagtaggagaggatgtccccaaagtaccccgtcacgccgttgtagaccgcgccgatcaccgccgtcaccttgccgaagcccttggcgctgcggccctgggccagcagcatcaggcagcccagcaccagcaccacggggatgccggccacgctgcccacggaggaaacgccggtcaggttcagggcaaacagcccgatgcccgcaaagatcacccaccaggtgccgacgtcccacacggcgtcccacacctggccgtcccggcagagcatccagaacttgaccgccatgcccaccacgatctgcacgaagcccaccgccagggcaaagaccagcacggtcatggggtcctccatcacgttgagcagaggggcgggcaggccgctgccctccggcacggagaggaaggggacggccggctggggcaggcccagcatgccggtgaactgcaccagaaagtcggagaaaaatccgccggtcagcagcccgatcaccgccgacgagacgccgcacatggtcatcagccggatgagctggccgaagccgcccttgggccgcaccttatgctggatgaacaggcaggcgcccgccagaagcaggccgtagcccagatccgcaaacatgaagccgaagaagaagatatagaacggggccatcaggccgttgggatccaccccgtcgtaggcgggcagggagtacatctccgtgatggtggtcagcggctcggtgatggcgttgctcttaagcttgacgggcaccaccgggtagtcctccggcgccgggtcggacgtctcccagcagcaggtgaactcccccagcttccgcagcagcttctcctcctcgggcacgggcacccacccgtccaggtagaaggccgtcccggagtccagcaggcggctcttggcctcctcccgggcgatctcctggaccgcccggtccaggcacagctccagcgccgcccgcctgggggcgaagccggccaccgcggcaatggcctcctccagtgtacgggcggcctccgcctgcccggcctccagccgtttgtcgttctcggccgccgttccggtccagccccgcagggccgcccgggagaagccgtactccttgagcacctcctggcaggcctcctccgcgctgcggtggcagaggaacaccaggtattgcagctgcgtgtccgccccggcccggagcacctgggtcagctcgcttttctccgccagctcccgctccagcgcgtccaggtcggcggaggcggccacggtgccgaaggacaccgccacctccggggtggaggccgtctccagcgggatgtccagcgccagccagggcgccagagccagccgctgggtgcgcagcttgttctgctcggcatagagggcggtgatccgccgctccagctcccccagccgcccggcgtccgccaggccggcctcataagccgcgtcgtcaaagagctccccctctgtgaccaccggccggggcttgagcagcccgcccttctgcttggggccgtatttttttaaggtcctgagcgccccctccacacgggaccgcgcgtcccgggccgcgttcagcgccccggggtccggccgcgtcagggcagcccactccgggtcgtcccccagatggggcggctcgtcaatctccacacagcccatgtgctgaagcagccgcagcaggctctcccgctcggcctgcatgccgataagccgcagccgcttcattttaacaatggacattcgttttcactacccttctcacgatgctctcagcggcgtccgccaggcgggcctccgcctgggcccgcagggcgtcgcaggatttccgggtctgggccatcacctccgacgcgtgttcggccgccttggcctcagcctgccgcatcagctccctcgcctgggcctctgcctgggcgcgggcctccgccaagcgggccttccccgcccgttccgcctcggccaccagccgtttggcctccgcctgggcctccgccctgcgggcccggttggcctcctcggcctcggtcacctgcttcattgcttccagagacatgctctcaccgcctttctctatcatccgggtcgcccgaaacaaattttcccgatgatatatgaatgatacttcaaatcggagagaatttcaagtttaaaattataagtttactttttaacataattcgttttccttctgcctcttccgctgggagccgacgaaaaaagcggacgcatagggctatgcgtccgcttttgggcattattcgcctgtcatggccagcacggcccagtcctcccgggcctgccccgcctgctccagcacgggcaccaccggggtctggttcagccggggcagggtctccccctcccccaggcgcaccaatacgcggtcggcgcgctccagcagagcggcggtctggccgctctccaccgccccgcctgcggcggcggaggcggtggtcaccagggacacctttacctccgggaactccgccagtccggcgcgcacctcctcgagaaagacctccagcgcggcggtccggccgtcagcgggatagttggcatcggccttaatccaccccagttccccgtcggtggggaaggcccagttgtccagcaggatctcatcaaagcccagggccgccaactcccggcacacgcccaccacatattggcgggcgctctcattggccgggctgagccagcgggtatcgccgctgtcccgccagttgcccgcgttggtgtggatggccagagacatgtcgctgcggggcacaaggttgtcccggaagcaggacacccgggccacggtatacacctctccgccgttgaggagctggatggccgcgttgagggccgggtcggcggcggatgcctccgcctggatggccagggccagcccggagatatagcccaggctgccgtcgtccgccttcatgtcaaagagagcggcggtggcgccggccgcctccacctgctgggcggcggtgccgtcatagagggcggaattgggcagcagaatcccccggaagtcctcctccggttccggtgtgggtgtgggctccggcgtggtcaccaccaccggggcgcccgtagcaggcgccggctccttctgctggaaaaagggcagattgattttaatgccgttggcagagtagtcgatgtatggctcgagccacagcagagcacccaccgccaccgccagcacgaccagcagcaggacaatcagcactttcaaaaaggtgcggacgcggctgcgtccgtggtaggaatcgtatccgttgcgcctcaccggcgtcccccctcttcgcggcattcacccggccacgcctgaatagcttggccgttttttgcccgttctatcacggtccggactgctctgtcccagcctgaagcagcgcgtcgtccagcttctggaaagcggcggcgatcatggcccggtcctcctggctcatgccgctgagcagggagctgaaatatccgctcacgtcagtggccgccttggcccgcagggcgttgtacttctccgtagcgcagacatagatcacccgccggtccgtctcgctgcgctgccgtctggccagccccagcttttccagccggtccacaatgcccgacaccgtgctgttggcgcttccggtgcgctcggccagggcgctgatgggtaccggcccatcctcccccagcaccgtgagcaccagggcctggggaaaggtcaggtccagccggccgaagtggctgcggaactgctgggacatgtgctgtgtcacccgcagataggacatgaaaatattgggctgttccatcggtcaatgctccctcctgttacgcgcatccacagaaccgcctcagcccatggcctgggtggtaaggcgctggagaatcacggccagttgggcgcgggtagccacgccgccgggcagcagcctgccgccgtccccctccagccagcccatgcccaccgcgtggcgcatgctctccaccgcccagacgccggtcatgttggcgtcggagtacaggttgagggagccctcggccagcggtacgccccggtattggtcaaagcgggtgaggaaggccgccagctcctggcgtgtgacggattgatccggcttgaagtccccccggctgtcgccgttggcaattccgttctccttggcccaggccaccggctgggcataccacgcctcgggggacacgtccccaaaggagacggtggccgtgggggccggcgaaccctccatccgccacagcacggtcactaccgtggcccgggttacgttggcggtaggggcaaactggctctcgctcacgccggtcatatagcccttttcggtcacctcattgactgccgactcataccacgccccgccgggcacatctgtatacccgcccgcggctgccgcgggcagggtcaggctggcacacagacacagggtacaggccagcgccgtccatcgctttttcaaggcattcactcccaatcttgttaggctgtccccattctacgacatggattttacaaatgtgtgaacaaccgctgaataaaacgcccgccgccctgcaaaaacgcccccacagccgggcgcacagcgaaagaggggcgggcgccgcagcgcccgccccagcctgtcgaaaaggtattttcgacaggctgctggactttttgaaactctaaaaaagtttcaaaaagtcgtttgatccaacgcgaaagggaaccctgacggttccctttcacactattcttccctccgaacacctcggcagaaaggcttaatggcaaccccaggcgggcgccgcagcgcccgcccctcttctgcattcacaccgccagcgcccagttaagcatcaacaggagcccaaagccgggcacgcccagcacgccgagcaccagagcgttgaccagattgacccccaggtggaggcccaccaggccgcccacaccgctcaacgcccacagggcggccaggcccacgcccgtccgcgcggccagacgcaccagccactccagcggccgccgcagggccgccaacagcaaaatcaggatcaacccgcccacaatccagggcagggcattgagcaaggtttccaccgccatcccctcccagctttcctctgccagtcccttggcggcgggttccccccgcagttatcccggctgcgcctgcgcctccccgtctagctccttgacccgccgcagcaggtaggagtaccgggcctggagggcattgatctcaaagacataggactcgatcagatccgggtccttggcggcgttaaagcccgcataggcctgggcaatgaggctgcgggtctgtcccagcccctccaacagcgcccgccgctcggtatcctccgcccgctcccgtcttttccgcaggaaaaacactctggcctcctccgccataacggcgcctcctttgtttttggtttcccatctcatggtatgtccagtctggacaaatatgccggagcctaaaccaaaattttccgcgtatggcgctccgtcctgtgcacatactatgcccggacaggaaagaggcctgttcctccttgcatctccttttaagccggtgccgggtgagctcaccctctggcgaaaggcgaaaggaagcgcaagctgtccaaacaaagccgcccgccccgcgacgaagcggggtcaggcgcagaaaggccgccggacaatgtccggcggcctttcgcgttttcttgacactttgggccggtttggagtaatataataagatgtaattttctgattttggaacgagcgaggagaggcccatggcgaaaagcaattcccccaaaaattacggaaacgactccatttcctccctgaagggggccgaccgggtacgcaagcgcccggcggtgatcttcggctccgacgggctggagggctgtgagcacgcggtctttgagatcctgtccaacgccatcgacgaggcccgggagggccacggctccctgatcaccgtcacccggtatgaggatcactccatcgaggtggaggacttcggccggggctgcccggtggactggaacgagaaggagcagaagttcaactgggagctggtgttctgcgagctgtacgccggcggcaagtacaacaacaacgacggcgacaactacgagtactccctgggcctcaacggcctgggctcctgcgccacccagtacgccagcgcgtactttgatgcggtgatccaccgggacggctttgagtacaccctccacttcgagaagggcgagaacgtgggcggcctgaaaaaggagccctactccggcaaaaagaccggctcccgcttccgctggaagccggatctggatgtgtttaccgacatcaatatccccgtggagtactacaccgacgtgctcaagcgccaggcggtggtcaacgccggggtcaccttccgcttccgcaaccaggtgggggggaagttcgagaccaccgacttccagtacgaaaacggcattgaggactatgtgaaggagctggcgggggagaactccctcaccctgcccgtgttctggcagaccgagcggcggggccgggaccgggcggacaagcccgagtacaaggtgaagctctccgtctccttctgcttctccaacacggtgcagattatcgagcactaccacaactcctcctggctggagcacggcggctccccggagaaggcggtgaagtccgccttcgtgaatggcatcgacgcctacctcaaggcccagggcaaataccagaagagcgagagcaagatcacctgggccgacgtggaggactgcctggtgctggtgagcaacaacttctccacccagacctcctacgagaaccagaccaagaaggccatcaacaacaagtttgtccaggaggccatgaccgagtttctgcgggcccagttggaggtctacttcattgagaatcccctggatgcggggaagatcgccgagcaggtgctcatcaacaagcgcagccgggagaacgccgagcgcacccggctgaacatcaagaaaaagctctccggcagtgtggacatcgccaaccgggtacagaagtttgtggactgccggacgaaggacaccacccgccgggagctctacatcgtggagggcgactcggctctgggcagcgtcaagctctcccgggacgcggagttccagggcatcatgcccgttcggggcaagatcctcaactgcctgaaggccgactacgccaagatcttcaagagcgagatcatcaccgaccttctgaaggtgctgggctgcggcgtggaggtgcacgacaagcacgccaaggacatggccgccttcgatctgatgaacctgcggtggaacaaggtggtcatctgcaccgatgccgacgtggacggcttccagatccgcaccctgattctcaccatgctctaccgcctcacccccaccctcatccagcggggctacgtctacatcgccgagtcccccctgtatgagatcacctacaaggacaagacctggttcgcctactccgacgcggagaagaacgagatcgtgagcggcgagctggcgggcaggaagtgctccatcaaccgctccaagggcctgggcgagaatgagccggacatgatgtggctcaccaccatgaacccggagacccgccgcctcatcaaggtcatgcccgaggacgtggagcgcaccgccgccgtcttcgacctgctgctgggggacaacctccagggcagaaaagaccacatcgcggagaacggctacaagtatctggagctggcggacatctcctgaccgggcatacggccgctatatagggcggctgaccgttccaagcagaccgtttcccgggccgtgcagcagttcaaggccgcggtcagccgtcggagcgcccggaaaggcctgtggcagtccggctattacggccctatcatccgaaatgacgccgatccggccgaaacccgccaatctatcgccgacaatcctctgaactggattctgaataaggactgataccaatgcccaaaaagaaggcccccgaggagggggcaaagaaggtaatcaaccccaacgtcatgggcctgcggcccgaggtgctggaacagcccatcaccgagacgctggagatcaactacatgccctacgccatgagcgtcatcgtctcccgggccatcccggagatcgacgggttcaagccctcccaccgcaggctgctttacaccatgtaccagatgcacctgctggggggcgcccgcaccaagagcgccaacgtggtgggccagaccatgaagctcaacccccacggcgacgcggccatctacgacaccatggtgcgcctcagccggggttacggggccctgctccaccccctggtggactccaagggtaacttcggcaaggtgtactcccgggacatggcctgggcggccagccggtacaccgaggtgcggctggactccatctgcgccgagctgttccgcgacatcgaccaggacacggtggactttgtagacaactacgacggctccatgcaggagcccaccctgctgcccaccaccttccccaacgtgctggtgagcgccaaccagggcatcgccgtgggcatggcctccaacctgtgcggcttcaatctgggcgaggtgtgcgacgccacggtggcctttctgaagaacccccaggtgaacctgctggaccacctgaaggcccccgacttccccaccggcggcgagctgctctacgacgagggggcccttcggcagatctatgagacgggccgcggctccttccaggtgcgggccaagtggcgctacctcaagggcgaaaacctcatcgagatctacgagatcccctacaccaccacggtggaggccatcatggacaaggtggccgagctggtgaaggggggcaagatccgggagatcgccgacatgcgggacgagaccgacctgaacggcctcaagatcaccatcgatctcaagcggggggccgatccggacaagctgatgacccggctcttccgctccaccaccctccaagactccttctcctgcaacttcaacatcctcattgcgggtatgccccgggtgatgggggtgcgggagattctggacgagtggacgggctggcgcatggagggggtgcggcggcgcacctacttcgtgatgaagaagaagcaggacaagctgcacctgctccgcggcctgaaaaagatcctgctggacatcgaccgggccatcaaaatcatccgggagaccgaggaggacgaccaggtggtgcccaacctgatgatcggcttcggcatcgacgacgtgcaggccgagtacgtggccgacatcaagctgcgcaacatcaacaaggagtacatcctcaagcgcattgaggaggtggccgggctggaggaggagatcgccgacctccaggacatcgtgaacaaccccggccgcatcaagaagctcatcgtggccgagctccaggcggtgcagaagaagtacgccgtcccccggcggacggagatcgtctacgagtaccagaccgccgccgcggaggacgcggaggacgagaccccggactacccggtgcacgtgttctgctcccgggagggctacttcaagaagatcaccccccagtccctgcgcatgagcggggagcagaagtacaaggagggggacggcccctggctccagtgggaggcctccaaccgggacgagctgctggtctttaccgaccggcagcagtgctacaaggcccgcctgagtgacttcgacgactccaaggccagcctgctgggcgactttttgcccaccaagctgggcatggatcccggcgagggcttcgtgtgggcctgtgtcaccgccgactactccggccacctgctgttcttctttgaaaacggcaaggtggcccgggtggccctgtcggcctatcagacccagacccgccgcaagaagctcacgggcgcttactccgacaagtcccccctggcggcggcctgcctgctgacagaggacacggagatggcggtgacctccaccgagggccgggtggtggtcttccacaccgccgccctcacccccaagaccacccgctccacccagggggtcaacgtcatgaccctcaagcccaagtacaaggtggccgacgcccgccccctggcggacaccaccatcgtcaacgccgcccgctaccgggcccgctccctgcccatcgcgggcatgctgctccggccggaggaccgggccgaggagcagatgacgttactggaataaaataaagaaggtatcggctatgaatcgtgtcgcaaagcagtatgtccttccctatctgtggatcaccctggcgtctgcggtgtacgccgtgggcttcaactggtgctacgagcccaaccagatcggcttcggcggcatcaccggcgtgggccagatcatcaaccacatcctcccctgggctcccatcggcaccgtggtcatcatcctgaacatccccctgttcctgctggggtggaagctgctgggcgggcacctgctggtgtcctccctttactccatgttcatctcctccattttcatcgacattctccacatgatccacacctttgagcctatggagcccattctggggtgcatcttcggcggcgtgatcatgggcggctccctgggcgtggtgtttctccagggcgccaccaccggcggcaccgatctcattgcccgcctgctcaagctgaagctggcctggctgcccatggggcggctgcttctggcggtggatctgctggtcattgtggcggtggccgtcgccttccgcaacatctacagcgccctctacggcgtggtggccctgtatatctcctccttcgtcatggaccaggtgctctacggcatggacaacgccaaggtggcctatatcatcagcgacgcctacgaccagatttcccacgccattattcacgatatggaccggggcgtcacccttctccacggcgagggcggctggtccggggaggacaagaaggtgctgctggtggccttcaagcagaagcagatcgtggccctcaagcagaccgtcaagagcatcgaccccaacgccttcctgatcgtgtgcgaggcccacgagatcctgggcgacggcttccgggagtataagcacaacgatctctgagctgtccaggggcgggggaacgcgcccctggacaccccccgccctgcatatgccctgcttttttgcccgcaggcggataaccccctgtgctctgtcattttacgctggaaaggagacctgtttatgcccggttttgagaaggtacgcaaaaatctggaggcccacggcttcgatgtgacctgcttcgacacggcggcggaggccgcggactacctggaccgcaggctggacggcaaaacggtggggcacggcggctccatcaccctcaaggagctgggcctcctcgatcggctccagagccacgccgtggtgcgcagccactggctgggagacagcttcgcagacgcagccgccgccccggtctatctgacctcggtcaacgccctggcggagaccggcgagctcatcaacatcgacggcacgggcaaccgggtggcctccaccatcttcggccatgaggaggtctactttatcgtgggcgtcaacaagctggctcccgactacgacgccgccctctggcgggcccgcaacgtggcctcccccaaaaacgcccggcggctgggcaaaaagactccctgcgccgtccggggggacaaatgctatgactgcaaaagcccggagcgcatctgccgcgccctggtggtgctgtgggagaggcccaccggcatcggtcgggccgaggtggtgctggtcaacgagcctctgggctactgaggaggggagggcgtggcattgaaacgaggcatagcggcgctggcgttgagctgcgccctgctgctcaccggctgctcctcccttctggagaacccctatgcagtggtggagccgcacacggagcgtccggccacggccgaggactcctccgccgtccaggcgggcacctattccgagctggtcaacaccgtgctgttttttgtctcccaggggacagaaaaggggctgattcagcttaccgacgactatgacggggatgtggaggaggatctcaaccgggcctgcctggaggtggccaaggacgaccctctgggggcctatgcggtggactttatcaaaaacgactgcaccaaggtgctcaccacctatgaggccaccattaccatttcctaccgccgcacccgggagcagatacgcagcttggtcaacgtcaccggcaccagcgccatccgggacgaggtgcgcgccgccctggctgattttcagagcgaggtggccctgcgggtgggctacttcactgagagcgccgactccattgccgccctggtgcggcaggcctactacgacgagcccgccggcgccctgggcatgccggagtttaccgtctccctctaccccgcctccggcgggcagcagcgcattgtggagatcctgctcacctatcccgaggacacccaggcgctgcgtcaaaagagcgatgacctccagagcacggcagatgccctggtgctccctctccggccccatcagctctccccctccgcccggcaggccgagctcttttccctggttcgggagcacgtccgcgcccggccggagggcggtcccaccgcctgggacgccctgctgggcgacggggcggacagcgaggggctggccctgacctttcagctcctcagcgggaagatggaggttggctccgttctggtggagggtactctgaacggcgaaccccacttctggaaccagctcaccgccgacggcggcgcccactatgtcgatctcacccgcgacgcctccggcaccacctattccgccgccgaccttctctccctgggctacgtgtgggagggcgcggaagaaaatgcagaaaatttgaattaaccccttgacagcggcggaacggttcgctataatataatccgtcgcttgcaggtgtagctcatctggtagagcgccaccttgccaaggtggaggtagcgagttcgagcctcgtcacctgct

SEQ ID NO: 4390 - DNA, 453 bp, Unknown
  gut microbiota DNA sequence
aaaagtattgtaagcgtgggttgtttctttagaaggaggatttttaacggtgaaacaaccttacaatactacgatttacaacacggcgctttatatgagattgagccgggacgatgaactgcaaggagaaagcgggagtattcagacacaacgcatgatgctccggcaatatgccgccgagcatggcctgaatgtcatagatgaatatatcgacgatggatggtctggaacgaactttgacaggccggattttcagagaatgattgatgacattgaggacgggaaaatcaactgcgttgttacgaaggatttatcccgcttaggcagaaactacattctgaccggccaatacacggaaatctactttcccagcaaaggagtccgctatatcgctgtcaatgacaatgtggacaccatcaacggagagaatgagcttgccccattcctcaacat

SEQ ID NO: 4391 - DNA, 238 bp, Unknown
  gut microbiota DNA sequence
aaatgagcttgccccattcctcaacattttgaatgaaatgcacgcccgccagaccagcaaaaaggtaaaagcggccatgcggacacggtttgcaaatggcgcacactatggagcctatgccccgctgggctatgtaaaagacccagataaaaaaggccatcttttgattgacccggaaacaaggtggattatcgaaaagatttttgaccttgccgttcatggccggggagccgccagc

SEQ ID NO: 4392 - DNA, 287 bp, Unknown
  gut microbiota DNA sequence
gaagcgattatttccgaagatgtgttccgtcaagtacaggagcagatttgcaacaggcgcagacggcagaagaatggcacaacacaggtattttccgggctggtaaaatgtgcggactgcggctggtcgctggcctatggtgtgaacagtcaaaacaaaaatccctatgcccactaccattgtagcaagtacgggcaaggattgcaccagtgctccatgcactatatccgctatgatgtgctttacgcctatgtcctttcccgtctgcaatactggtctgtgctggc

SEQ ID NO: 4393 - DNA, 11180 bp, Unknown
  gut microbiota DNA sequence
agctaaggctggttcgactccagtcactcggaccatgggtgagtcctataagggcccacccattttttaataatttgcaaattagttttgaaagtggtacagaaatatactacttttttctttttgctgcctatatgtagaagtctgattttacatgataggtggaaatatgatatactacaaacgacatacaggaaagctgctgccgcagaaaacggcagagtagccaaactgggtccaatggacgcaccattcagagggcaaaacgcactgcgaggaatgtttgaggctggatggctgttggtttcaggaagaaaaagccccgccttgtccgcatcatcctttttgccattgcacactggatcttattccgtacgctgtagtgtttggtaatgtttcagtatacagcgattatggtaaatttgatccctatttatttaacacaaccggtctgcagacacacaataaagaaaaactcttcaaagaatggggatatactgttgacgatgcaagatggctgcaagcagagatagaacggcaagggagggaaagatatctctctgggcaatatgagcttggaaagctaaatatgtttggacaaagaatcaatatcagagtaactattccaaggaaaaatggcttcggcgatatttcttttgtcacaggttagatggtgaaacccaacggacagataaaactgaatacaccatacagaggtaaataatatgacatacatggatcatgtagaagttatcgtcgaaaaagaaatgtacgcaagagatggtgttcataaaggcatgcaagggtggatcactgaaccagaaaacatcaacggatattggttggttaattttcctcagtgcggtgaaaagaatgatattgctacaattcctgtcagagaagaagatgtgaaagtagtaaaaatccttgatgcacatgtgaacgagcgcattaaggtgcaatttggaaaagaagtcgatcagacaaaatcatttgccgaaaagccggatgatctttctgactatcgcatttgataggataaaaaccttttgcctgctgcttccaaatcattgatatgactggatttttccaagtcctatcattacattccgaccaaaccccctctggagcgaactccagagggggtatctttgtttatgcgccgcaatttctgagtttatttcagccccaactcactacgaatctcgtcataatatttccgtaccgtgttcctgtctgtccccaccgccttggcgatggcgctcttgctggtaacctccggatgctcccgcatataggcggcgatgactttcttcttctcactgatcccgtccggaatagcatccaggtttctgctctccttgatggccttggtctccgccttcatctgttcgattagcccaggcaggagcgcctcacactcctcccgtgttttagcgtacacattacgggagtgctttttgccgtccggccacattggggagtagcgtccctcccagcagttttcgctgatctgggtgatacagccggtgccgggcttccgtttccttcctgcatagggctggaatgtggtcatcgtccgcttctcttgcggctccgcaggtaattcctgcggagccgctttccctattttctggtcgattttggccgctgcctcagaccgcatgggatttgtgatgtgggtgtagatgtccagcgtggtggccgccgaaacatggcccggcatggcagagagggtcttcacatccatcccgtttccaagagcgatggtggcaaaggtatgccgtaaatcatggaaacgaatttgcttacactgggcgtgttccaggatgaggtgtagccgcgttctgatgtaggccgggtccagaggcgagtcctccttcaccggcgcggggaacatccaccgggagtttacgctctccttgtactctttcagaatgttcagaagcgtcggaggcaggctgaccgtgcggatggaggatttcgttttgggcttggaaatcaggagcccgtcctcctttgtccggtagacctgcttggtgacttgtagttctccggtctccagattcaggtcatcccattgcagggccagcagttctccccgccgcaggccggtggtcagttccagcaggaacagctcgaagtacccctccgcctttgcgtggatcagaaaccgctggatctcctcacgggtcagcacctgcatctcccgtgctttcttgggcggcagcttgcatccgacggcggggttcatgcggatcagcccctcctgcactgccttctccaaagcggaccggcagttcatgtggcaggcccgcaccatgcggtcggacagccccttgccgtagtgttccgcgtggaggagccgtccgctctttttcagtcgggcgtagaactgctgcaggtcattctgtgtcagctgatccagagggatgtttcccagttccgagataatgtgccgatagatcctgccctcatagcccgaacgggtggtgggtcgaagcttcggcttagagtagttctgataccagaagtccatccactctccgaagggcatttcgagcttaatcttgtctgacttgggtggagcgtactgctcctgcaactgcttcagcttctctacgcattcgctctttgtcttggccaagacattcttggtcttgggaaggttcttttcatcgtagccgatgaccacccggccctcccagctgccgtcttccttttttcgtaccatgccgtcgccggatggcctgcgttttgccatgatgatgtacctcctttgcagcaacacaacatatcccagaaagagagaactatccaggggcacggcgaactgttatcaaaaaagttatcatttggggtagcgaacacagtggcaatcaatcaaaaatttttctgtgataaaccaaaatatatacatttttacaaaaattgaccatcataagcagcgacgagaattctttaaaaaaacaaaagcacgaaaaacactcaaaaataggcataaaggctttgatttctcttgcaataattgaattcttggagaattggagcttgtttgtagcccacttttttactcatctcttgatagtatgtctcaagggcttttttgaatatgctttatagtgcttattctttgtatattgcgtgctaaaaattggtacgcccgttgtcagtcatcatctatgtgttttcctaacagagaacagtttctgggattttatcaattcaagttttagttgataatttccatgtaattaggtatgatggaaaagaaccatccgaccttatggtttgaaagaagcaactaaccatatataaaagtatcacaagcaacttacactgtacgcatgggatcatgcgtgatgtaggcggaagtttttgggagatgcacacgaatcagttaaagataactttatttctatataaaaatggattttgtgtgtggcggaaaccacatctgggggtggatgtggtttctttcttgcggcctttttgcgccttgcgataacctgtctaagtgacaggttatcgcagggcgcttttctatcttcgaaaaggagtccgagaatatgagcctgaaatacacctgcctcggctgtgggacacccttgggttacgagggactgtgctggaaatgcgagtgcgagaaaagccgaaaaaccgcgctgggatggatgccggaacaaattgcagagaagcagaaaaatctgattcagaatatccagcggctggcggatatggaagacccggagtttaccgacttctggcagcttttaggctaccgggatgccattaccccggagatccaacgggcagcactggctgtagagggattctatccctgcgaactctattacggagcaccggatgatgtacgggatgcgctgatcaccgctttactggaaacggatagctcccaaaatgctgccgaactgatgtcctgccttgccttccagggagatgacaaggcaatggagactctgctggaactggagcggaacccccggccctggcgcaagagtctctatgtggatccgtccagctatgcccagtgcggcggctggacctttgataaggatggccatcggacgcagctcaacttcaatacctgctatcctatggtcaagggggcgaccgacgaagcgtctcccgttcgcattggacgggcacgggaggacacctgtccccactgtggcgggcatatggtggatatgctggtgctggatgggcgggatgagcggctgaagtccttggggctggacggtattctgacggccacctgctgtcccaactgcgtgggcttcctgaaaggccccgccttcaaccgctttaccctggacggcggcgtggaggtctttccctcggagctctttgacggggcggaggggataaaatgctatgtccggccagaggactataaggcactcaccgaaaattcttttgtgctggccaaaacacctgtgcccctgttttacggcgctgcctgcgacgatgtgaacaccattggcggctttgccaactgggtgcaggacgcggaatataccatctgcccccactgcggaaagcccatgaagtatctggcccagatccagtgggatacggtgtatgactgtgcggagggaacgctctatgtggagttctgtccggattgccaaatcctatccatgcagcatcagcagacctgagaggagcgcatgcgatgagtttgccaaagcgtgacggcgtgaagggccgctactacctgatccacaagccggatacttctccagaggtgctggcggaggcggatctctgcatccaggatgttctggacggcactgctcgtgaaaatcactccgattacccgaccgtggtgcgaaaccacaacggaacgccctttctccctgatcagctgctggagcggtatctttcccggctgccgctgaagggatttccctgcgaggatgcggtttccctctgcgatgccatgcggcggctggtttgctgggaggagattcgctatgagttggagaagtacatagaaaagcaggtgcaggagcggttcttccttgtgggagagcaggaagatgggtttaccgtctttccgccctgcacggtgtgtccggaattgcgcctggaggatgtggacgaagggctgctgcgctttgcctgctatgtggcagtctgccacaccgtgtatgggcagagttttgagtctctcaaaaccgaacacatcctcggcctggtttcccagctccgtcccgacatggtaaaagaactgaaaaccaatggcagcggcaaattgccgcctaacatccaaacgcggaaaacaaagcacctgaccgcctcggccaatgatgcgtttgccaccgtccgcatcaccgccagggactgcacagaggagtgctatgcggaagtcttggactatctgtgcgcggtgctggagcaggaggaattcccccgcagttactcggtggagctccgtggctcagagaaaaactatctgcccattcctggacttcctaaaaagggagttaatcagttctttgcctgtgctgtccaataccccaaattacacgccgatattgagcggtatgcacggctggccatgcgggagtatgaatggtacaacaacctctccgatgaatcctgcgccatgcccggaaccttcgccgtgtttgctctgggactggaaggagaacagtgggcaccgctcgtgacggagtatctggatctctgcgacgacgagcactcctccctgcaagagaaattccttcatgcctttatccggaagtttggttttcaaccatggacactgggggtattggttcggggcgcattgtctatgcagtggatgaagcctgccaaggaattccgcagtctgattgccaatgcggaaagcctggatgctctactggcagtcaagtgccgcttttccgcttatctcctgtcagaagaaaataaggacccgaaattccgggccatcgcttggcagagcctactctgggccatctggggtccgtcctccgaaaacggtggcagcaaggtcatcaaagcggccccagaagaattgagagagaaataccggcaggtatttgcgtgaggagaacaccatgaaaaaaagaaaagccaaggactttattgccctgtacgccccggaagatgaggaaaagctggtgctgatccaaagcggcaccagcgcggacaagacctttctggatactttctggacggcgcatacccatgccctcgccatggcggatgtccagaccggacaggtgctctccggccgatgctgcctgagctggccgctgacggacaaggaaagggaatccggtgactattccaagcggtttgccaagggcaacatctatcggatcaagacccgcggctggaaaggcgacgccctcagtgaaccccagtggtatgtcacggaggtactggaggaaggtgtatcctgtccggcactggagaagctctgggcggagtacacaaagcccatccttttggaagatgaagtgctggggacactcacgctggatcgtgagatgagcacattcgatggaacctgccagtggatggggaaagaagtccggatctcgttggatgtggagattgaaaagaaagcgtcctggacccgcgtcaccaatgtgatgaagaacctgttggcagatcaggaagtctgggacaagtccctacgggcgatggctgctcagacgctcactgctcaggccaacgaatggctggcagacaatgaccagaccgaccgggccccggagaaagaccccatcacggaggaggagttcgcccggcgcatcctcatcaccgagttcacagtttctccgggcggcggttttaccgcctggtacgaggacgactatatgttctggggccatgtggtcactgtggatgggacactgaaaaaaggccccattagtgcggatatgcagggataaagagaggagaaacctgaatgaacagtgagcagattacagcctttttgcaggagcattggagctgggtgacactgatcatcggcgctgtcctgctgattggtgcgatcatgaactggaactggctctgcgaccccaccggcaagccggactcccaccgctatggccgcggctcccggcgggtgatattcttcttgctggggatcgtgctgattgtgaccagtgttatgtcttggatgttgtaaggaggccgaaacgatgactgaaaaatatcctacctggctcaccggccatgtgaaggagtgggccgagaagcgtctgcccaccgtgacattgtgttccaccaccggcaatgaactgctggaggtgtggtactacggagacttgcttacagtgaagggggagcctcaatcctatattgtagatagtgacgaggcccccggactggtggcggcccgtgacccggagagcggcgaggcgttcattatcttcgacggcgggcggcatggctatgacaatctgttctgtgatgaacatgatccggctgaattggaacaccgcccccttaagcggtatgagatccccgcctccaaactagtgctggagctgggctacagcattgactatgaggatgaaaaagagggtttcgaggcggacgaggcggataccgtggaactgctcagcggcagacggatgccctgggagcaggtcaagcgggatggcattgactacattgcgctttactatgtgaacgaggaaggaaaacaagtacagattttggatgcggagctggcatgagtacagccgttccatcctccgacaatctaaggaggtaccccatgacccaggaagaacagatccgtctctaccggctcatggaaaagctcaactggtttttccaccaggagatgcactatctcgaccgggatattgcggaacagaccgcgcgggagtgttatccggagatccgggagtttacatatgatattttgtggaatgacctgcccaaagaggtgcaggatcaacttgattaggatgaaccctaatgactttgcactggcccaggaggtggagttgcaatgtccataaccgcttataaaatagaatccgttgggcatgaccggaccggcaaggactacggctatgtgaatatcatgtaccgctacggcaacaagcggtcctgtccccagcctgatcaatgcgaaaagatggaagtcatgtgggcggatgagagcgtctatgggccccctgctcccggcagcaaggtgggtgactttatcatgacctggctgatgggcccctggaactgcggggtgtttacccaccgggagatcgcccagcggctgatggataccttcaccggcctgaagatcaaggagctgaagtggttcgagaatcccagagagaagacactgaaaagcggcaagctccgggcgcgccgggccaggtggcttccggagcgggaggtggatctggtgtatctctactccgactactatattgacgcaagagaacctacttctgcccaaactgacttcttcaccgtcacaaggatggacgcctggggcgtgagcacctggttcatgtgtaccccacaggccgccgagaagctgatcgcgatggattttgaaaatctgaccatcaaggcaaccaccattgtgggatagattaaaaaggagtaagccaatgatggctttggaacaactgccccgcaaggtggaaaacccggaactgaagcgcgttctgcggggctacttccacattcgcagccagaaaaagaaagtggcaaagagcattaccgtctatcaggatgctgccgagcgattcggagagtaagctggaatggagggactggcatgatcgggacagatgaaaaccgggcggtgctccatgtggaggtcatcttttggagcggcaaacgaaaggctccccccagcctggtcagcggaaagtatagcccccattttgtagtcgtgggaaccgctgagtatctgggtgtatgcttcctggatggaaccgagtgtgtatttgatgaaccggcattggggaatgcccagcccctctacccagataccgtggactacggcctgctggaacacaatgcggaattcttgatttatgagggggccaattccgttggcaagggccgggtgctgggccgaaccgttccctatcaagtaaagcagcagaggaagtaagtcctatgatcgagggtgggtttgaagaataaggagcaatgccatgatatcaatagactttctgaacaaggtatataaaatcctggactcgcaggaatacaacctctctttttctcccgccaagttcaagaactatatgctgtactgcaacggcaactttatcggcggcctgttcgatgaggaactgtgcttcgtctatgccgacagtgtgagcgaactgctggggcagccggaacccgtctaccgcggctactccggcaccgcccagcacaggatgctggtgatcccggaggaacactgggagaaggcgctgaaactgctctatgccgagaaatttgactggagccgtttggtgtacgacatcacatacaccagcattggcgcggctgtggtggaggacttctacgatgagaatgtggtgttccttcggttctgctttgacaaggaactgttgaaaaagaaccctttggaccagcaaggctgtatccttcggatggtctatctcaatcaggacctgacaaaagcgggcaaatatctgttccccagactgctgcaaaagtttcttgtttttacagatcgcagcgggaaaaccagtctggaaaccatgctgaaacggtggtacaccgcgctggagaagacgtaccgcagtcagacagcgggataaggagggcaacgacatgacagaagaaaacaaaacctacatccgccagctcaaggtcgctgatgtcccgtggcatcggctcaccaccgcctatggccgggggacggattttcccgctcacctgatagtcctggaacagatgcgtgatttggcgtcagtcaaaaagtccctctacgtgttcaccaccaacctggagcaccagggcaccctgtggcacgccacccccttcggcacggtgttcctgaaccggattctggagaaggccctcatggagagcggccagaaccccgtggctcgcttccttgccggggagctgctggacttctttgcctgcatcctccagtgcttccacgatggagatgagatggaacacgcctctcccctcccctgcttctctgatctgctgaaagaagaatacctgtggtcagaggaatacgacgaggaagaagatgagatgcgctacgaggaggacgaggtcttccccgcggacttgttctacagcttctattactactcctggcaggcggtgctggcctaccgaggcgcactcgaacaggaagtttctccggagtttctccccaagattgcggcggttttggaaggactgtaaaggaggttgcgcccatgtttgaggaattctatgggatgtacgagcctaaggagcaggaagtggtcgctctgatcaagcgctgtatcgggggaggatatcacaacaagggagacttttggggaatgaccgttgtaacgctgggcatggtgttctgtgacaccggcaaggccagccccaaagaggagcggctggagtggccggtcaccaacgagaagcgggacggcgaaaggggctggggacgctttcgcaacgagcagatctgccgtctgaagatccgccggatgaaggaagaatgggcgcaaaatctggtggcgcggccctggtgcatctccgaggtggtcagggctcatgaggactgcccggagcttcaggccattctggacgagtaccacaagccggtggtgatccaggacgaagtgctgggtgagctgacgctggataaggactatgatgcctttgagggtgagatccagtggtgcggaaaggatgtacgcctttctctggaggtcaatgctgagagcaagccctcatggacccgcgcccgcaacgccgccaagaggctggttacagatcaggaaacctgggacaaggccatgcgggactttgcggccaaaaacctgactgggcttgccaacaactggctttcccaggatgaggaaagcgcccgtgacccggagacagcccccatcacggaggaggagtttgcccagcgcatcctgctcaccgaggtttccgtttctcccggcggccgttttaccgcctattataacgatgacgat

SEQ ID NO: 4394 - DNA, 156905 bp, Unknown
  gut microbiota DNA sequence
gaaactgttttcccatgaagtgtgaaaaatatatctatgaatagttcgtaattcatttgtttttagtatgtttgtgctattcgtatatatagtatgaaatactaaggaagagaatgttcttaatgaaagtatgaaaagaagagttaaagcattgactgttgttttggcaatatgtcttataactgtttttattcgatgtcagtcgaatgaaactcctattcagcaacttgtagttgttgtgaatggggattctattgagatggtttttgtgaaaggaggtacatttatgatgggatgtacagatgagcagggatgtgactgtgaggataacgagaaaccagcacgtaaggagtcggtatctgatttttacataggaaaatatgaagttactcaaaggctgtggagggcggttatggatactgattccattttgccgtttaatgggggatgcggagattgcccgatggaaaatgtaagctggaaaaatgcgcaggagtttatcggtagattaaatgctatgaccggtaaaacatttcgtcttccgactgaggccgaatgggaatacgcagcgcgtggtggacacaaaagtaagcactataaatacagtggcagcaatcaggtaagtgaggtggcttggtatgttgggaattcctctggcggacaatatggagaagctggaactacccgtccggtaggtctgaaaaaaagcaatgaattgggattgtatgatatgagtggcaatgtttgggagtggtgcggtgatttgtacactaaagaatacaagcaaggtggtaagtctatccatccgggatggccttttgagggtacttatctttttttccgccgaatattgcgaggtggaagttggggaggaacagcagaggggtgtcgggtgtcgtacattgattacgacattgagaattatagtgacgagtatggaggttttcgccttgtgatggagccggaatcgattaaataatgtaattaatgatgataagtgatattttactactttcagagtaatgaatagaaatggtatgagatatatgtggaaattctttttattattgatgttggttgtaacttcgtgttccgaaaagcagattgatggcaatgtaattaatgttgcggaagcaatgagtagattgtcagaaggacaatctgtacaaaatttgttttccagcataagttatattcctttggagactaatgagcaggctattataggaaaatatccggagtgcataattatggatagtgcgatattggtatcttctgtccatcagaatctgaaactttttgaccgtactaacgggaagtatattcgggatattggacacgtaggtactgatccggaaggatatgcaaaggattcatgggggaaagtgagcttttgggctgatgcggttcggagaaccgtttatctattgggatggaataatgatttcctactatatggatttgatgggaaatataaggatagaattcgattgcaagatacagtcaattgtattctgtcccaaaattactatttgatggatgcggacagaatttggggacataataaaatgaaactctctccggagacgccatcagtcttttatatggatagaaatacgatgtcattgaccggtattgctacatggaattcagccctgcttcccatggatgaggttttgtcggtttcaaatttgttggggggcaatgttgcttatggaggtgacttggcaatggcagaatttgttggtgaccggaaatattatacggcaatcaatagcccttcgttatggaaatctaaggatgccatccgagtgaaacaagcttttaatgatactatctatactatttcagagcagggacttactccatatctggtttttgaactgggtgagtggcactggagtgagcagcagcaattggatgtagaaggatgtgataagaaaatagccatagactatattctggagaatgcagaatacatctatttccattttcatacaagcttatatttagaagaaagccagtcatattgtggattttaccataaggaaaagaaaactgttgtttgccaaaagggtgatagcttatttgataaaatgaataatcagcatatccaaatcaggggagtcacttcggatggacatttttttgctttgttacaaccggatgaactcagtgatgataatcaacggagaatgggagtagaagaggaaggtaaccctattatggtcatgctttattaagtacttattccgtcgtcttcccccttgcatccaaataccctcttttaaacatatccacgaacagaaagaatagtgataagagcagtggcccgaagatgacacccatgaatccgaaaagggacaagccaattacaactccgaagacagtgataagcggatgaatgtctgccattttcttctggatgatgaagcgtatcaggttgtcgagctgtgaaatgactgcaccgccatagatggccagcccgatagcttgaacccagttgcctatcaatgccatgtagacagctatcggaaaccataccagcgctgttcctaccattgggatgatgctggcgaagcaggtcaggaaaccggtgaacaagatgttgggagcaccgaaaatccagtagcctatcatggctactcctccttgtatgacggcgagtaaggggatgccgatggcattggagcggacaatcatgttgatttcgtggatgacgttttgtgtattgtcatcattgaacggcagtaggtcgttgacgtactgttccatctttttgccccctatcagcatgaagtagagtacaaagaccagtacgaagatgttgacggcaaaactgctgatacctcccatgatggcttgcccgatgcggggaagaattgaaatgacgtatgccaccgtgtctttccccaagatatagtagccggttttggctttaatgatgttggccgcttcttcgaaaggagctataatggcttgcgggtccagattgatgttttgaagattgaccacagccagccataccaccagcccaagcggaaccagaaagcagagaattgcctctgctgtaatgagggtggcagctatgctgcgcttcattttccgcttgtcggaaagatacatcatctgctttcttaccaggatatagatagtcaaggctcccagcagaccgcccatgaatggggctatttgtctgaaaagaatgattcccagcccgataatgatagctatcaatgaatatttccagtattgttcttttgtgctcataaagttcctgtatttcttagtaaagaaacataaaagaagttgaaaaggtttggaaattgtggccggaattcaatatttatccttcgtccagccagcctaacccctggcgtatgatttccggctccccattggtgcaatccactacggtagagccttccgtaccgccgataccgccgtctattaccaaatcgacaatatcaccgaatttctcgtcaatcagttccgggtctgtgcagtattcaatgtcctcattgtcatcatgcggcaatgtagttgtcatgatgggagcatccagcaggcgggctatttcctgaatgatggaattgtccggcatacggatgccgacctccttacggttacggaatatcttgggcaggcgggtggtgccgttcagaatgaaggtgaaagctccgggcagattacgcttcatcaacttgaaggtgctgttgtccactttggcgtattcgctgaccttgctcaagtcgtagcagatgatggaaagattgttcttcttggggtcgatgtccttgaggcggcagatgcgctcgatggcgcgctccttcagtccgtggcagccgatggcatacatggtgtcggtagggtagataaggatacctccgtcattcagtaggtcgatcacctgctgcaggtcggcgggattgttatttttttcataaagtttcagaagcatggcggaaatggatttgagttttatattacatgcaaaaatagataataatcggcttataaacaagcgattcacctttttagcatctctttctccagtttctttatcttcttccaggcctctttgaatttgggacagagggtgacggctttctcatagtttttcatggctgcctccttcatgtcatgcttcaggcattcgtcacccataaggatgtattcgcgggcatactttacaagggctttctctttctccaatgctgcttgtttcagtgcacggttttcctctttcagacggttgatgatgttcagcttccggcggatgaggcgctgcacgttgggcttctcgatgtcgtagcgggaatggatggctttgaaaaactcatccaggaaagtgccgaaatcccctttgtcgaaggctttggcggcggcaacgtattgaacgtctgcctgtgcttgcttcaaggcacggtcgatggcggtgcggttgttgaagcgttcggagaaactgacaatctccggacgcacgaatacatcggcacggctgatgggctttttcagctggatgccttccagcgaggtgcagcggctgagggctacgtatgcctgcccaccggcaaacacgccgccggtaaagtcgatgactacccggctgaaggtcagcccttggctcttgtggacggtgatggcccatgccaggcgcacgggatattgtgtaaaggtacccagctcttcctcttcaatctgtttcttttcttcgttgtatttgtagcggatgtttcgccacgactctcgtttgacgtcacattccttgccgtcgtcggtgatgacgtagagggtctcttcaatagggtcgaagccgctgatgacgccgatggtgccgttcacccagcggcggtcgaagtcattcttgatgaagatgatttgtgcgcccggtttcagtaccagttcctgcgaggtggggaggctgctttcgggaaagtctcccatgatttcgccgtagaaggtgaccgggtcaccgggaagttccgccagtttcttgtcgttgatgtagtccacattatcacggcgggtggcgagggtgatgtacatgtcggcttccgattgctctatttgggtgccatagcgggtgttgagcagctgaagttcggtagagccgacggtattgttgcggatgtgatccagcacatggatgaacttgctgtctgtttgccggtatactttctgcagttcgatggagacaaggtctatctggccgaataccctggcagagaagaaataaggggtagggtagaatcggttcagtatctcccgttcatctcctttgacgacgggttccaactggaacacatcgcccaccaataatatctgtttgccaccgaagggttcgcgcaggttgcgggaatagacgcgcaggatgcggtctacggcgtcgatgatgtcggcgcgtaccatggaaatctcgtcgatgatgaccaattccagctcttccagcagtttgcggtggggtttggtgtatttgaaaaattcgtggatgcgtccccgttgcagactgaagttcgggtcgtcgggcagcagggggtagaagggcagtttgaagaagctgtgcagggtactgcctccggcattgatggcggctatgccggtcggtgcaagcaccacgtgctttttctttgtattcgcgcagatgtacttcaggaaggtcgatttgcccgtacctgctttgcccgtcaggaatacggactgacgggtatactggatgaggttcaaggcgtcttgaaactctttgttttgggtgtcgggaacgaagctcaaaagatttcagatttatgatggattcccgactatgccgaaatatttcagggcgttggcgataccgtcttcatcaacagaagtggttgtgtagttactggcagctttcacgtcatcattggcattgcccatggctacaccgataccggcatggcgcaacatgctgatgtcatttcctccgtcgccgaaggccatggtttcttccagcttgatgccgaagtggcggataatctggtcgataccgttctgcttggtgtttcctttggctgtcacgtctacgaaggcgggatgccagcggcccatctcgcagtgggggacggcgggcaggatgattgcttcttcctcggcgttgataaagggagtcagctggaagaaggctttgtcggcatggctgtcggtatagggctttgcttcgatggggtccactttgagttggcggtggaagatttcctccactacttcgccgggctggttcacgcagatgtcgtgctctcccaccaggatgcatgggatgttgcgttcgtggcagaaagctgtcaaggcatccacttccgctgtcggtatggggcttttgtagataacggtgtcttctacaaagcaataggcgccgttcatcgtgatgtagccgtctatcagattccgttcctgcaaggcagacaagttgttgatgatgacgcgtggacgtccggtagaaatgaagatatgtatgcctttggctttggcggcagtcaacgcttcaatagtggaaacgggaatttcgtgggtcttgaagctgaccaaggttccgtcgatgtcaaaaaacagagcttttatcataaggggttcttttatcttgtgcgcgaaattacttaaaaaagcgaagatatttcgtacttttgtgcacaaataaatgataaataacaaatgaagaaacattctttgaaagattggatgatagcggtgcgtccgtggtcattccccgcctcttcgatgccggtggtggtgacgttggcatatctgtattggatgcggcaggacataaactgggtgaacggtatctgggcattgttgaacatcattgtgtttcacgctgccgggaatacctggagtgattattttgactataagcataaggtcgatgcaagggatacctttggcgccaagacactgactgatgggatgtttaccccgcgtgagatataccgcttgtcgatggcattgctggcagttgcccttgttgcgggtatcggcttgttgtggcgtaccggcttgccgctgttgtatataggtataggcggtgcagcttgctcgttgctttatccaccgctcaagtatcgtgcgttgggcgatgtcgtcatctttttggcgtatgctttgctgccgacgttgggcacctgctatgtggctacgggagtagttgactggaatgtcttgtggatagctctgccggtgggactgattacggtggccattctgcatgccaataatacacgggatatgcgtaccgatgcccgtgcagagattcagacactggccatgaagctgggaggaaaggcgtcgatgtacgtttattgtgccgaagtcctttttccttttggctggatagccggcttgatagctgcgggaactcttcctttatggaccctgctggtgatgccggcactggttcctgccataggcaatgtacgggtggtgtcccgttttcccggaaagggagaaagtgccatagccggtctggatgagatgactgcaaaactccagttgttgttcagtctgctgttcacgttgtcgttcgttgtagccggtctgctgtcatgaagaagctgatttttaccattctgctggctgccgtgctgtggacggtcatgttttcgccttggacggctcctttcgtgaatttctggtggatgatgaccggttctgcgctcacactgtccgtgtttgccaccttgttcaatcccggctggtggcgggaggtgaagtggagcttgccgaatgtcttgctgggacttggcattgctgttgctttgtggggcgttttctggttgggagacaaggtgtcatcttggatgttcgattttgcccgtccgcaggtggactccatttatgggatgaaagagggagagtctccttggctgctggcagcattgctgctgttgctgatagggccggcggaagagattttctggcgcggctatgtgcaacgcacgctttccaaacgctggaatccgaatgcgggttttgtggtggctactttgatttatgcactggtgcatgccggttcctgcaacttcatgctggtcatggcggctctggtggtgggggcggcatggggggcgctttaccgtttctttccgaaccgctttgccgctattatcttgtctcatgcagtgtgggatgtggcggtatttatatttttcccgatatgattattgtttacaaaaataaggtggcggtaatggattgtatactgagccctattcagtcgtatactgaacctatttcagtatacgactgaatagggctcagtatacgacagaaataggatgtatttatacatgttgataatcagatagttgtaaattctctttcgggcggtataaaaacaagacaaattgatgcgttgaattagtgaaactacaataaaaagacaagcaaatgacttacaattttgatgaagtaatagagcgccgtggtaccgactccgtgaaatgggacggtgtgaagagtgtatggggacgcgatgacctcctccccatgtgggtggcggatatggatttccgcacgcccccgtttgtgatggaagccttgcggaagcgtcttgaacatgaagtgctgggctatacgtctgcgtgtgaggaatggtatacttccatttgtagctggctcagtcgtcgccacggttgggacgtcactcgcgagatgctgacttttgtacccggcattgtccgcggtcaagccttcgcattgcaatgcttcaccaatcccggcgaccgggtaatggtgatgactcccgtttatcatcccttcttcctggtgacgcaacgcatgaagcgcgaagtggtttactctccgctcgacctgaaagatggacagtatcagattgactttgagcgtttccgtaaggatatacaaggatgcaaagtattgattctctgcaatccccataacccgggcgggcgtgtatggacgatggacgaattacgccggattgctgatatttgtatggaaaaccatacgtttgtcatctccgatgaaattcatgccgacttgactctgccgccttacaaacaccatccttttgctactgtttcgggggctgctgcgcagaattccctcaccttcatggcacccagcaaaacattcaatatgccgggattgggaagttcgtacgccattatcctcaatgaggacatccgccaccgttttcaggagttcatggaagcgggcgagttcagcgaagggcatatgctggcctatatcggtgcggctgctgcctatatgcatggtgaggaatggttggaacagctgctggactatataaagggcaatatcgatttcacggagaactacctgcgcgagcatattccgggcatcggcatgatacgtccgcaggcttcttacctgatttatctggactgccggggattggggctgactcaggaggaactggtgagactatttgtggacaaggcacacctggcactgaatgacggcaccatgttcggtgaaccgggtaagggatttatgcggctgaatatcggctgcccgcgttcggtgttggagcaggcgctgaagcaactggaaactgcggttgcagacaaatgatagaaaaaactatatctcctatattatgaatagattacctttccttggactattgtttgcgttgctgtgccttgttgcctgccggcagatgaatgaggcacatctgttacatctggcagaaaaacaggtgaatatgaatgtggacagcgtgtatgccttgctggtacagatagagaggccatcgcaactttcggatgaggagaggctgttgtatggatggctgaatgcttatgtgcactataagcggcacaactcgatggcggaagattccttgatattgcctgcttccgattattacgtcttccgcaacgacacggcgaagaatctgttttcctatcagttgaaagcctggtactggtattggctgaaagagcacgaacggtgtatagctgccattgacagcggcgtagctttggccaaggcgctgcaggacacgggaagaatggctgatatgctgattgataaggcatactggtatgtgtatgtctggaaagattatgagaaagcgatagaaactttccgtaccgccatagctttggacgcaagagccggaagcttcttctctatgggaattgccatggggctgaacaagaatgattctgcatcctattacatggagcgcagcatagaactggcagtggaggcagaagataccagtaagatagtgcattatttgcgtaactatgcccagatgcaggcttactcttttgatgaaccttccggtgcaatagctactattcgtcgtatggagcagtatgtcatcgacccggtgcagttgcgtatgggagatctggtgaaagtggaagtgttcttgaaagaagggctgcttgattcggcggaatactatttgaataaggagaggaaacgtggcgagggccggaaccggtttttgacggaagagaatatggtggcggtatatagggcattgatagattatacacgtcaccgtacgtttgatgtgctggacgtggcgcgctataatgattctgtagccaatgctcttactgcgttgcagagtactgtccggcgtaaggacgagtcgaaggagacgctttcgcaagccaacttgattctgacggtggaacggaagcaggcacaactgaatttgttgctggcactgttggtactggtgcttgcaggtggtggtgtgtccctttatatccgtaaccggcgcaaccggctgattgaagcggaagaacgggcggaaacactgacccggttgctggaagatgcgaccaggaaccagtcgaaaggggaagacgggcagttttttcggaaaatactgttgcagcaattaggcatgatacggctggtggctaaacaacctacctcacagaatcaggagctgcttcgccgcatttcgggtattaccagccatgaactgccggtagagagtttgctggtatgggaggacttgtatcctatcatagaccggatttatgataacttctacacaaagatggacagctgttttggcgatgtgctcattgacaaagaaaagcagctttgctgcctgctctgtgcggacttctcgacgaaggagattagtgtggtgacacaacagagcattcctaccatttaccagcgaaagacgaatatccgcaagaaactggggatgggggagaaggaaggcatcgtagagtttataggcagcatatagaccggaaaaggcataatatagacttttgtaaaattaaagtgttgatatgtagtgatttgtagttttgggatatagactttttattcctcgatatagaccgtttgaggcatgttttacccctacctttgtatcagcgaaatacaaggtgtgaaatattgaaatcaaacgcatgatgaaagaaaaactactgaacaacgttagaaaaagagtgatggtatgggtggccttggcaagtatggcaactctgcttcctgctcagacttaccggctttccggttgtgtgcaggacgagaaccgccaaccggtagaggtggcgaatgtgctgctgaagcaggcaaaagacagtacctatattaccggtatgctgaccgacacacaaggttgtttttcctttgaccagccactgggagaatacttgttgcatattacccttatcggcagcgaagacctctacgttcccgttgtgctgcaaggaaacaaaaacgttggcgaattgacattgaaatcttcttccgccttgctggacgaagtgaccgttacggccgcgcgtcccgttatcaagcgtctggtggatagggtagtgttcgatgcacataataccatagcctctgccggaggcagtgcactcgaccttctgcgtgaagtgcccggtctgcaggttggacaaaacagtattggtattataggtaaagggggtatcaaggtttatatcaacgaccgtgagacgaagctgtcgggagatgaactgatagattacctccgttcctatgacgcctcccagatactgaaggtggaggtgattaccacgcctccgtccaaatatgatgccgccggaaatgcaggcatcatcaatattcgcttgaagtcacgtcccaaagattacgtgggtggtacggcttccgcttcctacagcgctggtgaaaaggacaattacggatatggcggggtaagcctgaacctcagcaaggggcgcgtgtcatccttcctcaacgggggtactacgcagggcaactatgagacgcgtgagaagaattaccgctattttccgcagaacacctggaacagccgtgccgactacaccaattacatgaatagcttctaccttcagggaggtgtggacgtatcgttggaacgggactggactgtaggtatgcaggccatctataatcacagtgctcccaaaccgggcaacgccctttcatggacggaagtttacgatgcctctaccgccgtattggattctttgctgtactccaacagtgacaaggataccagttccgaccgcctcaatctgaattttcataccgataaggtctgggatgacaaaggcaagaaaatgacttgggatgtggattacctgcgtgacaaccgggacgaaaatatgggctttctctcgaaaaccctcctgcctgacggtacggagattccgggcacaaacttcgattacaactatctgcaacatcgcaaggtagatgtagtctcctccgctcttgatttcatccttccttttgaaaagtacaagataacggcaggtgccaaggtctcctttaccaacactcgcaacggtatcaattacgatacatcggaccctacgctggtgcaggatgattatttccgttacaaggagcaaatctatgccttatatgctgattatagccgtgaattttccgaacgtttttccatgcagttgggcttgcgtatggagcacacccgcactaccggtatttccgaagcgaaggatacggaggacaagcacgactatacgcgcttgttccctactgtctatctgctttattcgcctacagacgggcatgcgctgaacttcagtttctccaaccgcatctcccgtccgtcacagaatatggtcaatccttttccgttctatcagaacaaatatacgtatgcctgcggacgtgaggacttgaaacccagctacacttacaatgcagaactgggatatacgttgaagaacaacttcaatgtttccgcttattattcttattcggacgatgtattcttccaggttgtggacttggatgccgaaacgaatgtgacttctttcctttgggagaatttcatgcagacgcatgctttcgggcttaacaattcgtacactttccgtaccaaatggctgcaagcttacgcccagcatggagtgagctatcgccggactacctccagcgctgccaccacctctcccgaggagaaaggatgggcttataacgccagcctgcgcaacactttcttcttcaatgaaaagaagactcttctggccacgttgtccggttcctattcttcccgtcagtatcagggcatctatctgatgagccccacttacagcgtcagtgcaggtatgctttatcggttgttgaacaataagctcagcctcagcctgaatgtcaacaatttgtttgtcagccattccaaattggaaaccatgtccaacgggttgaagataattgccgacaatcagtttgcctttgccagtttccgtatcggtgtatcctatactttcggtggtgatatacgtagtaagggtcagcggaacagtaacgaggatattcagaggaggctataataagaagtttattgcgtgttggcaattggaagaaaatatttatctttgtgatacaagcgattgtaacaacgattaatataaaaccatgatgaaacagaaacttctttaccttttgccactcttcctattgtcgggatgtggacaggttacttacaagaatgcatctctgccggcagaagagcgtgccggacttttgctgaaggaactgacgctcgaagagaaggtgtccttgatgatggacagctccaaaccagtggaacgcctgggcatcaagccctataactggtggaatgaagcgttgcatggagtggcgcgtgccgggctggccacagtgtttccccaaccgattggtatggcggcatccttctcgccggagactgtatacgaggtatttactgctgtttctgatgaggcccgtgccaagaatgcctactatacatcccaggaaagccatgaacgctatcaaggattgacgatgtggacgcctacagtgaatatctatcgcgacccccgctggggaaggggtatagagacttatggggaagacccttatctgaccagccgtatgggtgtgatggttgtaaaaggtttgcagggtacgaacgatggaaaatatgacaagctgcatgcttgtgccaagcactttgccgtacactccggtccggaatggaaccgccatgagtttaatgcggaaaatatcaagccccgtgatttgtatgaaacttatcttcctcctttcgaggctttggtgaaagaaggaaaagtgaaggaggtgatgtgtgcctacaaccgttttgagggcgatccttgctgcggtagcgaccgcctactgatgcagattttgcgcgatgagtggggatttgacggtattgtcctttcggactgtggagctattgccgatttttacagagactatggtcataagacgcatcctgatgcagagtccgcttcggcggctgcggtgctgagtggaactgacttggagtgcggttcgagttacgaggccctggtagaagcggtgaagcagggaaagattgatgaaaaagcagtggatgtagcagtcaagcgtcttttgacggctcgctttgccttgggtgaaatggacgagccggagaaggtgtcctggaccggcattcctttttctgtggtggcttctgccggacacgactctctggcgctcgacatggctcgcaagtcaatgacactgcttatgaacaaggataataccttgccgttgaagcgtggagggctgactgtagccgtgatgggtccgaacgccaatgattctgtgatgcagtggggaaattataacggtatgcctccgcacactgtcaccattctggacggaattagaaaagccttggggactgatgaccggcttatttatgaacaaggctgcggatgggtggagagagctcagatacagagcgtcttcaaccgttgcaagactgccgacgggaaacccggatttactgcacgctactggaataacgtgactcgtgacggtgagccagtcactactgcccaagtgaccactcctttccatttctgtacatccggtgccacggtttttgctccgggtgtgaaccttaccgacttctcggctacctacaacagcgtattcactcccgaccagtcgggagaggtggtctttgacatctatgcttatggctcagggagattgcggataaatggggaggaagtgagaggattctccaatcagcacggtgggcagaagagtgcttatactttgcaggtacaagcaggaaaaacgtatgacgttgaattggattttgaatatttccgtagcgatgcacagttgaactttgaccttggatttaagaatgaagtggatgtgaggaaatctgtggagcgtgtaaaggatgctgatgtcgtggtctttgtgggaggagtctctccgaacctcgaaggcgaggagatgggtgttgagcttcccggattcagaggaggcgaccgtaccgatatagagttgcctgctgtccagcgggaactgattgccgctttgcaccgtgccggtaaaaaggtggtgttggtgaactgttcaggttctcctatcggcttggagccggaaaccgggaggtgtggagctatcctgcaggcatggtatcccggtcaggcaggtggtacggctgtagccgaagtcttgttcggtgattacaatccggcaggacgcttgccggtcaccttctaccgtaatgtgtcacagcttcctgattttgaggattataatatgaccggccggacttaccgttacatgacccaggaaccgcttttccccttcggtcatggattgagctatacctctttctgctatggcgctgtggtgcttggttcggataatataaagtccggtgagaaattgagattgaatgtccccgtaaccaataccggcaaatgtgacggtgaagaggttgtgcaggtctatttgaagaaaaacgatgatgtcgaaggaccgagcaaggcattgcgtgctttcaaacgggtacatatcccggcaggaaagacggtcgatgtagagtttgatttgggcgataaagagttggtgtggtggaatccgcaaagcaataccatgtgcgtttccgaaggcagttatgaacttatggtgggcggtagctcgcagactgctggtttgctgcgccggtcttttgtcattcagccttgatacattgctgacaaagtcgaaaaagaaaattccgcttgaaggtaagtcatgaccctcaagcggaatttttgtgtactggggatacatgttcttaataatccttaatacaatatgttaacttccttgcttctctgttcttatctaattttaattgatatatttgtgatatcattatgatatcaattaaatctatagaatatggaaacaaaagagtgtggtttcagtggtttcaagatgaatggctttttggccttgttccttcatttggtagtgcttacggcagtgataatctttgggtttatcatttctgtgcctaccttgatcctttcggtgtgtctgtgtctgatatggtttattatgtttgccggctatatggagctggagccgaacgaggcgcgtgctatggtgttctttggtaaatataaagggacgttcaaggagaccggctttttctgggtaaaccctttccttaataagaagaagctttcgcttcgtgcacgcaacctggatgtggagccgataaaggtgaacgataagattggtaatcctattcttataggactggtattggtgtggaagctgaaggacacctataaagccatgtttgagattgattcacaaacaatggctgcatccgctccgacagcgggtaatgcgaaccaggtcagtcttggcaatgcggtggccaaccgtatgaatgcgttcgagaatttcgtcatgatacagagtgatgccgctcttcgccaggttgccggtcagtatgcctatgatgataatgaggctgatacggaagagttgacacttcgttcgggcggtgaggaaatcaatgaacagctggagcagaaattgaatgaacgcctggccatggcaggtatggaagtggtggaagcgcgtatcaactatctggcatatgcgcccgaaattgccgctgtgatgctgcgtcgccagcaagcatctgccattattacggcacgcgagaagattgtggaaggggcagtctctatggtaaaaatggcgctccataaactttctgaagaagaaattgttgaactggacgaagacaagaaagcagcaatggtcagcaatctgttggtagtgctttgtgcggacgaggctgcccaaccggtagtcaatacgggaacgttgaaccattgataaaggatacggatgaaagagatgggaggcataggacggtgggctcttatactgctcttgctgggcaatgtatatgggggctttgcacaagatgcgaatactgcgcgcgcgcagcacatttatgaattgtttgtggcagggcaaggtgacagcatccatgcggcattgaaccgggagttgcaggagaaactggctccggcactcttcaatgattctttccggcaagcagagaaaatgtttggtaaatccatatcaaaaggagaatggaagaccgattctgcccagggaattactatctattattccgatgtggaatttgaacgttataatctccgctttctagtggcttttgatgctgacggggcactgaatacaatccggctagtccctgcacctgctgttagcactgcccaaccggtagcctatgataagacaaaaatggatgaaagggatattacgctgggagccgacggctacaagcttcccggaacgttgactttgcccaagagggcagtcggttcggatgtatgcagggttccttgtgttattctggtacatggttccggtcctcacgaccgtgacgagacgataggtcccaacaagcctttccgtgacctggcctggggattggcggaacgcggcattgccgtcgtccgctatgaaaaacggacaaaagcatatggtgcggcttgcgttcctgccggtcgcgaactcgattatgatactgaggccgtggacgatgccgttgccatagtggagcaggtaagggctttgcccgagctggcttctgacagtgtgtatgtgttggggcacagcctgggaggtacattggctccccgtattgccgggcgttcgaaaggtttggcaggtatcattatccttgccggactggcaagaccgcttgaagatgctcttgaggaacagttttattatacctcttctttgacggattcttcagtcaatgtaaaggctcaacttgatgaactgaaacaacagttggtgaatgtcaaaaagcttggtaccgaagagttcgatgaggcaattcccttaccattggggcagccccgctcatattggctgtttgccaacgcttacaaaccggtggaggttgccgctaaactaaagctgcccatatttgttcttcaaggggagagagattatcaagtgactatggaagacttcggtttatggcgttccggtctgttgcgttgtaagaatgcgtacttcaaatcttatccgaaattgaatcacttgttgcaggaaggcagcggcaaggcgactccgtttgagtatagccatgcttcgcccgtcccggcatatgttatggatgacattgcctccttcgtgcggggcaagcagaatactctttgattggtacttggttatatcaaagtaacttcaatcataaatcgtaaattgttaaatagtaaataaatagtggctaaaaaagaaacttcaaccaaaagctttgtcctccgtgtggatgctgcaacgatggatgccattgaaaaatgggcagccgacgagttccgtagtaccaatggacagcttcagtggattatcgctgaagcattgcggaagagtgggcggatgaagaagtccaagaatcctcctccgtctgaagagaaagcaaaggaggattagtgataacagattctaaatcgtagataatatgattaatcttggtccttattccggcaagaaatgccctaatgtccgtttccaacccactgtgcttgaccgtattctggaaggtacggccctgcttatcgtgctcgttacgtggattagcattttaatagttcttttaccatttatcctcctttttcatctttatttgttgttataaatctgccattacctactaatggttactctttctcttcttttcgcaatttttaggtattgttctcctttttaactacctctacctttgctcccaacaaaatttaagataaaagatgagaaaattaactggcttattcgttttatgttttttgctttctgccaatgctttgcaggctgctgaacctgaaaaagttacttctgcagcagagagtacggagatttcaacagacaaagagaaaaaggaaaaagtagcgaatgatggcgacaactacaagaaattccgtttcggtggatacggagaaatggttgcaagttttaaggattatggtattaaccgtttctatggtgcacctgaaggcaatccagacaaacataggaatacaatttctataccccgtttcgtgttggctctggattacaagttcaattccaaatggatactcggtgctgaaatcgagtttgaatccggtggtacgggtactgcttatgaacttgagaatacggaaaacggtgagtatgaaacggaggtggaaaagggtggcgaagtggctatcgagcaattccacattacccgtttaattgttccacaattcaacatacgtgccggtcacatcattgtcccggtaggattgaccaacgcccatcatgaaccaatcaatttctttggaacttatcggccggaaggagagacaaccatccttccttctacgtggcatgaaaacggactcgagttttttggttcttttggaaaaggatatgccagctttgattatcaggccatgatagtggccggtctgaatgccaatggctttgaccgtaacacctggatagcaagtggcaaacaaggcatctttgaagaagacaactttacttcaccgggctatgtggctcgtctggactataagggggttccggggttgcgtataggtgcttcgttctattactgcgctgatgccggttccaattctgacaaagcggatacttattcgtctaccggtaagattccggtaagaatttatacggcagatgcccaataccgtaataaatatgtggttgcccgtgccaatatggtatacggaaatttgggtaattcagcgaagcttagtgaggcaaataccaaattgtcgaataaatctccttacagccgtataacccccattgcaaagaatgtagtcagttatgcagccgaggccggtttgaatatcagcgctttcttcaaaggaaacaggaaagttccggttatctacccctttgcacgttatgaatattataatccgcaagaaaagggagaggccagccagataatggagaaacgttgtcaggtaagcatgtggactgccggattgaattggtatgccttgcctaatctggtggtaaaggctgattacactacccgccaaatcggaacaaacaaggtttttggaactggcaagtataatagtgaaaatgagttttcgatcggtattgcctatatcggttggtttgtcaagaagtagatgaatagtaatcaattaattttatacagatgaagaaaaatttcttttatgcgacagctttggtattagggctggcatttacggctactgcttgtagcgatgatgatgacaacagtacagttaatcctgctgacattgagtataactcggagaatgcggcaagttggcacaactacatgagaaatgtggcggctttgttgaagacagatgccaccaatctttatgattcttggaatacgagttataagggtggggcaagttttgcaacttccttcaaagctcataatggtgcctataacttttcaagtgcctggaactgtatagagcaggttatcgacggttgtgttgaaatctccaatgaggtaggtgagacgaagattggtgatccatataataaatatatggcaaacaatgttatagaggccctctatgctgttgagtcatggtatagctggcattcccgtgatgattataccaataatatttactcaatccgcaatgcctattacggctctttggacggtaaggtgagcgacaagtcaatttcaaaattggtggctggagtcaatgcggagttggatatgaaagtgtcggcagctatcactacggcagcatcggctattcaggctattccccaacctttccgtaataatatcaacagtcaggaaacggtagcggctatcaaggcttgtgaagaactggaaagtgtattggataaggagttgaaaccttatatcagggacaatagcaccattaacagcaatgaagcacttgacccgattgttgaaaattatgtcaatgttgtggttttgcctacctataaggatttgaaggagaagaatagtacgctgtatgacgctgtggtggctcttgccaacaatccctctaacagtgcttttgagacggcatgcaatgcttggataacagcccgtgaaccttgggaggaaagtgaggcgttcctatttgggccggtggatgagctgggacttgacccgaatatggatagttggcctttggaccagaacgccattgtccagattctgaattcccagaaatggggcgatttggaatggagcgagggtgatgatgatgcaaaagttgaatctgctcaaaatgtacgcggattccatactttggaattcctgcttttcaaggatggcaagcctcgtacagttaaataagaattatttataaacaatactcaagaagtaaaggggaggatttggagaatcctgcctttacttctttggcatgtttggatatgccattattaaaaagtagataaagatgatgaatcgtttaatgagatattcatgtcttctcctttgtttgtcggcaggtttgactgcttgtgatgatgatgggattgacgtgttggatatagagattcctgaaggatacgctctgtctgccggaacgtccacaatcttcatgaattcatccaaggcctatgattcaccggcagactgggtgtcgggtgtttacaacagtcgctttaatgatggtgacgggctttacgatgatgtgcgtacgagtagcaatggcatgggaggtggtcttggcccagtctatgcggggtattcttgtggcagttgtcatcgtaatgccggccgtaccaaaccgacgctgtggagtgaaggtggatcgggtagttacgggttttcctcgatgctggtttatataagccgcaagaatggtgcgttttttcaggattatggtcgtgtcctccatgaccaggcaatttatggagtgaaaccggaggggaagctttctgtggagtatacttatgagacttttacctttcccgacggagagaagtatgaactttgcagaccggcttattccatatccgaatggtatgctgacagtataaagcctgaagatatgttctgtacggtgcgtatcccgttgagacatgtcggtatggggcaaatgatggctttggaacctacggagattgaagcgcttgctgcaaaaagtaattatccggagtatggtataagtggccgttgcaattacattaccgaacgtggtgtgagaagcttggggctgtcgggaaataaggctcaacatgcggatttgactgttgaacttggtttttcaagtgatatgggtgttaccaatagccgctatccggaagagatatgcgaggggcagtcccaggtgaatcaaggcagcatgatggggctttcttatgcccagttggatgtttctacagaagatatggaagatgttgacttgtatatgcagagtcttggtgttcctgcacggcgtaatgtgaatgacccgcaggtgataaggggagaacagaatttctataaagccaagtgccatctttgccatgtcaccacgttgcataccaagcctcggggctccgtgctgttgaacggtacccgtttgccatggttgggaagtcagacaattcacccctattcggattttttgctgcatgatatgggctccgaaattatgggagtcggtctgaatgataactatgtaagtgggttggcgcgtggcaatgaatggcgcactactccgctttggggtatcgggcttcaggaaaaggtaaacggacatacctacttcttgcacgatggtcgtgcccgcaatcttgttgaagccataatgtggcatgggggagagggagaagcatcgaaaaatctctttaagaacatgagtaaggatgaccgtgatgccctgattgtatttttaaattcactttagaactaataagctttatataaaaagtaattatgaagaaatttttatatgtcgccatgctggctgttttgcctttgaccgctatggcgcaacatgaggaagatacggagaatggtgtagtgtcattggccggaagagaaggttttaccattgaaacaaagaaaggtgattttgttttcaagccttatctgttggtacaaacgagtgctaatttcaattggtatgatgatgaaggcttggataaggcttataaccaagataatattgccaattcgggtttttccattccttatgccgtacttggctttactggcaaggcttttggaaaagtagctttcaatctgtccatcaatgctgctgcaagtggaggagcgctgttacagcaggcgtggtttgatgtacagctgaaaaaacaatttgcgattcgtgtcggaaagttcaagactccattctcgcatgcctatctgacaactcttggcgaaacactgcttccccagttgccggtttctctgacgtcttctgtaattttgccttattcgttgaatgccgtgacgcctaatatcggtacgggatttgacctgggtgttgaaattcacggtctggtggcagataagttcggttatgaagtcggcttgttcaatggaaccggagcttccgtgaatacagcttcaaagacgatgagtgatgactggcatatcccttcattgctgtatgccggacgtctgacttatatgcccaagggggtgatgccttccacacaaggtaatcctaaccgtttgaacgaggataagatattattcggtctttcgggttctatcaatgtggagagtgaaaatgagagtaccaatgatacccgtgtggggttggaatttgccatgttgaagaacaagctctatctggcggctgaagcttattatatgaatgtaggtttcaccaaacggcaaaagataaatgaatcgtatagctttttaggcggttatgtgcaaggtggttactttgtcgctccccgcctacagcttgccgcacgctacgatatcttcaatcgtaacggtacggatgacgacggtttcctgaatatgcctgctgtaggtatgaattactttttcagaggatgcaacctgaaattgcaggcaatgtatcagtatgtagcccgttggggacacgacacgcagctcgaccgtgataatgataatttaggtctggccactcactctgccacggtgatgcttcaatatacattctaaatgaagtcaggaaaggattcgtctatgaaaaaatacattcttttcttttttctgcccgtgcttcttataggtctgcatgcatgcgatgaggggagaatttatgagaatgccgtagtggccacgggtgaaggacgcacagtgaagatgacaggccggattagtggtgtggataagtggtcgggcgactatagtgtggtagtggcaggatttgatgatgaaagcgattatgccattgtttcaaaggttgttccggtatccgaatcggataatgatgaaatccagttgacaatgtccggcataacggatgaggtgacaacagtcgagctatgtgtaatcaataagttgagaaagcgcattgtcagtttggtggcaatggaatgtactgaaatcgctgatactatacttatggatgcaggaacagttgatgcaagtatgtacaatgccattcaacaaaaaatattcaatgccacttgtacggcttgccatggtcttagcaccactccgggtggtggcttgaatctgctggaaggacatagccatgctgatctggtcaaccgggcttcaacgacggtggacggtaaaatgagggttatgcccggcaatgcgtcagaaagtgtcttgcatctcatattgggtacggacatcagctcggattggcgtatagaccattctcagatgataacctcatctgatatgcagtctttgattggcaactggattgacgatggtgcacagccgtaataatgatgggccttactggtaataccggtacttttttgaacaacaacgactaattgatatttaatatgaaagataaacaacaacaaactaatcaatcggagaataccttaaccgaaatctttaaatatgaggtagaagcgggtgtttcggaatatcatgtaatgattcatgccaccagaccggaagcgacttatgaagaacagctgaatgcggtggtcgacacttactgccaactgcgtgaaagtgaactacaaggtgctgttgccatctttaaacgctactttctaagtgacgccgccaatcaggcagatatgctactggcgctttcggcagaatgttcggattgtgcactctccgtggtagagcagccgccgttgaacggtacaaagatcgcactgtgggtctatctgcagaaaggtgtggaaacacaggtacttcataacggattgttcgaagtgagacatggcgcctaccgtcacctttggggaggcggctctttcaatcgtgcagccaattcggaataccagacccgtctgctgttgaatgactatgtgatgcagctgatggaacagggctgcaagctggctgataattgcatacgtacctggttctttgtacagaacgtggatgtgaattatgccggagtggtgaaggcacgtaatgaggtgtttgttacccaggacttgacggagaagactcattatatttccagtaccggtatcggtggccgtcatgccgacccaaaagtgacggttcagatggatacttatgctgtagatggtttgaaatctgaacaaattcactacctttacgcaccgacacatctgaatcccacatacgaatacggtgtgagtttcgagcgaggtacgtatgtggattatggcgaccgtcgccaggtgtttatttcgggtactgcgagcatcaataataaaggtgaggtggtatatcccggagacattcgcaagcagacggaacgtatgtgggagaatgtggaggctttgttgaaagaggctggctgtacgtttgatgatttaggacagatgattgtttatctgcgggatgttgcagactataccgtggtcaaaggaatgtatgacgagcgttttccggatactccgagagtgtttgtatatgctcccgtatgtcgtccgggttggctgatagagatggaatgtatgggagtcaagtctttagaaaacaaggagtttgctccatattgattttttacttttaattgatagctcttaattgaaaaagtttctcatagctgtttatggttgtttgctgctcttacttgctgcaactacgtttgtagagcagacgtgcagtacggattttgtagaaaagcatgtttatcatacgatttggttctgttgtttgtggggagcccttgctgcgatgactgttgttgtgcttgtaagacagcggttgtggcggtgtctcccgacgttgttgttgcatggctccttcctcgtgattttggcgggagccatgactacgtttctttgtggccggaaaggatatgtgcatcttactgtcggcagtgaggtgaactgctttttggaacaagacggcaggcaggttgtagagttaccgttcaccttacgtctggacagtttccggattgagtactatccgggtacggatgctcctgcagattatatcagctatattcacggtgagacgcccgtctccatgaaccgtattctttcacggcaggggctccgcttttatcagtcttcctttgatgaggatatgcaggggagctggctgacagtgaattatgacccgtgggggatagggattacctatagtggatacctcttgttaggtgtctccatgctctggatgctggtcagccggggtggagagttccgcaggctgctgaggcatccgttgttgaagaagggaggaatgtttgtcctattgttgctgtgtctgggaagtggggtacatgcgcagaagagaagccttccggcactggcacgcaagcaggcggatagtcttgcccgtaagcaggtgatttataatgaccgtgtggttcctttcaatacccttgcgcgcgattttgtactgaaactgacgggaaaattgtcttatggaggcatgacgccggagcaggtgattggcggatggcttctgcgtccggaggtttggcagaatgagccgatgatttatatcaaaaacgaggcactccgtcgcctgcttcatttggagacaccttatgcatgtctggctgatttgttcgacggtgagaagtatcgcttgcagaagttctggaaggggaagcaagaccatcatcagaaaatgacttctctggaaaaggccattgtagaggcggatgaaaaggtgggactgattttgatgctccaaaatggtacattgattcgtcctttgccggaagacgggagtgtggagcctgtttccgatactaaaatacaagccgaattgctgtataaccgtattcctttcagcaaattgctgttcatgttcaaccttacggtggggatgctggctttcttccgtctgctgtatcgcggcctgcgccgttcgtcggcattgtcagactcttccggtaggattgtagcgctctctttctcttcgcgtttggcagatacttttttcccgttttctctttatgcggcgtttctctttcagctcttcgggtatggtctgaggtggtacatcggcgggcgtatcccgttgggtaatggatacgaaacgatgcagttcatggcattgtgtgcgctgttcctggcttgtctgtttcggcggcgcttcccgtttatggtgcctttcggttttttgctgtccggttttgccttactggtgtcctatttgggacagatgaatccccaaatcactcccttgatacccgtgctcgtttctccgtggctcagtacgcatgtgtcgttgataatgatgtcttatgctttgtttgcctttatgatgctgaacggcatactggcattgtgtcttcgccgttcagcccggatgttgatgctgctcagccgattgctgctttatcccgccgttttctttttgggagccggcatttttctgggtgcggtttgggccaatgcttcttgggggcgttattgggcttgggacccgaaggaagtatgggcgctgattacctttatggtttatggagcggcgttccatgcgcgcagcctgcgcattttccgcagtccgttattcttccatatctatatggttgccgcctttctgacagtcctgatgacctatttcggggtgaactacatccttggaggaatgcacagctatgccaatgcctgatttgtgggtggttctacctatttatgatgactgacttgttttattatacctaatttaagtgattgcgtactgtctgccgatgccttatctttgcaacatcagatttgaatgaattagttagtcataattacgtaaccacttttatgaagataaaaggatccccgcttcccgatgtgatatcgtgaagcggggatttgtgtatggcgtgacggatactgtgggtaaggttggataaggatacttgtggggcataaagagtcataggatggggagggatgacataggggatgagctttgtcttcaggcacaagataaaccttaatcaataggcagagggcttttcccgtatggaggagcatacttttgcaagggattcatccggtttttccctataggccgcagcgggtagggaaacggttgccggaagaatcttatagagagtccttgatgtcgctcaattctaccagcttgttgacaatagcgtagatggtgagccctgccggagaatgtatctgcagtttgcgtgcaatgttacggcgatgggtaatgacggtatggatggagaggtagagtttgtcggcgatggctttgttggtcatgcccttcacaacgcaggtgatgatttccttttcgcgctggctcagggtttcttgttcgctgtctttttcttcttcctcctcggtgtgtagcaagtggttgattttggaggcgatgacatctacgtcatcgcacatggcgaagttctcgtcatattccttcaatatgttgttgtcgatgacggagcataccatagcaatgtacttgataccggattttccgtgttctgccttgaaggcgggcaggtcgaaccagccaccgaaagtggggttgatgatgataatgtctgccggatgcatgtgaatgtagttttgcagcgattccggagaagaaacttcaatagggtgtgcattcaagttgggaatacgcttcaaaacagccgtcagaccactccggatgatgaccgaagtttctgcaatgacaatcttcaaagaagtattattgttcatttttcagtttcctttctatttgcgctacggcgggaacaaacatataatcttctacctggcagtgggtggcaaggtcttgttcgcagttgaatatatcgaacaagaccgcattcaggagattgttgttctccttttccgggtagtatttgatgatgatgttcttcagctctttcagtttggtatctatctgattatgtttgctggcaaaagtggcgatgttgtattcgtccgataggttgccttggagtaattgctctacataggtgaatacggcctggttttcatattccatgtggcggcgtacttccttggcatattcatcgaagaacttcaggatgaggtaggctacatcgtttgtactggaacaatcgatggcttcgatgagtttgcggcggatggccggcaggttgaagtcgaggaaatatgtgtgggcacgcttcagataatccataagggcgggaatggaaaaatcactttcattgccgctgtaagagtattgttcttcgctgataaagttggctacggcgaggaatgtagggcaatcgacgccttgtgcttcgcagacgtccttcacgctcttgtctccgaatcctaatgacagtccgaagcggctcatcaccattaataaggagtaattgtcacagatgaggtcgctcatcttgtccgtggagcggtacttatgttgctcattcattgtatgttattgtttttaattctctgattcgtgcgcaaagtaacggcttttatccgagaactgcaatcactattagtaggtattttgcttgtcgggagacggttggagactggtgtttgccgaataaactaaaagctttagttttatttaacgagagaaattagtttttgaactaaataatttagttatttgcagaaaacaaagaatgttatgaaaggattgactgcaaaagaagaagaaatcatgggctttttctgggaaaagggacccttgtttgtgaaggaaatgctggcattctatgaagagccgaaaccacatttcaatactttgtccaccattgtgagaggattggaggataagggattcctgaaccatcatacgtacggcaacacgtatcagtattatgcggtggtcagcgaggaggattttcgcaagcggacactgaagaacgttatcagcaaatatttcaataattcctatctcagcgcagtgtcgtctctggtgaaggaagaggatatatccctggaagaactgaagcagttgatacaagacgtggaaaagggaagggactgagattgttgagactctaataactctggcttatgaaaaacatcggattggtttgtttgctgctggtaagtatttgctgcggattgcaggcaaagaaaatcgtaaaggtaccctatttcatggcatgcaatacgcgtagcattgaagtggagcaagtgacgcttggaaaagatacgacctggctggcggtgaggctttatggcatgcagggcgatagggtcaggattgattcgacagctgtgttgcgggcatccggaaaggattacggatatttgggaaataccggttttgccagggatgaatggacgcatattcccgcttccggtgaaatgactgctgttttgaagtttagtccgcttccgatggatactgagagctttgattttgtagagacaccggacagtgatgaaggatgggtaatttatggtatacagctcaacggagagaaacctcgggtggatattcccgaacgtttgcggaataagaaaccggatgaggttttgccattgcccggaccggaattgaatatgggaaagactgtcataaaggggcagatattggggtataaaccggagtatggagtgacgttacgctactatgactcgccttggttcttcatgtatttcaccggtaaggacttgaagatagcggaggatggcacgttccgttatgagacagaggtgctgttgccgagcggtgctacgctgtggatatcccgttcgaaaatagaattgtttctcgttccgggtggagaactggatgtcacaatcaatctgcctgaaatattctattcgcaaagccgtcttttaagccggaaaagggatggtgtaacggacaactgtgtttggtttgaaggagactatgccggtctgaataccgagttgctgcggttcggtgaaatgaaaagcttatcgggagctgatgatttttatgcagatatttgtgggatgactccgcaggcatataaaaagtatctgttcaggcattatgaagatatgcaaaagaaacttgtaaaaaacaaggatatgagccaggcttgccgtacttatattcgggcaaatctggatatgaatctgttcagccttatctataattacaagagtaaccttagttatgccccgatgctttcgggcaggaagggggtgaaaagggcggacatgacggtggacagtacctcatacttcaaggaaatactgcaactggatattctgcatacccccgaacagaaatattacaattattatacggactttgtgaagaccgctaccggaaatttccgggataagtttgtgcaagaccctctttggccggacatgcttcttgccgggcgtgcttcccgtaatctgagcaagtacatgcctttgactgaggaagagcgtcggacggtggacagcatcgcttctcccgacctcaggcaattgttcctgatgagaaacgggaggattgaagccgaactgaaatcagagttggaagctactaagggaaagaccggatataagattgttgaggtggaaaaggaggtagcggcagacagtttgttgcaggtcattactcgtccttatcgtggcaagatggtactggtggatatgtggaacacctggtgtggtccttgtatgcgggccatgaaaagcctgaaaccgttgaaagaggagctgaaagaggtggtttatctatatattgtcgacgaaacatctcctgaaggaaaatggaaagtaatgataccggatatacccggtattcactgtcgcattagcaatgagcaaagtacggcattggcaaagctgtacgaatatccgggtatcccgacctatttcgtcgtgaaccgtgaaggagatatttcctacaaagcaaccggatttcccggagtggagatgctacggaatgaactgaccaagtaactgtaaatagtaaatcgtaaatccctaaatagtaaataattccatgggtctgttttttgtttatatactcaaatcttctgtttgcctggcgatattctatttgttttatcgcttgttgctggcacgcgagacgtttcatcgtttcaaccgtttttcattgttgggcattttgctgttgtcctgcctattgcctttggtagaggtaagtgtgaagcaggagacggaagtgcaccagacgatgctgacattggagcagttgctgatgatggcagatgcagtgaatgccactgaggccggagcaagggctgaaacggcaacagtcacctggatacaagtggcgctgcttgtctatctggcaggaatcgttttctttgccttccgcaacgtatattcgttggtacggttactgatgttgctgaaatcgggtaaaaaagaggatatcggcagctacttaccgggcaggaaagagcgcgttactttgattgtacacaactgtgacatcgctccgttcagttggatgggatatattgtcatttcacggaaagacttggaggagaacggacgggaaatccttatccacgagcttgcccatatccataaccgccattcctgggacttgctggtggctgatgtctgcattttctttcagtggttcaatccggcatcatggctcctgaagcaggaattgcagaatatccatgagtttgaagcggatgaaacggtgataaaggagggtgtggatgcaaaacagtatcaactattattaataaaaaaagctgtcggcacaaggctctactctatggccaacagctttaatcacagtaaacttaaaaaacgtatcactatgatgttaaaagaaaaatcaagcccgtgggcacgtttgaagtatctttatgtacttccggtagctgccattgcagtgacagcttttgcccgtcccgaagtctccgataaagtggagaagatttcaagcgtcaaagttaacgatttggctgcaattgtagaaacaaaagtggcggaaagtgcaggtgacactacgaagcctgccgatgtgaagtatgtaccggcggaagtccgcaagcagttgaagggaacttcggtcttcgaggtggcagaggagatgccggaatttcccggcggcggaatgagtgctttcatggattatatcaagacgaatatgcgttatccggcatctgccaaagagaacggtacgcagggacgggtcactgtccagtttgtggtggatgaagatggaagcatcaaggactccaaggtgctccgttctgtggataaggatatggatgccgaggcgctgcgattgataaacactatgccgaagtggaagccggggagacagaaggggcagccggtggctgtgaaatttacggtgccggtgatgttcaggctggacgacgacaaacttgaaaaaacttcttctgccaatggtattacagttgaaggatatgcaggtaatgggaaagagccattgtatattgtggatggaaaagaggtgacgccatctgtcatgagtgcattgaatcctgataagatagaacgtgtaacggttttgaaagataaatctgccacggatttatatggagaagagggacagaatggcgttgttctgataaccctgaaacaaggaactccgggtatggttatccgccggggtaatgaggtggcagagaatgctaaagtacagcataagagtagtcttgatttaataaagactgtctatattgatggagaaaaggttgacttgggtactaaaactatcgatgatttaatacctgccgagaatattgagggcattgaggtgaagaaagaggcaggtggaaaaggtgagatttacatcactactaaaaaaactaaagctgtagaaaagaccattgccaaaggcaatatgaaagtggaaggcaaagtggtggatgagcagggtgagcctgttatcggtgcggctgttctgatagaaggtaccactacgggaagcgttaccgatgtcaatggcaattttgtcctttctgtaccttctaaggatgctgtattggttgtttcgtatataggcatggctaccggcaaagtgaaggtgcagcccaagcttacgattacgctgaaaagtgaatagtctctaacaactatgataaggaaaattctctctttgtttctgattctggtagctgtgggggcagggctttgctctgcccagacagccggtaagaaatattatttggtgggcgggcttttcttcgaaggcatgccgcctggtgtgggttcggacaacgtggcggctttcataatacatgaggacggcgcgagacacgaggttacggaactccgcttgcgcaagggcattgtgctgtctgaggaggtgagagaatatgctactcctgccgacgaggtgcctggtgcggaagctttcttgatgagttaccgtggaggaacggggaagaagttgccgataggcggtgccgtacagactttgaagaaggaagaatggataggaaaggcttttccggaattcaaagtgaaagacacagaaggacaggaatggagcaaggccgatgtgacgggacgtcctatggtcttgaacttctggtataccggctgtggtccttgtatccgtgaaatgtcggagctgaacaaatggatagaagtctatcctgatgtaacctatcttgctacgacttttgacagtgctgtacaaataaagaaaattgtagagagccgtcctttcctctttacccagatagccgatgatttgtttttcttcgagacctttcatgtgagtggtatgccggtcactatactggtggataagaaaggcattatccgtcatatagaacaaggtactggaactgcgaaacttcggtatatgcaggataagttgcagaaacttgtcagcgaataattctttcctgatgaataggggataaggatttcagaggatttcttttgccctttcacagattatcatacctttgcgaatataaatctaaggaaggcaaggttatgataaaacatctttttttaatatggggactgcttgcggcactcactgctgagccggttctggcttgtacatctgccgtcgtttctggaaaggttactcctgacggccgtccgttgctatggaaaaaccgtgatacggactatctgcgaaatcatgttgcttatataaaaggggagaagtataacttcattgccgatgtgaatagtgctaactttcctgccttgaaagaggcatggatgggtacaaactccgttggttttgccttgatgaacacccaatcctacaatctggtggaagtgaaagatggggaagaacggggggcagccaacgggaggattatctaccgtgccttggaggtttgtgccacggtggaggatttctgccatttcctcgataccatttccaagcccagcttgatagaggccaattttggcgtaatcgacgctcaaggcgctgccgccatgtttgaggtggattattataaatatacgatgtatgatgccaataatcccaaagatgctccttacggctacattgcccgtaccaacttctcttttgccggtgaagtgaatcggggggcgggttatgtgcgctatatggaggcagaccgggtactgatgagagcttctgcaatggggggaattacgccgcagggtatcttcaatgatctttcacgttcgtttcgcaatggcatgctcgatattgatttgaagagcgggaagtttaatcgcccgcaaggttccggttggtttgtcgaccaggattttattccccgtaacagcacttcttgttccattgtggtgcagggcgtaaaaccgggtgagaaggcggaacttactacgatgtggacaatgctgggatatcctcctacgggtattgccgtgccgctttgggtgaaggatgcggatagacttctgcctccgatggtatgttgggacaaggcgtgtgccgccgctccgctcagtgattggtcactccggctttccaacaatgtcttttgttacaatcaggggatgggaaccaatcgttatctgaattgggaaaaactgtacaatatggagaataatggctatatgcagcagcttgttacggtagaggcagaggtgtttcgccgtacatgcctattgttggacagctggagacagcaaggaagcattgattctcaagaaatgcagaagctttatcaagatgtggaagcacttgtccgaaaggcttatacgcctttgatggaacaatgacagtattccagtatttccccttcctgctccgggtggaaccagtggatttcctcgtctcgtttgaaccaggtcatttgcttacgggaatagatgcgtgagttctgctttatcttttcgatggcaaagggtaatgtccattcaccatccaggtacttgaatatttctttgtagcctactgtatttagggaatttagacttttatgcgggtagaccatgcgcgcttcttccactaaaccctcttccaccatttggtccacccggcagttgatgcgttcataaagctcttcccggttacgtgttaatcctattttgatgatacggaaggggcgttctttcttttgttgagtgcggaaggaagtgtaggcctttcccgtcatgtagcagatttccaaagcatggactacgcgtttgggattcttcaaatctactattttgtaatattccggatccaacagcttaagttccgcacaaagtctttccagaccttctgtttcgtatttgtgcagcatgagctggcgtgtatcggcatctacggtcggaatgtcgtcaattcctttacagactgcatctacatacatcattgagcctccggtcagcagtacggtgttatgctttgtaaacaggtcttccagcagcttcatcacttccgcttcgtattgggcggcactgtaatagtctgtcagcttcagggtaccgacgaagtgatgctgtacccgttgcagttgctccggtgtaggggcagccgtgcctatctttaaatctgcatagagttgtctcgaatcggccgagacgatacaagtatggaaatgttctgccaatcggaggctgagctctgttttgcctactccggtgggaccgataagtacgattagggtgtgcatgcgggtaaaaaaataggcacggattacgcggattacacggaatattcaataacaaccgtgtgtttccgtgtaatccgtgcctaaaagaaatctgtatggtatgtctgtttaatatttctcttcttcaaaggagtttccggcttcgtccaaaccgccgaaaccctctttgtcgaaatcttccatatcgaagtcctggtcgccgtaaaagttttcgtccaaatcaagggaaccgccagcagctgccatctcttcaaaatcaatggtctgcttgggagcttcacctgctttcttggtgcatttggctcctttcatttcctttccggtaatgatttcagaaagctcgatgaagaagcagcgctcagtcatataatcgaatacatagagaagtttctgcttctcgtcttcaaccagttcgctcagctgggtctctttcatcacccaactgtccatttccggattgtcatccatttcttccagcgtaatttctttctctttctcccagtcatcatcgcaaatgaagaaagacgtcatttggtcgttagtgtagcctgccgactttagaatcgcttcatggaagtcataaaaggtagcttccgggtctatctgtatttctctgacaaaatcgtccacctcatcagagatgattgtaaatctgtagatcatgatgatttataatttatgatttctgactttgtgtaaatcatacgtttttcattttcctgcggggataatgccgcgggctgattcacgtataaagtttacgatatagcttatttccggtgtcatttccatttcatcctcgattttcttcaaggcatccgtattgttcagaccgccttgatagataatacgataggcatcatggattttctcaatggtctcgttggagaagccacggcggcgtaaccctaccacattgattcccgcatagcagataggctcgcgtccggcaatgatgtacggtgggatgtccttgctgaaacggcagccgccttgtatcattccataaccgcccacatggcagaattggtgcatcagtacattggcgctgatgatggaataatcgtcgatgacaatttcacccgccatttttgtagagttgccaatgatacagctgttgcctatcagagcatcgtgggccacgtgtacactttccatcaggagattgttgttaccgacgatggttctgcctttggcagctgtaccgcggttgacagttacgttttcacgtatgatattgttgtctccgatttcagcagtgctttcctcccctctgaactttaaatcctggggaatagcaccgataacggctcccgggaaaatggtgtttccattgccgatgcgtgcaccgtacagaatgttgacatttgccataatcttgttgttatcaccgattaccacattcttgtcaatgaaaacaaaaggagcaatctctacgttttccccgattttggcttcgggatgaatatacgctaagggacttatcatattatttacgatttagctatttacgatttacgattgagaatacttgcgatttactgtatatacgattttatccgaatgtgataattctcacgaataatttgaatcgtaaatcgtaaatagtctaatcgtaaattttattatttgttcttaactatttgcgccataaactctgcttcgcagacaactttttcgcctacaaacacatagcctttcatggtagagatgccgcggcgtatgggggccatcagctctacacggaagatgagggtatctccaggtaccactttctggcggaatttcacaccgtcaatcttcatgaagtaggtggagtaacgttccggttcatccactgaattcagaacaagcaaacctcccgtctgtgccattgcctctatctgcaacacaccgggcattacgggttcctgcgggaagtgtccctgaaagaaaggttcgttggaagttacgttcttgacacctacaatgtagttggcacctatttctatgactttgtccaccaattgcatcgggtaacggtgaggcagaagttcgcggatgcggtttacatccataatcggttcgcggttgcagtcgtaggtaggggcttgtatttcgtgcaaacggatttccttgcgcatctggcgggcgaacttattgttgatagtgtgtcccgggcgggtagcgatgatacggcccttgatgggcttgcctatcaaggccaggtcaccgatgacatcaagtaacttgtggcgggcgcattcattgggccacaccaaaggtttgtggttgatatatcccaattgtttggcgtccatatgaggaacacccatcacgtcggccagcttgtcatagttctcctgggacatttcgcgttcgtaaataacaatcgcattgtcaaggtcgccgcccttgataagaccggcttgcagcaacggctcaatttcgcgtacaaacacgaaagtacggcttgcggcgatttcatccttgaacttcgtcatgtcctccagcgttgcaaactggttggggaggatgttggaatcgtatgataccaatacattcaagctgaagttctcgtccggcaacacgatgatggaagagccggttgtttcgtcacggaattcaattttggacttgatgatatagaaatcttttacggcattttgttctacagtgcctacgcgctctatttcgttgacataatattgggcgcttccgtccagaatgggaaattccggtccgtttacctgtatcaagcagttatcgatacccaatgcatagagggctgccataccatgctccactgtgctcacctttactccgtttttggagattacagttccacgggtagtttcggatacgttgtctgcaacggcatcgaaggtaggctgtccttccaagtcgatacgttggattttgtatccatggttatccggagcaggattgaaagtaacggttaggtcaagtcccgtatgaagaccttttccactaagcgaaaagctatcttttagagtcttttgttttaacattggttacttatttaatagttgtttaagttcattcaattctttgcggagctggcgcagttccacttgcatttccggcaaacttctttgtgcgatggatgccttgaaatattgtttcagctccataggaggggtaccgataagttggctaccgtcctttatgctactgggaacaccagactgtgcgccaaggttcactttgttgccaatatgaatatgacctgcaatgcctacctgcccgccgaacatgcaccattctcctatcttggtagaacctgctacacctacttgcgccgccattacggtgtgggagcctatttcatcattgtgtgccacctgaatcaaattatccagtttcacaccgctatgtacgatggtggctcccatagtagcacggtccacacacgtgttggcaccgatttccacatggtcttccaggatagtgatacctatttgcggtattttttcatagccctcggaagtgggggcgaagccgaaaccgtctgcaccgataacgcaaccggagtgcaggatgcagtggtttcctacccggcaatcgtggtagatggtggagttagcgtaaataatacagtcattgcccactttggcaccgctgccaatcgtgacgtgcggatgaatgaccgtattgtctcccacctctgcgtattcgccaatgcaggcaaaaggcgcaatgtaaacatccttgccaattttagctgtctcggcaacaaaggccagagagtcaattcccacccgctttggcttgctttgctcataaagatttagcaatttagcaagactttcatacgcattgtccactttaatcagggtggctttcacttcttgttccggaacaaagtccttgtttaccagaacaatgcttgattgggtttcgtatatgtagggggtatatttggggttggatagaaaggagatggctcccggtattccctcttcgattttcgcaaaggtgtgaacggtagcattctcgtctccaacaatttctccttggataaatgttgcaatttgtttagcagagaactccatgtcttattcttgttagatggtttcaaaacgcaaataacggactttttttttatatttccttgtcctgaggtgaatattttatacttatctatgcaaacgttggtagcataagtagtacttttttactttcttggacagaagagagatattgagcatatccgatgcttcggcaatattcttgatgctgccgtcgttgtagaggatgtcaatactgtcatctgcctcgtcgtacatattcttctcgatgctgggggtagagatgaaatatctcgcttcggagagagggatgttcagttgttcactgatttgcaaagttagttcttttttccgttcctcactaataggttcggtagaaatctcgactttgaagatgtttcggttaatcatgccggcgctcagggtggacaaaaccttgtccgaatggcggctccataccttgagggcagtccagatgtcattatcgtccaactgaatgaaattctccaaacattcgggattgttgtagaatgcctcccggctgatgtcgttgtatagaaagaatttcaaggcgggtgaggcaaagaggtctatgccgcggcttgccagttccttggcgcggagcagggtgctaatcagcattttctcgtaggcaacggaggttttgtgcagatagacttgccagtacatcaggcggcgggcggtgaggaagttctcaatagaatagatgcctttggactctactaccaggtggtcatcctttacatccagcatcttgataatgcgggcggagccaatgttgccttcggtcactccggtatagaagctgtcgcggcgcaggtagtccaggcggtccatatccagttgcccgcttaccagttggtgcaggaagcgcttggggtattcatccttgaaaatttgaatggcgagtgtcaactgtccgttcatttccttgttgatacgttccatcagcatcaaggagatgtcttcgtgggagacgccctgcacgatggtattttccagtacgtgggagaaggggccgtggccgatgtcgtgcatcaggatagcggcttccacagcttcggcttcgctgtcgaagataaagtttcctttggtggcaagttgctggatggcctcactcatcaggtagaaggctcccaaagagtgttggaaccgtgtatgctgcgcaccgggatatacgacagaggacaaccccagttgcttgatacggtttagacgttgcaaaagaggatgtcgtacaacatcgtacaacaacccctttggtatgttgatgaacccgaagacagggtcgttgataatctttctttcgaacattaagcgttagtcgttaatcacttttttcaactcttccgccatctgtgcctgcactttttgggctgcttttcggctggcggcggcgaagttctctgtcttgtccacgtagatgatgccacggctggagttgacaatcaggccgcaagtcttgttcatgccatacttgcagacttcttccagggagccgccttgtgcgcctacgccgggaaccaataggaagtgttcgggaacaatcttgcggatatcttcgaaggcgcggccttgtgtggcgcctactacgtacatcatctgttcgtcactggcccactcctgggatttgcggagcactttttcgaagaggcgttcgccgttggtgtcttccgtcagctggaagtcgtgcgagcctttgttgctggtcaacgcaagcaggattacccatttgccttcgtacgtaaggaacggggtcacactgtcttcgcccatgtagggagctacggttacggaatctatatccagctcttcgaagaaggtacgggcatacatggcagaggtgttcccgatgtcaccgcgtttggcgtcggcgatgatgaattggtcgggatagttctgcttgatgtagtttacggttttctcgaaagctatccagcctttcacgcccatgctctcataaaatgccagattgggcttgtaggcgatgcagaggtcggcagtagcgtcgatgatggctttgttgaaagcgaatatagggtcttcctctttcagaagatgttcgggtattttcttgatgtcggtgtcaagacctacgcaaaggaatgacttcttgcgcttgatgttctcgaataattgctgtttgttcatattattttttagttacgggttacttatcactgccttacagttcgctctctttcagtctttctgcattttccgccacaatcaggtggtcgatgcagtcttggatgtctccgtccatgaaggcggcgagattgtagatggtgtagttgatgcggtggtccgtgatgcgtccttgcggatagttgtaggtgcgtatcttggcggagcggtcgccagtgctgaccatcgtcttacgcttggaggcgatgtcgtcgatgtacttctggtgttccttgtcgtagatgaaggtacgcaagcgcgagagggcgcgttccttgttcttgggctggtcgcgcgtctcggtacattcgatgaggatttcttcgactatgcctgtgttgggattcttccagttgtagcgcaggcgcacgccggattccaccttgttcacgttctgaccgccggcaccaccgcttcggaaggtgtcccacttgatttcaccttcgttgataactacgtcgaactcttcggcttcgggaagcacggctacgctggcagctgaggtgtgtacccgtccttgcgtttctgtggccggtacgcgctgcacgcggtgcacgcccgattcatatttcagtgtgccgtatacattgtcgcccgtcacggagcagacaatttccttgaaaccgccggctgcaccttcgttggcgctggatatctccattctccatcccttggattcgcagtacttggtgtacatgcggaagaggtcgccggcaaagattgccgcttcgtcaccacccgtgccgccacgaatttcgaggatggcattacggccatcctgcgggtcggcggggacgagcagcagctttatctgctcttccagttccggttggcgggtttggcaggcatccagctcttcgcgtgccatttcccgcatttcctggtctgtttcgttggcgataatttctttggcttcttctatgccgcccagtacttgcatgtactctttgcgggcattcatcaggtcgcccagttctttatattctttggtgagcttgacgtaacgcttctggtccgcaatcactgccgggtctgtaatcaaggtcgacacttcttcgaagcgggcgacaagcccttccagcttttcgagtatggtattgttgtctgccatatatttaatacttgaactctccgaattcgctcttgataatcagttctttcttgtcgctttcttccacgcggcctacaatctgtgcatcgatgttgaaactcttcgaaatagcaatcacctcttctgcatgttcgggagagaggtacacttccaggcgatgccccatattgaacaccttgtacatttcgctccagtccgtatcgctctgctccttgatggtcttgaacaacggtggaacggggaagagattgtctttgatgacacggcagttgtctcccacaaagtgcagtaccttggtttgtgcgccgcccgagcagtgtaccataccgtggatttggggacggagcgcatcgagcagtttcttaactaccggtgcgtaggtgcgggtgggggaaagtaccagctttcctgcatccagcggactgtcttcgacactgtctgtcagttttagcttgccactgtataccagttcttcgggtacagccttgtcatagctttcagggtatttctctgccaggtatttggagaatacatcgtggcgtgcgctggtcagtccgttactgcccataccgccattgtattctttctcataagtagcctttccgtaagatgccagacctacaatcacatcgcccggacggatattggcattgtctataacatctgagcgcttcatgcggcaggtcactgtcgagtctacgataatggtacgtacaaggtcgcccacatcggctgtttcgccaccggtggcataaacgcctactcccatttcgcggagttcggcaagcagttcatccgtaccgttgatgatggctgagattacttcgccggggatgagcagtttattacgtccgatggtagaggataccagaatgttgtctaccgcacccacacaaagcaggtcgtcgatgttcataatcagtgcatcttgtgcaatgcctttccacacacccaggtcgccggtttccttccagtacatataggcaagactggacttggtgcctgctccatcggcatgcataatgttgcaatactccgggtcaccgcccaaaatgtcggggataattttgcagaaagcctgcgggaaaatacctttgtcgatattcttgatggcgttgtgcacatcttcctttgatgcgctgacgcctcgcatcatgtatcgttgattactcatgagataataggtttgttcaattgaatgtgcaaagatacatctaatcttctacaacacaaagcgaggcacaaagtttctcgcctttgtgcctcgctatagagttgtgtatttatcagaattgtacctggggagcttgttccgctccttctgccgcttcgaaataagctcgtttctcaaaaccgaagagaccggcaaggatattcttggggaaacggcgaatggctgtattgaagttcttggctgcattgttgaagttggtacgtgctacgttgatacggttttccgtaccttccagctgtgcctgcagttccaggaaattctgatttgctttcaagtccggatagttttctgtgatggcaagcaatttaccgagggcggaagtcaccgcaccttgtgctttctgatattcagccagcttttccggagtaaggtctgccgcatccactttgatttgagtggctttgctgcgggcttctactacaccttccagtgtttccttctcgtgcgtggcatatcctttcacggtattcaccaagttcggaatcaggtcggcacggcgttggtattgggtttctacgttcgaccattgtccgctgacattttcgtccatggttacgagtccgttatagccggttacaccccaaatggcgagaagagctataacaacgataatgataatggttgatttcttcatacttttcatttttaggcctcacctccgattcctctccgatagagagaggggaggaggggaaggcagttattaatcatttaattatattctatgtaaacgttttattttcttccagtatcctcgaaggtgtgtcaaaacggttgatggcacacagatgacacatcctcggcgttagaaccgggaaccggctccaccgccacctcccataccgcctccgaagctaccaccgctgaagcctcctccgccacttccgccgaagagacctccaccaccgaagatgaccggaccacctccgcctcctccccggtaattttcatcgtatgactgctggcggcgcactactttatgtccgcaattgcggcaggtgtaggtcacatcttccgttttcactccattgcggcgtgagatgagtatgctgctgctacgttgcaatttatgttgtccgcagttggggcatttgttggcagcgcgttgggcaaggatgcctataatagatgccactgcgaggaaaccgataagccccagtaggatacctcctacggagaggtcatcctcctcttccgtgtcattcaccatagtgccgtcaagacgtgaacagactgcctttacacccgctaccattccagcatcccaattaccgtctttcagatagggaatcatgtatttggtctgtatacgtttgcagatggcatcaggaaggtccccttctaaaccgtatcccgtataaaactggatgcagcgttggtcggttaccagcagaatgaccaaaccgttgtttttttcttttttccctactccccattcattgagcagctggtgtgagaaatcaaaacagtcttcttgtccgatggacgggacaacggcaactaccgtttcaatgccagtttgctgctccaatgcatagagcatacggtctatattgtcacatgcctccgtggataggattccggctgggttgcacacatagcgtgtcttgtcctgaaggtgtactttaggaatattcttagtggtgtagacttcttgtgcctgcaaggataagagcaggcataagaagaatgttatggaaataaatcgtctcatactaccaatatttgttgcggcgaagataggtaaaatcacatcaatgtatgtattttcctacgaatttctttacatgttcggtgtattcctgcggataatccttgtaagacatagcatgcgtggcaccgggcacaatccataattctttgggttcgggcttggcttcgtagaggggatagaccatccacgtcggcacaaaggtgtcggcatcgccgtggatgaagagcatcggcaaagtacatttctttacttgctccaaagcagaggcttccaggaagtcccatccgtactcttgccggcagagccagtttgctgtatgcagaagagggaaggcgggcaggttgaactgtgctttcagttctccgcgaaactcgtcccatacgcttgtgtagccgcagtcttctacgaaacacttgatgaaaggctgttggtattgaccatgctccacttcgccggataccatcatggtggtggcggctcccatggagataccgtgcactaccatctctgtgctgcgggatgctacgctgtctgtatggcggcgcccgaagagttcgtcggcggtttcggtccattgcagtacgtcaagccggtctttccagcccatctgtgcatggtttccctcgctcatcccgtgcccgtagaggtcgggcagcaagatgttgaagtccatctccttgttgtacagatagcctatcatcagcatgcgcacggcattatctgtatatccgtgtacgatgactgctgtttttggggtggggtgggtggcggcaacgtagagtgcgtgtagcgtctctccatggtcgttctcaatgtagaagtccttcaatgctcctacggtcaccaaactgtctacccacggttgcagttcgggatattgctcgaacatgaagttgtaggattcggcaatgttgcgactgcgtgtgataaggccttcgggtttcagagcatgccccagcatatagtaccctccgcacagtactacggtgcagagggcagccagaccgagaatcgaatattttatggttttcttcattatttattccaaatttcccatgcagcaaaggcttgcagcagtaacatttccagaccgttcttagtgacggctccttgtgcctggcctttcttcatgaaaagggtttcgtttggattatataacaaatcatagagcaaatggttgggagtcagtagttcgtaaggaatattgggacagaaatccactttgggatacatgcctactggggtacagttgacaatcactgtgtactcttgcatgatttccggtgtcagttcttcgtatgtgaggtatttatcctctttcttggcgcgtgatacgaaggtactttttatacccaggttctccagcccgcgatatacggctttcgatgcaccgccggtacccaaaatcagggctttcttgtgttgtggttgcaaaagtggttctatggattgtgtaaatcctatgatgtcggagttgtagccaaccagtttcactttgcctttggaaaggcggataatcttaatgacattgacggcgcctatcttggctgtgtctttgtccagttcgtccaggtaggggatgacttgctccttgtaagggatagtcacattcagtccacagaggttgggattttcctcgataacttccatgaaatcctcgatacgtggaatttcgaaatttacatattctgcatcaatattttctgccttgaatttctcattgaaatatccgatagaaaaggaatgtttcaacgggtaacctattaaaccgtatttctgcataatattttagttattgattgagctatattcgtttgtttatggagtacattattggtcggaagtagttgaggaggtgattaccggttctttgatgataacaaaacctccgaattgcaatccgttatcttttccgttcaaacagaactttctgtcgaatacgggtttattttttgatttccagatcagtttgctagagaaggtgatgacgtcttgagtaccatcgttccagtctattatcactttttcgttatcgaatgtatcgtcgccattgaattctccaaaagtgagaaagtatttgccagtttcaaatttcattgtttgcagaccgttgaagtgtgcaaggtaagctttggtttggcttattggaacgtccttttcatatatttttccattatagattgccttgatcccttgcttggcaatgttgccgggagtttcaggattcaacaaatcattaccttgagcatcttgtactgcgatatgcagttcgataggagcaaaatcccatatcatatcatcacttcccgaatcatcgcaagctgtgaaaccggcaacgcaaaggagggaaataaataataaatagagggtgtgtgtagctttcataaggtctcttttttatataagtttcttctttttatttagttgccacataaagtgtacatatcccgaaagtcagccgcttgaagtgcacttcgctgaagcctgccttgcggattacctcctgcatcacttctccctgcgggaaggcgcgaatactttccggtagataggtgtaggcgctgttgtctttcgaaatacatttaccgagcagggggatgacaactttggagtagatggtgaacaactgtttcatcgggaagcggtctggtgtggagagctccagtatgacgagatgtccgccggtctttagtacgcggcacatctcggacagtcccttgtccagcccttcgaagttgcggatgccgaacgctacggtcacggcgtcgaagctttcgtcggcaaacgagagggaggtgcagtcctcccgggcaaatgaaatcttgtccgagaggtgcgcctgctttactttttcacgtcccacgttcatcatgccttccgagatgtcggtgccaatcaggctatcgggttgcagttcgcggcatgcaaggatggcgaaatcgccggtgccggtagctacgtccataatgcgccgggggcggaaaggacgtaggtacttgattgctttcctacgccagctgcggtcaatacccatggatagagtgtgattcagcttgtcgtaggcaggagcgatgttgtcgaacatttcttccacttgttcgctcttcttgccgtcattaccgtagggcttgatgtgttcttggggatagtccatttactttaaatattcggttacattcttttcaatgcgttcggcaatgttgctggtatcttcctttacaaacttctcgccggtgatgtgttcgtacagttcgatgtaacgttcgctgattgaagtaacgatttcgtcggtcatttccggtacttgctgtccttccttgccttggaagccgttgtccatcagccattctcgtacaaactccttggagagttgcttttgcggttcgccgttggcaaaacgttcttcgtagccttcggagtagaagtagcggctggagtcgggcgtatggatttcgtccatcaggtaaatcttgccgtcgtgcttgccgaattcgtatttggtgtctaccagaatcaatccgcgttccgctgcaatctcggtaccgcgtttgaagagggccatggtgtattgctccaatacggcatattcttcgggtgtggcaagaccttgtgccaggatttcttctttggagatgtcggcatcgtgttcgccaatctcggctttagtggtcggggtgatgatgggttcagggaatttctggttttccttcatcccttcgggcaacttcacgccgcagatttcacgtacaccgctcttgtaggcacgccatgcgctgccacagaggtaaccgcgtacaatcatttctacggggaatccttcacacatcacacctaccgtcaccatcggatcgggtgtagccattttccagttggggcagatgtcggttgtggcatccaggaattttgctgcaatctggttcaacatttgtcctttgaagggaatacctttcggcaatactacgtcaaaggctgagatgcggtcggtagctaccatgaccaacttttcaccattgatgttgtacacatcacgaacttttccgtggtacacgcttttctgtccgggaaagttaaattcagttgctgttaatgctttcatctttgtaatatttacgattttgagaatttactgtttctgttcaatcttactatcggcttgttcggctttgcgtcgttcacgttccgctttcgcttccttgtcgaacttctcgtaggcctccacaatctgagttaccaacttatggcgtacgatgtctttcttgttcagctccacgaaactgatgccttttacgcctttcagaatcttcagtgcctgcaccagaccggaagtctgggaagaaggcaagtcaatctgcgtcatgtctcccgtgacaatcatcttggtgttcattcccatgcgggtgaggaacatcttgatttgctgggtggtcgtgttctgcgcttcatccagaatgacgacggcatcgttcagtgtgcgtccgcgcataaaggcgaggggggcaatctggatgatgttcagctccatatactctttcagcttggcggcaggtatcatgtcctgcagggcgtcatagagtggttgcagatacgggtctatcttgtccttcatgtcgccgggcaggaaaccgagcttttctccggcttctacggcagggcggctgaggatgattttctttatctccttattctttagtgcccgcacggcaagcgcgatggctgtataggtctttcctgaaccggcgggaccgatggcaaacagcatgtcattcttggcaaatgcctctaccagcttcagctggttctcgctgcgcgggataatcggctttccggttacgctgaatacaatgacattgcccgatttttccgcttgcggggcattgcctttgatgatgtctataatgacctcttctttcaaagagttgtattcggcacagtatttctccagcttggtaatgttctcctcgaatgcacacatttcctcctcatcacccaatactttgatgacattgccgcgggcaacgatgcgaagcttgggatacaaggcctttatcagctgcatgttggcgttgtttacgccataaaatattaccgggtcaatatcttcaagaacaatcagtttttctatcattgatatgttttaaagttcaattcgttcttttagtgaaacgttctgcaaatgtagtgaaacgtttggatacttaaacagttccattgggtatttttttgcagtggcttcgggtagattgtcggtaattgttgcacgacgatgccgtttcctttttttgagcatccgatgcgttgccggttcagcgtctgctccttcatgttgaagatgatattggggtcgaagtgctggccgttgacgcgtgtctcgaagtgcagatgctcggtagaggcgcgtccggtgcgtccggtcagtgcgatgggctgtccggctttgactgtgtcgccacaatgtacaaggtttttgaagttgtggctgtatatcgtttccagtccgaagtcatggcgtacgacgacgacattgccgtaggcgctataaggcttggacatccgtactacgccgttgaaggcactccgtatggtgtctttggcgtaggtcttgatgtctatgccactgtggcgtccccgcccccgtccgtaaggggagatgacttttcctccaggcaggggaaaggagtattccgtgtccggaatgtcctccaaaggtagctctatcagttctctttgcgaaaacagtcccggagtggcaacgcggatatggttggtttccatggtggaaaagaccgttttcttcccttgtgccgtggcaccaagggctatgagcaggagagggacaagaatacggattctcatttattcaaaatattgtatagtcccactggtagaggaagcatatttctccaacagttccaatatcatttcggctgcttctttcagaccttcctgcccgttgtagccgttgacaatggcaaggatatggcgggtttcaagtttcatcttggtgcgttcgtggtcgctggtcggggtaccgataccgcctatacggtcgcggtagacgggcagcccttctatgttcagcatgccgcggcctataccctcgaacaattcctcggcacgtcctatgcccagctcaaggtcggtcccttgtatctcgtcggcatcaaatccgccgatagagtggcccgtacgtagggagacaaggttgataaggtctaccaacgtatctatctgatagagttccaatccgcgcagcagtcgccgtctcagtgcttcggccgagggacggtagcggctggggtccttgccgcaacgtttgtaggcttcgcgggtggcggcaatgacgggttggtacttgatgctgtccgtggtttcacgggctcttagctcttgggtgaaagttgcgatttcttgccacaacccttcgcaatatggggtatttgtcacttcggcaaatacggctgcaccgcggaattcggggcaattctgcttgatttctttagaaagtgtgatatgatacattaatgcaatccgtttgaatgggttaacatgattcccgacaatatccttccggatttgatacccatccggcgtgccgagaaaaactcttcatattgggtaaaagtacatatattggctgtctccacttgtgcggaaggtactccgaagtccagtagttgcagtcggttggcagcccataggtcgatatggtatttgtgggtggcgggtttccattcggagatgtaatccatctggaaaccgttcttacggaatgcttcatagacttcgtcgcctacctcgaaggcggaaagggagatgccggggccgatgcaggctatcacttctttgccctctgtgccatagcgggcacgcatcttgtcgagtgtgtggccgaggatgtaattcacagtgccgcgccatccggcatgaacagcggctatcacggcattcttccggtcgtagagcaggatgggaatgcagtctgccgtagagatgcagatgcagcagcccggttcacgggttatcagtgcatcaatgccctgcaacatggagtggcgttcttctgctgttgcatgcagataagttccgtcaatgacaagtgcctttgtcccgtgggtctgaaacgggatgaccagttcttgggggcgttggggcagggaagaacatactatttcctggttgcggcgtacagcttcggcttcgtctcccgtgtaaggtgtacagttgagggaggcatagttaccttggctgcatccaccgtggcgggtggttacaaaacaagaaatgccgggatatgaggcaagcagctcatatcccaacattttcctatcttctgtaagaggaatcattttttatcttcctcccaatcttcttcgtattcaaagtcctcgaggtcctctatgtcctcgtcgtcattgacgtattcatagctgaggtcctcgtcctcaccctcttctttcaattcttcctgcaggtggctgaggtctttggcgcgatgggcaatgctgtccactttgccttctatcttattactttccttgttcagctcttcccaaaggatgtctttcagcgtagagatgcccatgccggagacagcagagatgaatatatgcggaatcccttcgggcagtgtcggctctatctcgtccatcagttcctggtcgagcatgtcgcatttggtgacggcaagcactctctgtttgtccagcatttcggggttgaaagtgcgaagctcgttcaacaggatttcgtattccttacggatgtcgtcactgtcggcaggcaccatgaacagcaacaatgagttgcgctcgatgtggcgcaggaaacgcaatcctaagcctttgccggcactggctccttcgatgatgccgggaatgtccgccatcacaaacgatttgctgtcgcgataggacacgatgcccagattgggttccagcgttgtaaacggataattggcgattttgggcttcgccgcagaaacggatgccagtaaagtggattttcctgcattggggaaacctaccagaccgacgtctgccagcagcttcagttccatgattaccgtcaactcctgcatcggttcgcccggttgtgcaaagcggggagcctggcgtgtggcggttttgaagtgccagttacccagacctccgcgtccgcctttcagcaagatgacttcttgttcgtgctcggtgacgtcgcagatatattcacccgtttcggcgttgtacaccaccgtgccgcagggcacttcaatcaccttgtccgctccgtcttttccgaaactgcggtttttggaaccggattctccgtgacctgccaggatgtggcgatcgtacttcagatggagtagcgtccagtagttgcggttaccccgcaggatgacatggcctcctcgtcctccgtcacctccgtcggggcctccgttgggtatgtatttctcacgccgcatatgcgtagaacctcgtccgccctttccggagcggcaatatatttttacgtagtcaacaaaattcgattcagccatattctgttttattgttatttcactgcgtcaatagccttgcaaacatcggcaaagatttcttccaatacgccgaagccctggatgtgttggtatttgccgtcctgcttgtaccagtcaatcagcggagctgtctgtgagtggtaaaccaccagacgcttcttgattgtctcttcattgtcgtctgcacgtcctgattcttgtccgcgcttgatgaggcgcttcatcagttcttcttcgggcacgtcgaggtcgagcatcacgctgacttcctgtccgcgttcggcgagcatcttctttaatgcttcagcctgggcgattgttctggggaagccgtcgaaaatcacgcctttgctatccttgaagctgtcgaatacgcttgccagaatatcaatcatcaactcatcggggatcaactggccctggtcgatataacctttagcagtcttgcccagttctgtaccgtttttcatttcagcacggagcacgtctccggtagagatgtggttgatgccatacttttctacaatcttttcactttgtgttcccttacctgaaccgggagcaccaaaaattacaatgttcaacatttgcttagttattatttaatgatttactatattatgtctgtatcagtctactacagtataaatgtcgggatagttgcgcccgaagccgtcataatccaacccgtagcccacgatgaagtcgttcggaatattcatggccacatattctatgtttaaatcaactttcagcttatcaggtttcaccagtagggaggcaatatgaatctccctgggaccgcgagtgccgagggtgtccagtaagcgttgcatggtgagtcccgtatctactatgtcctctacaatgaccactgtacggtctgtgaggtcttcattgatgcctattacttccttaattaccccggtagaggatactccttgataagatgccaatttgacaaacgaaatttcgcagggaatcgtgattcgtttcagcaaatcggcggtaaacatgaacgaaccgttcagtacgctgaggaatagaggattctttcctgccaggtcgcggttgatttcgttcgctacacgggttacttctttcagtatgtcctgctccttgatggagactgtgaacatcttgtcttttatttgtatggtatccatagatgggatgtttttagaaagttgccgcaaaaatacgatttttattccactccatgcatcatcttctgtaatttctttgaaagcaggaagaggataagcgatgccgtggcagacatgacgacgaacaccatgaagaaatcgtacatcgtctcaatgcgatagcccagtagcgtctttacctttccggcttcggggtagagcccgctcagcgtgcctgcaaacttattggcagtggcggtggagaggtaccatatccccatcatcagcgaggcgaagcggatgggcgtgagcttgttcaccatggagagtccgatgggcgagaggcagatttcgcccatggtatggatgaagtagagccccgtcagccaaatgagactcaccttgatgcccggctgaacatctttcaccccaaggcagatgacgagatagcccagtgaaagcagtagcaggccgatggcttgcttggtgggcgaggcgggctccatgccccgcttgcccagggcgccccatacgcccggcatgatggcggcaagtatcaccacaaagaaggggttgaaggactgaatccaggaggcgggcatttcccaccccaggatgacgcggtcggtctgctcggaggcgaaaagcgtgagcgaggcgcctgcctgctcgtaggccgcccagaagaaaatgacgaagaaggcgatgatgtagatgacgaagatgcggtcgcgctccgtcttggtgagcgagccttccagcaggatgctgacgggaaacacgatgcaggcggtgaagatgccgatgcttatccaatcgtccccgaagcaccagtagaagaaaccggcaagcgcgatggcgagcagggcgagcagcaggtagttgcgcatggtccgtccgttggcatgggcactcttccgggcggtgttgtctgcctggggccgttccttgcgggcgtcggggatgatgccgaggggcttgccgtcggggccgatgaggtacttgttcttctgggtttcgaagaggacgaccgtcagcacggtgacgatggcggcaatgaggaagccccatcggaagtcgtgagggttgcccgtctcgccaaaatagccgcagaccagcggggcgaggaaggaacccacgttgacacccatatagaagatagtgtaggcggaatccagccgtttgtcgcccggctcgtagagctgccccaccagggaggagacggtgggcttgaagcagccgttgcccaatataaggaaagtcagtccgccgtacatcagccaatgcgaaagctcacgcgcctccagcatcgaggcgctggcaaacatcaggaactggccgactgccatcatcatggccccccagaagacggaacggcggatgccccagtatttgtcggcgatgtagcctccgattaagggcgtcaggtacaccagtccggtgtagctgccgtagatggaggcggcgtgctccttgtcgaaaaggagtgcctgggtgaggaacagaatgaagatggcacgcatgccgtagtagctgaaacgctctgccgtgctggtagcgaagataaggtaaagacctttcgggtgtcgtgatgtactcattgaatatgcttttattgttttggcttttattagatgtcgagggtacaaaattagtcattattttgcgtaagttaatgggtataattagaaacttgccgacaagcctgcgggaacttgccgacaagcctgtacaaacttgtccgtaagcctacgcaaacttaaaacagaacttgtgtttctgtaaataaagcttttgtttgtagaaatagagcttttgtttctaagaataaaggctttgttctaagaatcctttgcattgaagacaacttttccttacggagcagatattttttccccggtgacaaagcaacttgataaaaaacgtcttctctttgtacagttgaaatcaaagccctatctttgctctacgattttaagataatcctattatgaagatatttcctactacaagcatcaagcaactggatgcagataccataaagaatgaaccgattgcctccatcgacctgatggaacgtgcctcacgcgcattggcccgtgccattgccgagcgttgggagccggacacgccgctcaccgtttttgccggaccggggaacaacggtggcgatgcgcttgccctggcgcgactgctggccgggaagggctaccggctcgaggtgtatctcttcaatacgaaagggacgctttcgccggactgcgagacgaacaaggagcggctggccgacgtgccgggcgtggacttccacgaagtgaccactcagtttgtgcctcccgtgctgacggcagaccatgtggtgatagacggcctcttcggcagcggtctgaacaaggctctgagcggcggttttgcagccgtagtgaagtacatcaatgcctcgcccgccacggtggtgtccatcgacatcccgtcgggactgatgggtgaggacaacacctacaacgtacatacgaatatcgtccgtgcccatctgacgctgagcctgcaactgccgaaactggcatttctctttgccgagaacgagccgtatgtgggcgaatggcagttgctggacatcgggctcagcgaggatgccatccatgacatggaaacggacttccgcttgctggagcatgaagacgtgtctgccctgctgaagccgcgcagccggtttgcccataaggggaacttcggccgcgcactgctgatagccggttcgcaggggatggcgggggcctcggtgctggctgcgcgtgcgtgtctgcgttcaggtgtggggctgctgacggtacatgtgccgttctgcaacaacttcattgtgcagacttccgtgcccgaagccatgacggagctggatatcagcgacacctgctttgccgccgctaccgatacggacgattaccaggccgtggcgataggcccgggactgggaaaggcggcggagaccgaggcggctctgctggagcagatagagacatgccagactccgatggtggtggatgctgatgccctgaacttgctgggcgagaagcgtaactatatagggcgtctgcccaaagggagtattctgactccgcaccccaaggagctggagcgtcttgtaggcaaatgccagaattcgtacgagcgcctgatgaaggctcgtgagctggcgaagagcgccggagtgcacatcatcttgaaaggcgcttattctgccattgtcactcctgccgggaaatgttttttcaaccctaccggcaatccgggtatggcaacgggaggcagcggtgatgtgctgaccggagtggtgcttgccttgcttgcccaaggctatgagccggagaaggctgcctgcctggccacgtatgtgcacggactggcgggagatgttgcctgcaagaagcagggggcagtggggatgacggtgggggatatagttgcctgcctgccgctagcgtggaagatgctggaagaataaggagagaagtgtaatttggatggcttgtcatgtcaacagaaataagatattttgaaaacagaaaagattggcggaagtggctggctgacaatttcgatactgccgatggagtctggtttgtgtttcctactaaatcttcaagcgagaaaagtattgtatataatgacgctgttgaagaggccctttgtttcgggtggattgacagcacgataaagtcacttgacaaagaacataaaattcagcgtttcacgcccaggaatcctaaaagtacctattcgcaagccaacaaagaaaggttgaaatggttgctggagcataaaatgatacatcttgaatttgaggataaaatacgaactgtcttgtcggttccttttgtttttccaaatgatataatcgacagattgaaagaggatgaaagaatatggaagaattatcagagtttctctgacccctataaacgtatccgaatcgcatacattgaagcggcgaggaaacgaccggaagaatttgaaaggcgattaaataactttatctgtaaaacgaaagagaacaaaataataatagggtttggcgggattgaaaaatactattaacgctaattcttttccgcttatttctctcttgtcgtaatgtggaagcatccttgcttcaactcgtacttgatgtagcatttatcggctttccgcaggtcacggagcacttccgaaagaaccagttttaaggtatctgcgctgacatcctgcaaaggacgtccatcctcgtcttctattttctgaaagcgcttccaactgacatcgaatgtcgttccgtaaaaatgtgccgagtttggagaagcattgccgttacggcggcgcaggcgttttacgtcgtcttgggtgcggagtacggaagtcacaattatcttgtttggattcagccccttggcggtcagtgaatcaaggaagttgtgtccgatggtgtccagcaggctggcggcgcccggaatgagataagggatggaatgcgtcagtgaatccacggcatagagctcgtttgtcgtgataggttgcagttgctctctcatcttttctgcttcctcgcgggatgaaagtacacgtatgccgatggcttgggctacattgagatgtttctcattcaagtctccgaacgagcgtttgtagctgacaacgccccgaatgttgcgcggttcgttcaacttgagcgacatgtctttcttcttgcagccggcaaaggtgaatgttgcggcagctgcgacaattatcagtataggtaggattctggaagaatatctcatcttataaatgtactatgtctgtgaaaaatctgcgttaatctgtgtaatctgtggtgaaaaccttgcaaagataattcaaaccttcttaagtttgcactatctttgcacacaaaaaagaccgtgcaacgatattttatatacctggcttatgatggcactgcttatcacggctggcaaatccagccgaatggagtgagtgtgcaggagtgtttgatgaaggcgctgagtaccttgctgcgtcgtgaggtggaagtcgtgggagcggggcgtaccgatgccggggtgcatgcctcactgatggtagctcactttgacagtgattctcctctggacactgtttttatgacggataagctgaatcgtctgcttcctcccgatatttccgtataccgcttgcgggccgtgaagtccgatgcacatgcccgctttgatgctacggcgcgtatgtataaatattatgtcactaccgccaagtctcctttcaaccgccaatatcgctgccgtctgttccaaacgccggactttgagcggatgaatgaggctgcccaaaccttgtttgactatacggactttaccagcttcagcaaactccatacggatgtcaaaaccaataattgcaagattatgcatgccgcctggacccgggtagacgatgtgacttgggtattcaccatccaggccgaccggttcctgcggaacatggtacgtgccattgtcggcactctgctcgaagtgggtcgcggaaaactttctgttgaaggtttccgacgcgtcgtcgaacagaaggaccgttgccaggcaggaacttccgttcccggaaatgcattgtttctggtggacgtagcctatccggaaactacttttttagaataaaagagggatgtactacaaaaacgtaggcccctccctttaatttttaattcttaatttttaattgactctatgtggttattacttgctttcctctctgctgccttattgggattttacgatgtcttcaagaagaagtcgcttcgtgacaatgccgtactgccggtgcttttcctgaacacgctgttctcgagcctgatatttcttcctttcattctggtatctgcctttgcgccgtcggtgttgggaggtacgatgtttgatgttcccgtggtggggtgggaggtgcataagttcattattgtcaagtcgtttatcgtgctctcttcctggatattcggttatttcgggatgaagcatctgccgctgaccatcgtgggaccgattaatgcgacgcgtcccgtaatggtgcttgtaggtgccatggttgtgtttggcgaacgcttgaacctttatcaatggattggcgtgctgcttgccatagtgtccttcttcatgctgagccgttcgggcaagaaagagggaatcgacttcaagcataacaaatggattcttttcatcgtgctggctgccgttgccggagctgtcagcgggctgtatgacaaatatctgatgaagcagctcaacccgatgctggtgcagtcgtggtataatgtctaccaagtctttatcatgtgccccatcatcctgctgttgtggtaccccaagcgaaaagaaagtaccccgtttcgttgggactggaccattatctgtatctccattttcctttgtgcggcagactttgtctatttttatgccctgagctatgaggactctatgatttccatcgtttcgatggtgcgtcgtggaagcgttgttgtttccttccttttcggtgcgcttttcttccgtgaaaagaatttaaaaagcaaggctgtcgacctcattttggtgttgattggaatgttcttcctatatttggggagtaaataaacaagagatatatggcagaagacctatatataaatgctggtagcaagacagagaaatatcgcgctttgcttcctcaactgaaaaatctgctggcaggtgaagatgacttgatagccaatctggcgaatgtttcggcggcgctgaaagagactttccatttcttttgggtaggcttctatttggtgaagggtgaagaattggtgttaggacctttccagggaccgatagcttgtacgcgcatcaggaaaggccgtggtgtttgcggcacggcatgggatagagccgagacgttggttgtgcccgatgtggatgcatttcccggacatatagcctgcagctcgctgtcgcgttcggagatcgtggttccgctgaagcgtgaggacggtgaagtgtggggagtattggatattgacagtgacgatttgggcggttttgatgaaacagatgcccgtttccttgaagaaatgattaaaatgttatgataagaaaactgagtgcttttttgattttggctttcatcggatgggggtatttgcaggcccaggaagccaagacgtgttttaagaatatgccggattctatatgtccgttgcttagcgccgtgaaccgtgcggattttatagactttctggaaagtaagatgaaagctgaggtgaccaacagctttggtggtaaatcggaaatgacggaactttctccagactatatacatgtgaagatgacgccccagagttcatggcagatgaagctcttgtctattaacgacagtacgaaggtgatttgtgtggttgctacggtttgtgctccggcttgcgacagccatgtcaagttctatacgacagactggaaggagctggttgcttcgtcctacctgccggcattgcccgttctggatgattttatcgctgaggccgcggatacggtggatgtctatgagtatcaggatgcccgtcgccaggccgacatgctgctgatgaaagcggacctttctgcgaaggatgccacgttggcattcacttttaccacgaccgattacatgggtaaagaagcggcggagaaactgaaaccgtttatccgccgtcctattgtttatacttggaatcaagggaagttcgagaaatcctctacttcactttgattctgtcgaatccctctccatagactccgatgactgcactttgtgatacaaaggcattggggtctatgtcttttatgagccggaaaatgatggtggactcccgcttcttggccagcacgaacagcatttttatctcttttcccgtatagaagcccgaggcgttgatgaccgttgcacctctgtgaggatatacctggatgtgcttggctatctcctcatatttatcgctgataataaagaattgtacggactggcgggcactgttcaccacttggtcgagcacgaagctgcatatgtatagagtaacgtagccatacaccaccttttcccaatcttttagaacaaagtaactggacgagatgatgataaggtcacatatcaacatgactctgcccagcgtgatgtcgcggtacttgttgattacggcggcaatgatgtccgtgccgccagtactgccgttgttggaaaaggcgatgccgatgccgctaccgcagaaggaggcaccgatgacacaagccatgaaaggctggtcgtgcaggaggacaacaccctcggtcagtttctggataatggaaaggaaaaaggtcagggtgaatacggcaaagattgtctttacgctgaacttccatcccaacacacgtagggcaagcaatagaagcagaaaattgatggcgaagtacgtatattggacgggaaatccagtggcaaaatatacgatggatgcaatgcccggtacgccaccggtagtaatatcgttgggaagcaggaagactgtccagccgataccatataagaccatacccagggcaatcatcagataatcccgcagttcgcgcatggtgttctgtcgggagggaacatttactattgttttcattataattttatgtggttgtgaaaatgcggggacaaagatacaaaagatatcatttgtttgtttgagtataagattgatatttatattttgatgttactatgagttttaacatacaatagcttgctttgataaaataattatctatattcgcttttataattaacggtgattattgacttagatgactatgaaaccactttaccaagatctgccattcccaatagacagtcatatacattattatatagaagacttgccgcacttcattgtaccttggcattatcatccggccatagagataatgtatataactagaggtataggaacccgttttgttggggattgcatagaacagtatgaggagggggatgtatgtatgattggccctaatctccctcatgaatggcgtaatgatgatgcttattttgataaggagtctggtttgcgtgctacgtgtatctgtctgttctttaaacgtgagatatttgatccgaattttatcagattaccagaaatgaataatattcgtgatttgatagagagatcacggcgtggactgaagtttaccggaaaatcgaaattagagataacccggtttataaggagttcggtgaatgatgtaggggttcggaaggtaacgaatcttttaacacttcttgagctgatggccacatcgactgagtatgagttactggcctcagtgggatttacgaattctgtaaattcagaagattttgagagatttaataaggtatacaagtttctcgtcaagaactttgcgacttccattaggttggaagaagtttcgactttggttggattgaccccgacagctttttgccgttatttcaaggagaggaccaagaaaacctttgtagaatatctgaacgaaatgcgtatcggttattcgaaaaaactattactggaaaacaaaatgaagatttctactatcagtggggaagtcggattccctaacttatctaattttatatcccaatttaaaaaagtgacaggaatgtccccgtcgcagttccaaaagcagtttggagtaaaggctaaacaagccatttgattctactattttatcattgaatatttggtggttagagccttggttttctactttttttgcaaggttttatccatttgctgcgaataatggtaaaataccataattatcggaaaatatagaggaaagagcgagttccatatcagcgtacttttgcaatataagattttaaaagtatgatgctgatgaatgataagagaacaaatgagtcgcctttgctctttataaaggattctttgatcggtgaaaatgtgaagaggagtttgaagactttggctgatttacgaggtgtttttcataattgtgaggcttatgaacagatgtctcctgatactttattgtatgaggtgacttgtcatctgccggttgaagaaggaacgccagggggactctatttcggaatcacgagaatttatccaggtaaggttggtgatgagtatttcatgaccaaaggacattttcatgccaatatgaatcgtggggagtactattggggagtggaaggtgaaggcagattgattatgatggatcagaaccgaagggtttggagtgagcggatgtttccgggtagtcttcattatatacctggaggggtggcccatcgtgtggcaaatataggatattctgttctgtcattcgctgcttgttggccttcggacgcaggacatgattatcaagtgattttggagaacgggttttctgcatctttacagtgtgtgaatggcaatccccaattgatagaaatatgaatatgaagtatatcatagctgtagatttgggaggaaccattacaaaagtcagtctcttacgcaatggagaactggtagactatgtaaaaatgccttctcgtcaagatttggatatgacagcaagtttgccggagattgaaaatgcaattgatttcctgctaaattcaaatggtgtgaagcgcctctttggagtgggtatagcttttccagggctagtaaataataaaaaaagcattattatatctacgaatgaaaaatatgatgatggagtggagcttgatttggatagatgggcggatgaacattggggagcccccttttacattgataatgacgcacggcttgcagcaattggagaatggcaatatgggagcggcagaggatatgatagcgttgttatgatgactattggtacgggcataggatcgggagtcattatgaatggtgaggtaatgtatggaaagcactttcaagcaggttcgttgggtggccattttgtagtagactacaaaggaaggttatgctcttgtggaaacaaggggtgtgtggaggctttgtcctcttcattcttccttcataaaattataaaggatcatgcttgcctgtctccttcgtttaaaatgtcatctcagaattatgattttaaagaaatcttccaattggcggaacaaggaaatagagacgcgttattggtacgaaatgaatgcattgaaatatggggagctgctgttataaattttattcatgcttatgatcctgaagtggtgatacttggagggggaatcatgaatagccataaagtgatagtgccttatatcgaggaacgggtgtcaaagtttgcctggactccgagtgcaaaagtatctgtggtagtttctagcttgggagattatgcagctttgtatggtttggaatattgtttaagaaaaaagataaaagatgaagtattctgctaattacgataaatatccttttgtgcaggtgtcctataattcggatgactgtatttccggttggtttgccattaccgatagtatcagtgaacgtttgaaggtactggagaagccgttgaaagtggttgtgattgagtgctatcaaggagtgtttgagaatgatatacgtaatgcttttgccggtaggttcaataatgctttatttgttcatacagatagtgcgatgttgccggaagagaaaatcaatgattttttctatcctgatattaccgatgatgaattattcggctatctgacccggtatacaatggaatgtttttttgatttcgataaagttactggtatccggcaacagatagaagatttgcagtctggtattgtaatagtctatggggttggtgcggcctatctttgtgaacatcctgatttgttgatttatgccgatatggcaagatgggagatacagtccagattccgtaaaaatgaaatatcaaatataggtgtcaacaataaagaagaacgaacctccttgcagtataaaagagcttttttcgtagattggagaatatgcgataggcacaaaaagatgctgatggcaaaggtggattatgttttggatacgaaccggcgcaatcatcctaagatgattacaggcaaagcgatgtttgagggattggagaaagcggtaaatggtccgtttcgtgtagttcccttttttgatccggggccttggggaggacagtggatgaaagatgtttgcgatttagaacggacgatgcctaattatgcttggtgttttgactgtgtacctgaagaaaacagtctgttgttggcctttggggatgagaaagtggaaataccgtcaattgatttgatttttgcttatccccgacagttattgggtgatgctgtgtatggcaggtttggtgatgagtttccaatacggtttgactttcttgatacgatagaaggcggcaatctaagcttacaagttcatcctttgactgaatatatacaacagaaatttgggatgcattatacgcaggatgagagctactatattttggatgctaaggagggggcaactgtatatttgggtttgaaggataatattaaaccggaggagatgcttgatgaattggaaaaatcgcaaaggactggtgaatttgaagtggagaagtatgtaggtatttatccggcaaagaagcatgatcattttttaattccggctggtacggtacattgttcgggaaggaatagcatggtacttgagattagtgcaaccccatacatctttacatttaagttgtgggattggggacggatgggactggatggcagaccgcgtccgattaatatagctcatggggctaatgtgatacaatggaatagaacggagtcttgggtgaaagaagaactgataaacaaggtctctgttattggtgaaggagattcttggcgtgaagaaaagacgggacttcatgaatgggaatttatagaaacaagaagacattggttcacggacaaagttttgcataagaatgagtcgggtgttaatgttctgaatctgattgagggacgttcggtgatagtggaaagtcctataggacaattttctccgtttgttgtccattatgcggaaacttttattattcctgctgccataaaggaatatacaataaaaccttatggggagtctgaaggaatggaatgtggaacaattaaagcttttgtaagacatcatgcataaagataattttgataaggggattgatatagggataacagaaaatccgttaggttttatttatggtaaggacgtttttggcccgacagtagaaaaccggtggttggatgatatccggtctagtttgttggatccgaaatgtgaaggaccggatattgtctattctatagctatggatgtgggtaagactgttcataaagcgcttttgcaaaaacagcatttgctttttggagtagtggcttatgccaaaggaagtttgggaatggaacccattcgcagtcagggacatattcataaggtctcaccttttagtcaatggtccactccagaggtttatgagatatggaatggagaggcggtcatttacatgcaagagtcggctacagatgaaccggggaggtgttatgctgtttatgcacagcctggcgatgtggtggtggtccctccatattgggtacatgctaccattagtacgaatgcagatgaatctcttgtgtttggtgcatggtgtgaccgtgaatatggttttgaatatgctgagattcgtcgtcataaaggtattgcatggtatcctgtttttgagggtgatggattgaagtggatcagaaatacaaactatcatttttcggaactggtaagaaaggctccaagagagtatcatgatttaggtattgggaaaggtaaatccatttataaaatttttgaagatgctccggatactttcttatatgttccgaatccgtcagtgaaaaaggaagtttggataagttttgaaccctaaaatataagtttaatatgaaaaacagacatataatatttttaatagctacagttgtagcaacaggaggattgcttttcggctttgatactggggtaatttcaggagcgattccatttcttcagtcagattggggaatagataataatgatgttgaatggattacggcggctggtttgttgggagctatgttgggggctgtatgttgtgggcgtttatctgatatatttggaagaagaaaaatcatattggtttctgctgtgatatttgcagtgggagcgttatggtcaggactggcaacggatttgacgagcttggttttttctcgtctgtttcttggtatagctataggtgtggcatcatttactgttccattgtatatagcagaaattgctccagctaaatccaggggacgtctggtttcaatgtttcagttaatggttacaataggtattttactttcatacatgtcagataccttttgggctgatgaaaacaagttggattgttggagatggatgttttgggcaggtgtcgtaccggctttggtattactggtaggtatgtgttttgtgcctgaaacacctcggtggctgttgagtaaaggacggttgaaagaatgtaggaaagtgttgcagaaaatagaaccggaaaatacagtaaatgatttaattggacaaatggaggtggaaatagagaaagataggaatagtgcggtaggatggcgatatttgatgcagccttggttgagaactcctctaatgattgctgtttgtattatgttttttcaacagtttgtaggtattaacacagttatttattatagtccgaagattttcctgatggcaggatttgaaagtacactctctgctatttgggcttctgtaggtattggaattgtaaatgttgtatttacagtgatttctctttatttagtggatagaatcggacgacgaaagttgtattttattggtctgtcaggaattgccttttctgttttgtgccttagtgcttgttttatttatgctaatcagttgggcgaaatcggaaggtggttaatggtcatttttatgtttggatatgttgcattttttgcaattagtattggacctttgggatggttggtcatttccgagatatttccgcagaaagtacggggattggggacttcgataggttcattggctgtatggatatttaattgcattgtctcctttactttctttaagattatagattttttttctataccaggtaccgaaattgttgttggacaaacgacttctgagaatccggcaggtgcattttttctttatggatttattgccgtgttgggtttggtatgggggtatttattcttgccggagacaaaagggttatcattggaggagattgaacagaaatggagaaaaaatagagaatgttgaaggaataaatcattaaaaaaatgatatatgaaaaatggattttattttttaggtctatgtatctgcttgtgtttatgggcttcttgctccagtatggaagaagtacgtgattataatgaaaaatatacgggagagtatacgagcaggattgctttccctattgggggattggggacgggaatgttttgtgtagaaggtagtggtgcaatttctaatatgaatattaggcataaaactgagatgttgaatgaaccgacaatgtttgccggattatatttgaaaggggtagataatggtagtattgttgtggaaggacaagtaccggattggaaaaaatttggccaaccacagtcaacaaaaggatacggcggcacgtggggattacctcgatttaaagattgtgattttgaagtaaaattcccttttgccaaattgagaatgagtgacgatgaactgaagatggacgtgacaatgaaggtttggaatccatttattcctacagatgaaaataactcagggcttccagttgctggttttgaatatacgtttaaaaataaatatgctaaagaagtagaagccatattttcttataattcaaagaactttgtagatattcgtaatggaggagcatctattaggccaattgaaaatggttttataatatcacagaaaggaacagaaacgcagccgtttcatcaggctgattttgcaatctttacagatgaaccggaaactaaggttaattattgttggtttagaggatggtcttttgactcattcacgatgtgctggaatgagatgagcagtggggtaattaaagaaaatcctgctaatatggcggatgctcccggagcttccttgtatgtaccgtttagattgcaaccgggagagtcaaagacaatccgtttatatatggcatggtacgttcctttctcattagttcgtgagggattggaaccgattgatgatgtagatgtacctatcgtacctgtagttaatgaaagaggagagcccgcaggctatattgatacttccattcagttgtccgataaataccgtccctggtatagcagtagatttgcaaatatagaggaagtcgcagactattggatgaaaaattataatacgttgaaagaaaaaacagagctgtttactgatgcattttatgctacaactttgcctgctgaagttgttgaagctgttgctgctaatcttactatattaaaatcacctacgatttttcggcaatacgatggtcggatgtggaattgggaaggttgcggtaatgaatatggctcttgctatggttcttgtacacatgtttggaattatgctcaagctatacctcatttgtttcctaaaatggaaagaacactgagggaaacggaattttttgttagtcaagctaagaatgggcaccaagcatttcgctctgcacttcctatccgacccatcagacataattttcatgcagcagctgatgggcagttaggtggtattatgaaagtataccgtgattggcatatatatggtaatgacgaatggttgaagttgatttattcatacgtacagaatagtcttgattattgcattaatacgtgggatcctaaaaggaaaggtgttatagaggaacctcatcataatacttatgacattgaattttgggggcctagtggtatgattaatagttactatactggcgcattacaagcatttgttgctatgggtgaacatttggagaaagatatgacagaatatagagagttgctagataagagtattgactacatggaaaatcaattgtacgacggtgaatattttattcaaaatattcgttggaaggagttgcaggcttctgatccgacgaaagtacagtctgtcaattctaattattcgaaagagggtttggatttattggaaaaggaagggccgaaatatcaatacggaaaaggctgtttatctgatggagtagtaggagcatggctttctttggtctgtggactggacgaggctatagatagaaagaaaatattaagtcatttattgtctgttcataaatataatttaaagaggaatctcagaaaacatgtaaatcctcagcgctcgacttttgctttaggtgatgaaggaggcttattattatgttcatggcccaaaggaggaaagttacaacttccttttgtttactccaatgaggtatggacaggtattgaatatcaagtggcttctcatttgatgtttgaaggtgaggttgagaaaggacttgatattgtccgtacttgtcgtgatcggtatgatggaagagtacgtaacccatttaatgaatatgaatgtggggcatggtatgcccgtgcaatgtctagttatgctatgctccaagctttgactggaatacagtatgatgcagtggattctactttatatattgattcaaggataggtgatgattttacgtcttttttgtcgacggaaacaggttttggtaatgttggtctaaaagatggtaaacctttcattgaggtgaaatatgggaagattgatgtgaaaaagtgctttgtttctgacatagaaacagattttgttaattgatagagaaaggaggaataatggaaataagaagaaagtaattatacagtggtgaatctaataatagtttgaaacacaaataatcaaaaaaaatgaaaacaatagacattaaatctaatagcaggatattacattgggcattttatattttcctttttactgttttgagtgtgggaagtgtatatgcatcggaagatactccgtctgtattatccactaatcaatcagaaaagaaaacagtaaaaggaaatgtgatggatgaatatggacaaccattggtgggggtagctgtacaagttaaaggaacttcattaggtgttgttactgatttggatggaaattttagttttagtattccagttgatagtcgtgccttgttattttcttatttgggaatgaaaactcaagaggtatctgccaataagagtaactataaaatagtgatggtagaggatgccacccaaatggaggaagttgtagtcattgggtatggttctcagtctcgtgagaagattacgacatctgtgaccaagcttgataaagaggctttgaagaatgtaccctatgcaaatgcagcttcagccttacaaggtacagtgtctggtgtacgtgtgcaaagtatttcagggcaaccaggtgcagaacctcgtattatagtccgtggtggtacttccattaataatcctaatggtgctactccactatatattattgatggtgttatgagggcgaatatggttcatatagcttcggaagatattgaatccatccaaattctgaaagatgctgctgctacttctatttatggagcccaaggttcaaatggtgttgtaattgttactactaaaaaggggaaggccggtaaaaccagagttgaatatagatataatctgacaatttctgatattggtaaaaaatatgaatttgccaatgctgaagaatttttgacccttatgaggaaaggtatgatttcaccagcgaaatttggaaaagctaccgaacaaagattgataggacatttaggttatggaacaggaaatgatctgactaataatactgccttctctactcaatacttgactgatgagaatcgctataaattagatcaagggtggaaatcaatgccagatccagtagatccgagtaagacattgttatactcagatactgattttcaggataaaatttatcgtactggtttttctcataatcaccatattgaagtttcaggtggaacggaaaaggctacctttaatatgggattagggtatatgactaatgaaggaactgttattacaacttcatataaacggtataattttagtttgaatggttctttgcaagcacgggataatttgaaaatttcagctagaactacttattcaaactcgtttacgtatggttctccattagctgcagatgcaacattctatcgttcaccggctgcctcacctaccactaaattcagatttgaagatggtagtctggctccaggagctgcccagtatctgggaaatgctgtatatcatatgaacaaggcacaaagagagtatgactatcagaatttatcaataggagtagatgcagattggactatattgccaggattgtctttcaaaccagctctttctttatttgaagtgaacagtaataactatactttttgggatgctttttggaatggaccgagagattatataactacaagaaatgcaaatgctgatacttacaaatggcggcaatatcaggcagatgctgtattcaactatgttaaatctttcaatgaaaaacacaatttgaatgtaacagctggttatgcttattattttaggaaagaggcccgtttagcagctgctggtagaggtgcttctactgatttgattcctactttgaatgcctcaagtgttcctgtaagtgtgagtagttctattacagagcgatctatgcaaggtatttttgctcgtatagggtatgattataaggataaatatttgatttctgtatctgcaagatatgacggtgcttccaatttgggtacgaacaacaaatggggattttttcctggcgtgtcattagggtggcatgtggataaagaaaagttctggtcatttatgcctgagaatctaatgcgtctgaaattgcgtgccagctatggagtaaatggtaatatttcaggcttgggggattatacggctcaaggtagttatagtgtaggatctaaatatttaggtaatgcaggtatcactatgggaactatggcaaatcaagacttgagttgggaggagtctaagacatttgatatcggtactgatatttccttttttaataatcggttaaactttatctttgattatttcaatcgtaccacagataatttgctgacaaatcgcactttacctcattctacaggctttggctctattttcactaatttagggcgtttacaaaatagaggtattgagttggaaatgaatgcaagaatattaccggtatccagttctattcaatggtcattaggttttaatgcctcgaaggtgaccaataaaatattgaagctgccagataatggggttgaaaataatcggattggtggtgagtacatttgggatgctaaactgggtaaacatacttggcaaggtggtttacaggaaggaggacgaattggagatttgtttgcctataagatgataggtgtatattctactgatgaggaagcacagaatgctaatgagccgatagataatgttattacagtccctgataaaaccaaatatggtggtgatgcaaagtggcaagatactgatggtaatggtgtgattgacagtaaagaccgtgtatatgttggtaatatttatccggattggactgggggtattaatacttctctatcttataaagggttcgatttgtattgcagacttgattttacattgggtcataccatatataattttgccaaaggctttttggattataattggcagggtgataataatatgacgaaagatgtcgtaaatcgctcctggaaagaacaaggtgacaaagcggacatgccgagattctattggcatggtgatcgtggacagcagaatgctatccgaggtagctctttgtatcatgaatcaggagattttctagccattagagaagtttctttaagttatacagttcctgcaaatatcatacaaaagattcgtttaagcggacttcggtttacggttacgggaaataatctgcactattttactaaatattctggtcttaatccagaagaaggtggacaggataatggtagatatgctatgccgagaaatattatttttagtgcaaatgtatcattttaataaagtaaagttatgaaaattagaaatataataaatagtacaatagctttgtttatggtcctgacatttgcttcttgtgatgcactagaccttaagccaataagctttataacgaatgaatctttctggcagacagaagatgacgtgaagggtgcgttaaatggtatttatgtccagttacgaggagctgctgaacatgatttgtatatattgggggaagcgcgtagcgaaatactgactgtaggtatcggtggatatggcggatatgatatttattattataatacgttgacacaagctaatatgcctatatcctggatacgttattatcagatagtcaattcatgcaatcttcttttaaagtatgctcccaatgtgacttttaataacgagacttcccgcaataaaatgttggctcaagcttatacaatgagggctttcatgtattttgtgatgactcgtacatggggggatttgataatccatacagatcctattgaaaacacaaattcagaagtcctttataaagaaagaagaccccaaacggaagttttccaactgataaaagatgatttggagaaagctttgtctttatatccggatgacaatttcggtgatcaaagagctatgtggtcaaaaccggcaacattggctttgaaagctgaagtatatctttggagtggaaaaaaaatgaatggtggaagcagtgatattgaaactgcattaaatgctttgaattcaattaaaacggataagcttcgtttacagccggattttgctgatgtatttgcttatgataataagggtaatgatgaaatcttgatgagtgttagatttcaggatttggaatctggtattaactatttcagatatatgtggatacatgcgagtgctgttcctggagatgctcctcaagaggtaaaggatatagtttatccgatagggccgggacaaggtattatagtagcttcggacgagtatagaaagcaatatacagaagatgatactcgaaaaaatgcttcttttcttgagatttattctaaagatcaggaaactggagaaaataaattttatgttagtgtagtattaaaaggtaaaggcttggtgcgagatggtgatcgtatttttgcagatgatatcatattgtaccgttatgctgatattttattaatgaaggctgaggctaaaaatgctttgggacaagatccttctgcagaaattaatgaggtcaggaaacgtgcatataaagacaagtatgaagagcatatttatgtgaatagcacaaaagaggcgaatgatgcagctatcttgaaagaaagacttttagaattggcttttgaaggtaaaaggtggtgggatttggtacgttttgacaaagcctttgatttggttccttctttgagagagcataagggggaagattatatgatgctgttccccattcctttgtcaacaataagcgtggagccgaaagttactcaaaatcctggttgggataaataaagtatattattgaaatctttccaatatgttgtaactttacagcatattggaaagattgataaacgaacataataaaattatatatgaaaaagtctatatttctcttttattgtctgcttgtccacttgtgttctgcgacaacattatttgctcaacagaatgacgttttgataccaggtgtcaagaaaataaaggatgtaataatatataaggataccatgttttactccgcttttccttcagctgtaaaattatcgaatggagagatactggtatcgtttagaagagctccagaccgtaaagtctttaaggagaagaagaataatcatttggacccgaatagttatctggtagtagtgagatccaaagatggcgaacattggaccaaggaaccggaactgctttatgcccatccgtttggaggctcacaagatccatgtttgttgaagttgaaagatggaacactgctatgtgctagttatttgtggacatttattcgtccggatggtttagctgttcttaagaaaccgttcgtacagaatacagacgctgtttttgcaggaggatatttgctccgttcttatgatgatggtagaacttggaatgatttgattataccttgtagcgttccgtctgaaataaattatagtggattgggaggtaaattgccggcttataatcgtggcgctttgtatgaaggaaaagatggacgtattttttgggcagtagtagcttctgatacagaagctttaagaaatacgtcggtctatttgcttatatccaaagataaaggaaaaacatgggaatacggtacgaaaattgctaaagataaaaaggtctcgtttaatgagacttccatgtatgaaacgcctaatggggatttgattgcttttatgcgttcggaagcgtttggtgaccaagcttgtattgcacggtccatagatggtgggaaaacatttggtgaatggaaaagtatggggttcaaaggacatcctctccaggcaatgaggctgccagacaatagagttttgttgacatatggttatcgtcatgaaccttgtggagttagagccagaattcttaatgcagaatgtacagattttgccacggctcctgagattatcataagagatgatgcggatgatggagatgtcggatatacatgggctgtacagctggatgagaagagggtattggtggtatactatataaactttgacagagccaaaggtactagacatatacaaggctctattttagagattgaaccgcaaggataattgttaatacataatatgatgaagagaaaacaaattccgggcaatatggattccagccctcaaaagatgtctcgtcgtaaagcattggctactatggcaggtgccgtaggattggcagcattacctggtgtagggcatgcattgaatcccatcaagaaagaacggagagacattcaaacctctgcttttacatctatccatactatgcgtaacgctgtatctcgtcagtttacgacttttgacttgaatactaagattaaagcccatttggttggaccgggtgagaaatctgtactggtagatcacacttctcctggtgtaattacccgtatgtggtttactattaatggttggttttgggaaaattgggatttaagtaaggagcggtggcctgatcctactattttgaaaatgctgattttgcgtatttattgggatggtgaggactatccttctgtagaatgtccgattggtgacttctttggtatagggcattgtgaatataagcattatatgtccaaatatataggtatgtccagtggaggtttctattgttattttccgatgccatttaaaaaggtaaggatagaagtggaaaatcttcatcaccgtttgactacaagcgttttcttaaatgccaattatgatcaattggagagtttacctgagggtatgggacgattccattgtttatataatgctggtaccaatcctggttatgaaccattaaccatattgcagactaaaggacatggacattttattggctgttccttgtccatgcagagttggcttccaaactacttgggatatttggaagcacccgagtttatttatatcgatacggaagacaaaagtgtaccgactatagttggttctggacttgaagattattttaatggtggctggtattttagggaaggtgaattctgtggagagttgcatggagttcctataaaggatccgctccgttcgatggtgagtatgtatcgttatcatgagcaagatgcaatctgtttcaatgaaagttttatttttgattttataaatccccgtaaaccggagcagacccggccctttaaattctcttcggcggctttctggtatcaagacaaagctgtacctctggcgttcaaattaccagagaaagaaaagttggttgattggtatagaatgcgtgatacagaccatcaagctataccataagattgatatttatatttactttttgaattactgaaatatgttacttgaagataggattttgaaaaaatggttattaccttttatattgtcggttcttattgccgtagattccatggctcaatgcattccggtgtacaaggattctagtatgtctgttgaacgacgggttacagatttattgggcagaatgacattacgagaaaaaatagcacaattaagtcatttgcatggttatcaattatacaatggtcaagaggtggattaccaaaaattaagagatgcagctggtgatattagttacggctgtattgagggattcaatcttactggtgaaaatgtgcggaaagcatttcatgcaattcagaaatatatggttgaagagacacgcttgggaatcccagtttttacagtaactgagtctttacatggctcggtacatgatggttctaccatttttcctcaatctgtagccgttggtagtacttttaatttagatttggcttatcagatgactaaagcaattgctacagaattaaggtcccaaggggtaattcagactctttcaccaggattggatgttgttcgggatttgcgatgggggcgtgttgaggaatcgtttggtgaagatccttggctagtgggacagatggggattgcacaagtgaaaggttatattgacggaggaatatctccaatgttgaaaccttttggaccgggaggagctcctttgggagggctgaacttggcttcagttgagagtggagaacgggatatacgtaatatccatatcaagccgtatgagatggctgttcggaatacggaagtgaaggcggtgatgacctcctataattcttggaatggcatccctaattctgcttcttcttatttactgacgaatattttacgcaatgaatggggattcaaaggatatgtatattccgattggggggcagtggctatgttgaaggattttcagcatacagctaaggatgatagtgaagcggctatccaagccttgactgcgggggtggacttggaagcttccagtaattgctattgggctttggagcaattgatagagcaaggcaggtttgatgaaaaatatgtggatttggctgttggacgtatcttacgtgttaaatttgaattaggattgttcgagaatccatatcagggcgctgacatgccgggagtagccatgcgtactaaagaagcggtggagctatcgcgcagagtggctgatgaatcgattgttttattgaagaatgaaaatactcttttacccttaaatttgaataaaataaaatcattagcagtgattgggccgaatgctaatcaagtacagttcggggattatacatggagccggagtaataaagatggggttactccacttgaaggcctaaagaaacgggttggaaataagataaaaataaattatgcggcaggatgtgatcttattacagataataaatccggatttgatgaagctgtagctgctgtaaaagcgagtgacatggctgttgtatttgttggttcttctagtgcttcactggcacgtgactattcagatgctacatgtggggaggggtttgacctctcttctctggatctgacaggtgtacaagaagaattggtggaagaaatctatgcaataggaaaacctgttatagttgtattggttacaggtaagcctttttctatttcttggataaaagaacatattccagccatagttgtacaatggtacggtggtgagaaagctggagatgcaatagctgatatgttattgggaaatattaatccttcagccaaacttccattctcgtttccgcagagcgtaggacatttaccggttttttataatcatttgccaacggacaaaggattctatcgtcgtcctggtagaccaaatgaacctggacgtgattatgttttttcttcaccagctccgttatggtcttttgggcatggattgagttatactacatttgagtatttgaatgctcattattctgcagagttattacatccatctgataccttgattgtcagtgtatctttgaagaatacgggtagtgtagcgggaaaggaggtagtacagctttatgttcgagatgtggtcagttcggttgtgactccagtcaagcaactgaaggcattctcaaaaccattcttacaaccaggcgaaatgcagacagttgttttgaagctaccaatacaagaattggccttatatgatttgagcatgaaaaaagtagtagaagaaggggagtatgaaatacagataggaacagcctcagatgatatcagattacgaaggacaatctttgttggcagacagccggtgactagtaatagtcttggtcataacgacttctgcatggatgaaattgtgaagaatccaggaagaaagataaaggttgctggttgtgtcagagatgtacaagcaacccctataagtggaattgaaatcaaatctaattattctggtagaacggttataagtaaggaaggcggaagatattccattctgactgtagaaaacgatgtgctaacgatttctgccaaaggattcgagacagtaaatatcaaggtgaataaacaaaaggatatagatataaaattgaattacagtcatgattaaacacgaaatcagatgggaatacatattggtaatatgtattattctcggtacgttaccttgtaatgcacagtcagtaattcctatgccaaaagaaatggtgatgggagaaggttcttgggatgtatctgccgatacacgtataaattacagtaatgatgcgcttaccaaaacagtcagtctctttaataattatttagatggacggtttggggtgactttgaagaaaggatcgaaaggaaagaatgccattcatttgcagatagacaagaaaatgcctttagaggcatattcattagttgtggatgataagggagtaacaatcaagggaagtgaagctggaatattttatggaattcagacattgcagcagttacttgttgataagggaaatggatgcatacagcttccgtatattatgataaatgatgaaccccgttttggttatcgtggtttgatgttggatgttgcacgttatttttactcagtggaatatgtaaaagagtatatagatttaatggctcgttataaaataaatagattccattggcatttgacagaagatgccgggtggcgtattgaaataaaaaagtatccagaattgaccaaaattggggcatggcgtaatagtactcagtgggggcataatccgacagaacaagatcgtattccacatggaggattctatactcaggagcagattaaggagattatccaatatgcggcagataggtacatcactattgttccggagatcgatttaccaggacatacaatgtctgttttagctacatatccggagctgtcttgcacgggcggaccatttcggataccggaaacttggggtattaaggaggaagttctttgtctcggtaatgatgaaacctatcggtttgtagaagatgttttatctgaggtgatagatttgtttcccggtgagtatattcatataggcggtgatgaggcacctaaaagacgttggaaagaatgtccgaagtgtcaacgacgcattaaggaaaataaattgaaagatgaacatgaattacaaagttacttcatccatcatttggatgaatttgtaaccgggaaggggcgaaaaatcattggttgggatgaaatcttagaaggtggtctggcaccgaatgctgctgtaatgagctggagaggagaaaacggtggaattgctgcagcgggaatggggcataaagtggtgatggctcccaataactatatgtatattgattattatcagagtgaggattatactaatgagcctttaaatataggaggactggttacgttggaacatatctacagctatgaaccttatacgcctaagcttacaaaagagcaatgcggttatataatgggggtacaagctaatgtttggggagaatttatacatcatcctgataaagtgaactatatggcatatcctcgggctatggccctttcagaaataggttggtcacctgcggaaaagaagaattatgcagatttccgtgaaagattagcgggatgtttggctgaactggatagacaaggggttactttccgtattcccgaaccgattggttgggataaagctattgttagaggcggtaacgcgatagtggatttgaagccgtcagtagagggtgctgatatatattataccacagatggtaccgatcctcgtttatatggaaaactctatacggatacattgcagttacctttatctttcagtggagtaaatataaaatgttatctccgcctttcttccggtagaagtagtgctgtttatacagttgtagctcctgatacaaaataaaaaaatgataataaatacagtatttatgacgaaatatttattaatatgtctggtagtttgtgcactgatttttcaagggtgctggcatcatgagagtgcggttgaacgtggctataatgagaagtatataggtgaatatacgcgtaaaatagctttccctataggaggtataggcacgggcatgttctgtattgaaggaacaggagcattgagtaatatgtctatacgtcatagaccgaatgttttcaatgaaccaacgatgtttgctgcaattcatgtgaaaggttatgagtatggtacacgcattctggaagggccggttccagaatggaaaaaatttggtgctcctaattccagccgtggagacggcggctcatggggaatgccccggtttaaggagtatagtttccagtcacgtttcccttttgcggaggtagagttggcagatcagaatgtccctatagatgtgaaactggttgcctggaatccatttataccaacggatgaagataattcaagtctaccggttgctgggtttgaatatgagtttcataataccagtaatgaggaagtacaagccgtcttttcatataatagtatgaattttatgcaaactccgggtagaggtaaagcgtatatagatgcagcaaagaatggattcattctaagacagacaggcacagagaatgaacctttctgtcaaggtgattttatgatttatactgacaatccccagacggtagttaatcataactggtttcgtggaggttggttcgacccattgagcatttgttgggataacttggaagagggcagaatggaagagaatccagcaggcttggaaggagcagtgggagcttcgttatatgtgccgtttactttagcacctggtgagactcgtaatataaggttgtacatggcttggcatgtcccttattcacaagaacgaataggtggaatcccacgtacagatactgatatccctgatgcaccagtttgtccagatgaattgagtaactgttatacttatgagaataattttgaagggaattaccgcccttggtatagcagtaggtttggcagtatacaagatgttgcaaactactggttggataattatgatgcattgaaaaagaatactcagttgttcactgatgctttctatgattctactcttccacctgaagttaaggaggctgttgctgctaatttgagtatattgaaatctactacagtacttcgccaatacgatgggcgtatgtggaattgggagggaagtcatgataattggggctcttgtcatggttcatgcacgcatgtttggaattatgcgcaagctgtatctcatcttttcccaaaattagaacgtacattacgtgaaacagaattttttgtgagccaggataaaaggggacatcaagtgttccgtacgaatctgcctatcagtcctactgtccatgattttcattcggcggcagatgggcaattaggaggtataatgaaggtatatcgtgaatggagaattatgggtgatataaattggctgaagatgatgtatccagctgtgaagaaaagtatggattattgtatccgtacttgggatccgagagaggttggagctgttgaagaacctcaccataatacgtatgatatagagttttggggcgcgaatgggatgattaccagtttttatgtaggagcattacaagctatttgcttgatgggtaaaacggtaggcgatgatatttcccgttatgaagaattgatgaataaaagtaaagcatatttggagagcaaactttttgatggagagtattttattcagaacattcaatggactggattggacgctccagacccagttgatgcccaatcgtttgtgacccattatacgccagaagctttaaaaatcctacaagaagaaggtccgaaatatcagtatggtaaaggttgtttgtctgacggaatattgggctcttggatgacattggtatgtggaatgccggaggtggtcgatcgtctgaaagtaaaaagtcatttgatttctgtccataagtataactttaaaaagagcttaagtaaccatgtcaaccctcaacgttccacctttgcattgggagaggatgggggattattactttgtacctggccgaaaggtggtaagctaaaattgccttttgtatacagtaacgaagtgtggactggaattgaatatcaagtggctgctcatcttatgtttgaaggagaagtggaaaaagggcttgaaatagtgagaacttgccgtgatcgttataatggtcgtgttcgtaatccgtttaatgaatatgagtgtggagcatggtatgctcgtgcaatggccagttatgctatgctagaaggccttacgggaatacgctatgatgcagtagacaaaattttgtatatagattcgcggattggagatgatttcacttcattcttgtctacggaaacgggttttggtaatgttggacttaaggaaggaaagccgtttatagatgtgaaatatggggtaatagatgtacagaaatgtatcgtttccggtaaggaaattcaattatagtttggataaggttcttgattatatacaaattgtgaaatttgtagtattgtaagatttacatgtatagattagatggttttatgagagttctgtggggctgtgattgttccacagaactatttttatgttatttgcagatttttgcaaccaaacttcatctttctgcgtctaataaataaaaagaggagattatgaatatgaaaatgaatttttctatggacgagattcgtcttaaagtagaggagtatataaagaaaggtagtcgggcagctggtcgtcccgtactgacagcttattatgtcctgactactgattctactccagagagtgaaaggacaaatatcatgattgctttggtggccattgtgtttcctgccggtatagaagacctcttgggacaagtctttatggtagggaagggatttgctgcaatctatgcttataagaaaatgaagaaatacatcactccacagataaaggataaggtagaggcaaaattggatgagtggttccatgagaatgtgatggaagtagtggaaccgctttatctggaataacagttcgccacaaagatcatactgatttgcgcagattgaatttatatcgggaatttgtatctgtgcgaatcagcataatctccgtgacggactgtttattgttttttgctcaagaagcgtctggccagatatttccgtaccggttcatcatagaattttaagcatagataagccaataatatgttccatgcgtaaacacacaaggcaacctgccaagtctgctccaacgtgaagagctggttcttgatgagccatgcatagaacaagtacataaatggataatgtatcacatagactggataggatatatctcccaggaacttgcatatctgggtcgattttttatccgttgtggtaccggaagctcctaaccagacgagaaccggaaaagcgatgattacacagaacgcttcataaatgccatttgtacagaccggtgttgcaccttccaagtagggcactgaaaacaaggtaaccaatgcaatggcacatatccagaaagcacctttcaccttgataggcttgaagttgcgcgacaaaagcatgcccatggagaaaggaaaaagcatcctcagcaatccgccgccaaagtttattccgtccagtgtccagcctacccccatatttccgtatccggagatgtcgaaaatggcgaatgatgccaatgccactcccagcaatattgtcagtacggcaagggctttgtttgataagcggtggataaacaaggcataaaggatgttgcctaaatattcaaaaaacaaggaccaacatggaccattcaaaggaaacatttcgccattaccacggacttcataacctgcacctggcattgcgggaataaaaaatatagtgcaaagaagggacagcataatcatggagagggcaatatgtgttccgtcccattgtacgcatccttgaagacagaaagtaatggcacccaggacagctcccataatgaccatcggatggagacgtatcaggcgccgtttaaagaagtttttcattgtgaggttcctgccccaacggtcgtcataagcatacccgataacgaatcccgatagtataaagaagaaatctacagctaaatagccgtggttgaaggtttcgataatgctaccaccggcaaaagcatagccttcgaatatatgataccatataaccatcaaggctgctacgccacggagcccgtcgagaaggtcataatgtgctttggtgtctgaaaaggcagaagatgaaatgtgcgacatctgttttttttctgttgtttggttaatgttttcggatctcaaagatacgccatgcgaagcgaagttcttttgcttaaaagcaaaaaagaacggcaatcttctatttttttgcgcgtacccggctgagagtatagatggaaatacccaggaaggctgccacatattttagcttcacccgatttatcagtctggggtaacggcggttaaattgttcataccgctctttgggaggcagttggagcctttccacaaacatatgactgagctctttgtttacgttctgatgcagtattctgccccagttggctatatcaatatatgtttcgtagagagcatttaacttgtctatgtggatgacgtagattttgcagtccgaaagagtttcaatgctttctactgacggctgctgatagtacagtgaatccattccgaaggttacatcaccttcctggctgaaccaagtggtggtatcttgtccgtcgtgatgaaatacggaacgggtgaccccttcctcaatgaaataaaccaaacggtctgtcactcctgcttgtactatataagttcctttagggtagtgtcttacctgcatattcatcagcaatgcctgaagagcttcttcggaaaccggataaatctgcctgattttatgaatgatgttgttcattggaggggagctttttattcgtttacaaacttacataattttattaactaaaactgaactttgatatacaaatgtgtgcgttgccttataagcgtttatggtataatggaattttttttgtaaaagagatgtttgttctttgaatattgtatctttgtagaaaacagtagcgtatgaataaaatattggtaacattattggctctaatcggaggtagctgcatttcattcgcacagatggagactggaagagtttccgatacagctgaggatacattgagaatagaaaatgaaattgtcgctgttgataccggattttaccagtcagtagtccgctatgatacggtgcgctataatttgaaaatgcagagtgtttacaaaaaggcttttcaactaaagaatgatgtttttgtggaaaagatgaaagagccgtggttagatgatattctcagaaatatcttatttaaataaccatgaatttgtgctttgcgtcattcggttgacttcctggtttaactcactcggttaaaccacactaaattcagcattctctaaaaacaaaaatcagatagaaatcttgcgataactatctgattttcagaagagcggaagacggggctcaaacccgcgaccctcagcttggaaggctaatgctctatcaactgagctacttccgcaattttttgtgggcaaagatggattcgaaccaccgaaggcgtaagccagcagatttacagtctgccccatttggccactctggtatttgcccttttgcacttaagattctatctcaattctctcattgagtaggtttgtttctcaattgcggtgcaaagatacgactatttttgtaaactccaagcaaaatctatcatttttattgcagtaattgcacattcgtctcctttattacccagcttgccaccggcgcggtcttctgcttgctccatagtattggtagtaattaatccgtaaattactggtacatcgccacttgcgtttaattgggtaattccttgggtagcacccatgcaaacatagtcaaaatgtggagtatctcctctgactacacaaccaattgcaataactgcatcgacttcgctgtattcgataagttggttggcgccgaaagtcagttcaaaactgccgggtactgtttttaccagaatattttcatctttggctccatgtttttttaaggtgtctatggcaccttttaggagagcgccggtaatattataattccactcagatacaacgatgccgaatttcattttttccgcgctgggtacagaactgaaatcgtagtctgaaagattgtgataagctgttgccataaataaggaattaagaattaataattgaaaattaaagggagaggagagataaaagaggcacggactacacggattcacggctattgtgtctttccgtgttttccgtgtaatccgtgcctgagatatttttataataaggtatattacttcttcaatagtttggcttgttcgatatacttatcgatatccattgcctggtatgaacggaagtatttatccttgatagtggtatacgcctggattgcatcgtcatacttacctcgctttaccaggatttctccagcttgcagcaggtagatggggctgagggagttgttgtcggcttcgttggcggctttcagcagcatggaagcggctttgtccagttggccgagctgcgcatagcagttacccatagcacctttcatggcaggagctaccatttggtcgtctccgtcaaagctgtccaatgctttcactgcttcgtcatatttaccgaggtgtgcatagcagagacccatataggcttttgcaagattggctgcttttgtgccgctgtattcgtctgccacttttacaaatccggcaaaaccgatgctatcaccgttcagtgcttgtgcataagcgtctgcttcgaagtattcttgccctttgaataaggcagcttgtgctttttcttcacgggggtctgcataaaggttcttgtacatcactacaccggcaatgatgatgattactgctactacagtgccgatgattgcttttttgttcttaatgaaaaaggcctccgattgtgtcagtgcatcctccacgtttaaggcttcattcgtctttttttgttctgccatttttatataatctttttgttattattcttatttatctatttcgacccgcaaaagtaagttttttatagctatcaacgaaatttagcggcatctttttttgttttgtatcagaaaacaccgaaattatttctacttttcaataagccgggcttcacctctgtattaaaaataagcaggcttattttgtactgctttcggttttgcattatctttgtaaccgaactcatcgttactataatgatactgaaacgtatatctatactcaattataagaacttggagcaggtggagctttcattctcgcccaagttaaactgctttttcggacagaacggcatggggaaaacgaacctgctggatgcggtgtattttttgtctttctgtaaaagtgccggtaatcccattgattcccagaatatctgccatgatgccgacttctttgttattcaagggttttatgaggctgccgatgggactcctgaggaaatctactgtggtatgaagaggcgccagaagaaacagttcaagcgaaacaagaaggagtatacgcgtttgtcggaccatatcggcttcctgcctttggtcatggtctcgcctgccgattcggagttgatagcaggaggcagtgatgaacgccgacgttttatggatgtggttatctcgcagtacgacaaagagtatctggatgctttgatacgatacaataaagctttggtgcagcggaataccttactgaagagtgaacagccggtggaggaagagctctttctggtctgggaggagatgatggcacaagccggtgaagtggtgttccgcaaacgtgaggcctttatccgtgagtttattcctattttccagtctttctattcattcatttcgcaagatagggagaaggtgggattaagctatgactctcatgcccgcgatgcctctttgctggaagtgctgaaggaaagccgtgctcgcgaccagattatgggctattcgttgcgcggtgtgcacaaggacgagctgaatatgcttttgggagatttccccatcaagcgtgaagggtcgcagggacagaacaagacttatctggtagcgttgaagctggcacagtttgatttcctgaaacgtaccgggaccactgttcccttgttgttgttggacgatatctttgacaagctggatgcctcgcgtgtggagcaaatcatcaagttggtggcaggcgacagttttggacagatttttataaccgataccaaccgcgaacacctggaccgtattctgcataaagtgggcagtgattataagatgttccgtgtggagcagggaacggttgccgaaatgaaggaggaagaggcatgaagcgcaataatgccgaacagataggtgaacttatccgtcattacctcaggcaggaaagtctggagtctccgctgaatgaacggcggcttatcagtgcgtggcccgaagtgctggggcctaccattgcctcctacacccgtgaactttatataaagaaccaggtgctttatgtgcacctcacttctgctgctttgcgccaggaactgatgatggggcgcgagttgctggtgcgcaacttgaatcgtcatgtgggggcccaggtcataacgaatatcatattcagatgagcatcctcagctcatctattctttcaatcttcagttcctttaattcccggactgcccggtcataatacatcggagtttccaaatccttgttgtcatgcgcatccagtccgatgatagctgtacagccttcattggcagcgattcgccagaactccgggcacgggtaggtggataagccgtgcgcttcattgtaggctacatagcctatattgtattccaacgggacattcaggcgtgcagcagtacggcagatgtgccggctgatggtagtgcaatggtggtcgaacttcggataggagcgcatgaacaagtccggatgggcaaggcaggagaataatccgctttccataccttcgatggcgctctcttcgtaaagttcgagcatgtcgcggctgtctgtatgatggccgaagtaggggaacttttcatcggtgtggtagtgatggtttccgaagatgatatagtccagttggtacttcttggtttgctctttcagccaatggatatattgggggaagtattcacattcaagtcctattctgatgtctatccggtcgtggtatttctcacggagcgtcttgagactctccacgtagccggggagctcctcggggagcatccgcatgtcggctacgtagtcggttcggtatttccagggagtatggtctgaaaacccgagtatccggtaaccgcctttgatggcactgagcacatagtcttcgtcatctccggtggcatgcatgcagcgtgtggtgtgtgtatgataattagttttcattgcgtaatgatttcatccatgcgtatatcaaacggttccgcaggaacttcttctacgagttgaaacgggaagcagatgccggctttgtgggctgatgggatgcggggcagaagccggtcatagtaacctttaccgcgccccaggcggttgccgttacggtcgaatgccacgccgggaaccactatgaagtctatgtctgcatagtcggtaaatagctcgccggttggttcttcgatgccgtatgcgccaggtttcaagtcttcgggtccggtgtacagccgcagttccaggtcgtcacctacaactaccggaagcagtatccgcttttcgcggctccacttccggataaattcgtgtgtgtccacttcgtctttgagagagtggtagagcagtacggttgttgccgccctgaaagcggggtgtgcctcgagggcggcaagtatttcagcagactgacgcgtagcggaagagctgtgtcgggtcttcaacaaagctacctgcctgcgcagttcttttttcctttccatcatcttttttatcctctatgattggtgttgcttccggagctttggggaatgcctcgccacgttccagaatatccaatgctttcttgacggtagcatcgctctggttgatgtagcggatgtattgctcccttcccagtatgttatagataatgttgccgtaaagacttctttccagtagcttgtaggacttgtggataagcaggttgcgccgttttactcccttggagtctgcaaaacgtacaaactgctccacaatactctggtggcgaaggtacttcaacaagtcttcttcattgtcgtattcactcaatttcgcgcggttgcggtcggtatactggaagctgaattgcagaatcagtcccttgttgcttacttctatcaggtaagaagatactccggttgtgtcttgcggaacgaatacgtccggcataatgccaccgccgccgtatacgggtctgcccaaaccggtagagtaacgcaggttttcgtccagtttgatgctgtctttggagaagaactcgccgtgttcgtaacgggtaatccagtccatttcgtatttgctgtccttgccgttctcgtaggggcgctggatgcaacggcccgatggggtgtaataacgggcaatggtcaggcggatggcggaaccgtcactgaagtcgatgggttgctgtacgagtcccttgccgaaggaacggcgtcctacaatggttccgcggtcattgtcctgaatggcgcccgcaaagatttcgctggccgaagcggaactctcgtttaccaataccactagcggcagcttctggcaactgccggtaccgttggcatattcctccatgcggggatatttgcggccgtgggtatatacaatcaacttcccttccggcaggaattcgttcaccatgcgtgtggcggcttccatgtatcctccggtattgtcgcgcaggtcgataatcaggcctttgcacttctcgtggctcagttgggcaatcgcattcagcagctccacgtgtgtggtacgtccgaatttgctgatttgtatatatccgtagtcatcgtcgagcatataggctgcatcaatggtgttttgtgggatgtcaccgcgtgtgatggtgaagtcgagcaactccttttccgtggcacgcttgacgcctaacttcacttggcttcctttcggacctttcaggttgcgcatggccttttcgtttgtcaggcctttgcctgcaaacagactgtcgttgaccattacaatgcggtcgcctgccatcaggcccactttctcggatggtccgccgggaatcacgctgtttacgtgtatcgtgtcttcttgaatggtgaactggatacctataccgctgaagctgccttcaagttcggagtttacctcttccagcttctgtgcggggatgtaggtggagtgggggtcgagttccgccaatatctgcggcatggccttctctaccaaatcggtcatgttgacggtatccacatactggtcatcaataacacgcagcaaggcattcagcttgttggacgagctattgatgattcccagtttgttaccggcaaaatgcctggcataaaacgttccgataaggattcctgcgactacgctgattgcgatgatgagcggcataaagcgggaagtattttttgtactcatgatgtttatttactattagactatttacaatttactatttggctgcgcatgcaactttcaactttccattttcaacttttcattatccattgaaataaacactacctcgatgcctgcccgtttcaaaagttcgataccatcttccaggcggtatttctcggagtagactacccgtttgatgcctgcctggataatcagtttggagcattctatgcagggggaggcagtgacgtacatggtggcaccgttactgctgttgtttgaacgggctattttggtaatggcgtttgcttcggcatggagcacgtatggtttggtgacgttattctcatcttcgcatacattctcaaaaccggaaggggtaccgttgtagccgtcagagataatcatcttgtcttttacaatcagtgcaccgacctggcggcgttggcaatacgaattttcggcccaaatgcttgccatacgtatataacgcctatccaatgcttcttgtttgtcttttgtagaatcgtccatcatatttatgctttatcgttgcggggtgaatcccatgactctggttgtcggtccgtctttaaaatagagggtcagtgaattggcatccccttcatacttgtacacgttttgcaatccggagatgaatgccttggccagtgcatcgctttctgcagcccccgtaaccttcacactgatgctgagcgagcctgaagctccgttggctttccaagtgccgttgacgcttgagttgatgccttgtccgttgacggtggtgcccatcagttctccatccagttcagtaccttcaaaattgagggtgaaggtgtttttctgattatatagcttgtccagactcttcttcatctcttcctcattgttgttccaaaggtttggatagaattgggcattgctgcctttattggtgagtcggctgagcttccatgtcttcccggtgaatattccgataacatcgtcctcgttgtcgcaaccgcttagcagggggagcagcgaaaacatgagcaacatgcaaaagatgttccttataagtctcttcatttctttattccatttctgattaataatgcgtcgattgtaggctcttgtccgcggaaacgtttatagagcgtcatcggatgctccgttccacctttggaaagaatgttctcgcggaaggaggcggctgtctccggattgaagatgcccgtctgtttgaatagcgagaaagcgtccgcatccagtacctctgcccacttataactgtaatatccggcagaatatcctccggcaaagatatgggagaactgtgtactcatacaggcttctgccacagaaggcagaatctgtgctttttcccaagccttcttttcataggctttcacgtcaccttcaaacggggtgttacgtgtgtaccaagccatatcgagcaggccgaagcttacctggcggaggcaggcgtatgccgcgttgaagttggacgaatccacaatgcgctgcaccagttcgtccggtatcagctctccggtctggtaatggcgggcaaacgtatgcaggaattccttttcgatggcgaagttctccatgaattgggaggggagttccacaaagtcccaatacacattggtcccgctcaggctcccgtaggtggtattggcaaacataccatgcaggctgtggccgaattcgtgcaggaatgtctccacctcgccgaaggtaagcagggcaggcttgtcctgtgtcggtttggtgaagttcatcacaatggatatgtggggacggctgttctcaccggtcttttcgtcaatccactgttccttgtagctggtcatccaggctcccgagcgcttgcctgctctggggtggaagtcggtatagaacacggcaaggaatttcccgtctttgtcgaagacttcgtaggcatccacatccttgtgataaacgggaatatccggattcttcttgaaggtgatgccatacagtctggttgccaggccgaatacaccttccttcacgttgttcagctcaaagtaagggcggagcagctcatcgtcgatattgaacttccggtccttcagtttatgggaatagtacgcccagtcccacggcatcaggacgaagtcttctccttccgcttggcgtgccagggcttgcacttctgcatattcttgtttggcggtgggcgtgtaagcctccagcagttggtccagcagcttatacacggactcactgttttgtgccatgcgctcctggaggttgtattcggcgaagttgtcatagcctaggagttgggcaatctccatacggacattggccagtttctttacgatttccagattattgctggcgttgtcatgcgtacacttcgtattgtaggccatatacagctcacggcgcaggtcacggctgtctgcataggtcaggaaagggccatagctgggagcctgcaaggtgaatacccagccttcgacgcctttttccccggctgtctctgcagcggcttctaccgcgctctcgggtagcccggccagttgtgacttgtcggtgatgacaagcttgtagtcgttcgtttctttcaggttgttttcactgaactgcagcgtcagtaggctgagctctttgcataaagcccggtatttctccttggcttctccctggaggttggcgccgttgcgtacaaaaccattgtaaatatcttccagcagcttgtgctgttccgggttcagcgtctctttgttttgctgctcgtaaaccgctttgatgcgtgcaaacagctcttcgttcaggctgatgttgttttcatgctcgctcatcatcggcatgatttccttggccagttcctgcaggtcatcgttcgtttctgcgctgagcagattgccgaatacggtaccgacacggtggagcatttcgccggacttctcataggccagcacagtgttggcaaatgtcgggacttccggattgcggatgatggcatctatttccgcattctggcggcggatgccttcgcggacggcgggtacatagtctccggtcttgattttgtcgaacgggacagtgccgtgcagcgtggagtatgtttcaaaaaaaggattttgagacgatatagtgttcataaagcaaagcaatattagagttagtataatcttcatcatttttaaaggtgctgataaaaaacgaactagctgcaaaattgcaaaaaaaataggcgacttccgcagaagtcacctattttttattattttctaactgtatattagcagttaactgatgccatgtgagcaatcaggtcaagaaccttgttagaataaccgatttcgttatcataccaagatacaaccttaacgaaagtatcagtcaaagcgataccagccttagcgtcgaagatagaagtgcgagtgtcacccaagaagtcagaagaaacaactgcatcttctgtgtaacccagaacacccttcaattcgccttcagaagcttccttcatggcagcgcagatttcagcgtaagtagcgggtttagccaagttaactgtcaagtcaactacagatacatccaaagtcggaacacgcatagacataccagtcagtttgccgttcaatgccgggataactttacctacagccttagcagcaccggtagaagacgggataatgttgccagaagcagcacgaccacctctccagtctttcatagaaggaccgtcaactgtcttctgagtagcagttgtagagtgaacagtagtcatcaaaccgtcagtgataccccatttgtcgttcaataccttagcgataggagccaagcagttggtagtacaagaagcgttagatacgaattgagtacccttaacgtaagtcttttcgttaacaccgcaaacgaacatcggagtgtcgtccttagaaggagcagacattacaacatattttgcgccagcttcgatgtgagcttgagctttgtccttgctcaggaacaagccagtagactcaacaacgtattcagcttctacttcgttccatttcaagtcagccgggtttctttctgcagtgatgcggatagcctgaccgttaacgatcaatttgctgttttcaacatcagcttcgatagtaccgtcgaactggccgtgcatagtgtcatacttcagcatgtaagccaagtaatctaccgggcaaaggtcgttgatacctacgatctgaatatcgtttctcttcattgcagcgcggaatacgaaacgtccgatacgtccgaatccattaatacctactttaatcattttgtttaaacttttaagggttttataatgtttaaaaataaactttcgcctataaattgcatttctttatcgaattgcggtgcaaaagtaagaaaatgtttttatattcgtagccaaaatcataattaaataattgaaaagatgggaaaaagttcatttttacaggaatttaaggcttttgccatgaaaggcaacgtgatagacatggctgtcggtgtgattatcggcggtgcgtttggaaaaattgtctcttccatcgtggcagatgtgattatgcctcctatcgggctactggtgggcggtgtcaactttacagacttgaagtgggtgctgaaacctgccgaaatggtggacggaaaagaaattgctgccgtgaccctgaattacggtaatttcttgcaggtcaccttcgacttcctgattatagcattctctatcttcatgttcataaagttgttgaccaagctgactgaaaagaagaaagaagaggcgcctgccgctcctccggctccccctaccccgagcaaggaagaggtgctgctgaccgaaatccgtgatttgctgaaagaaaagtaatatcgaagcggaacttcataggggatgtcaaaaccctcttgacgctttttttaggcgcggattacgtggatttcacggatttattttactgaatccgcgttattccgcgtaatccgcgcctaatattataacatgatgaaagcgttcatggcttttgatacatcccctaatgcatttaactctccccggtaccgccggaaactgtccctttttatactaagcagtaatcttaccacagctgtggtaagaaaataacattgctgtggtaagcaagttgcatagctgtggtaagaaaacagcacggttgtggtaagaatagcttttagtatccttgtggatagttctagcctgaatttaaagctgttttttgaaaaaaaacgtttttctgtcacattatccctgataattcctttactttttctacttttgcaaatcatttattaaagtctatacggatttatatgcaagagaagattattattcttgatttcggttcgcaaaccacgcagctcatcggccgccggctgcgcgaactgaatgtctattgcgagattgtaccttacaacaaatttccacacggagatgagagtgtaaaaggagttatcctttcgggtagccccttttctgtttatgataagagtgcattcaaggtagatttgagcgggattcgtggaaaataccccattctgggtatctgctacggtgcgcagtttatctcctacagcaacggtggacgggtggaacccgccggtacccgcgagtacggacgtgcccatctcggttccttcgattcggagaacgtccttttcaagggggtaagggaaaatagccaggtgtggatgagccacggagacacgattaccgccattcccgataacttcaagactatagcttctacggacaaggtggcgattgccgcttaccaggtgacgggtgagaagatgtggggtgtgcagttccatccggaagtgttccacagcgaggacggtacgcagatgctgcgcaacttcgtggtagacgtttgcggttgcagccagagctggagcgccgcatcgtttgtagatactactgtggccgaactgaaggagcagcttggcaacgaccgcgttatcctgggactgagtggcggtgtggattcttcggtagccgccgtgctgctgcatcgtgccattggcaagaacctgacctgtatctttgtggaccacgggctgcttcgtaagaatgagttcaggaatgtgatgcacgactacgagtgtctggggctgaacgtgattggcgtggatgccagcgagaagttcttcaaggatttggagggagtgaccgagcctgagcaaaagcgtaaaatcatcggccgcgattttatcgaggtcttcgatgccgaagcgcacaagataaccgatgcccgttggttggcacaaggcaccatttatcccgaccgcatcgagagcctgaacattacgggcaagaccatcaagagccatcacaacgtgggcggtctgcccgaggagatgaacctccgtctgtgcgaaccgttgcagtggctgttcaaggacgaagtacgccgcgtgggacgcgaattgggaatgcccgaacatttgattacccgtcatcctttccccggtccgggactggctgtccgcatcctgggggatataacacgggagaaagtacagaccctgcaggaagccgacgatattttcattcagggcttgcgtgactggaaagtgcaggatgccgacggcaacgagacatcgctctaccatcaggtctggcaggcgggcgtcattcttctgcccgtacagagtgtgggcgtgatgggtgacgaacgcacctatgaacgtgcagtggccttgcgtgccgttacttccaccgatgccatgacagccgactgggcgcatctgccctacgaattcctgggtaaggtgtccaacgacattataaataaggtgaaaggtgtgaaccgcgtgacctatgacatctcttcaaaaccacccagcacaatagaatgggaataagaccgactgaaattattaacttaaaaacaatatagaagaatgaagcaggatatgattgtgattctggatttgggaagccatgagaacacagtgcttgcccgggcgattcgtgcgttgggagtatatagcgaaatctacccgcacgacattactgccgccgaactgaaggccttgccgaatgtgaaaggcatcatcatcaacggcggccccaacaatgtggttgacggggtgtccatcgacgtgttgcccgagatttacgaagcgggattccccgtaatggctgccggacacgacaaggcgctgtgcgaagtgaagctgccgcagtttacggatgatgtggaagccatcaaggaggctgtgaaatctttcgtattcgatacttgcaaggctgaggcgaattggaacatgacgaatttcgtcaacgaccaggtggagttgatacgtcgtcaggtgggcgaccgtaaggtgctgctggcactgtccggtggtgtggatagctccgtggtggccgctttgctgctgaaagccatcggagacaagctggtttgcgtacacgtgaaccacggactgatgcgtaagggcgaatcggaagccgtggtggaaatctttggcaaggagctgaaagctaacttgatatacgtggatgctacagaccgtttcctctccaagctggaaaacgtggctgacccggaagaaaagcgcaagattatcggcggagagtttatccgtgtctttgaggaagaagcccgcaagctggacggtatcgacttcctgggacaaggtaccatctatcccgatattgtagagagtggcacaaaaacagccaagatggtgaagtctcatcacaacgtaggcggtctgcccgaggatttgcagtttgaattggtggagccgttgcgccagctgttcaaggacgaagtacgtgcatgcggtgtagagcttggattgccgtacgagatggtttaccgtcagccgttccccggtcccggattgggagtacgttgtctgggagccattacccgcgaccgcttggaggctgtacgcgagtcggatgccattctgcgtgaggaattccaactggcaggcctggataagaaggtatggcagtatttcactgtggtgcccgatttcaaatctgtgggtgtacgcgacaatgcacgttcgttcgactggcccgtcattatccgtgccgtcaacacagtggatgccatgaccgctaccattgagccggtggactggcccatcctaatgaagattaccgaccgtattctcaaggaagtgaaaaccgtcaatcgcgtttgttatgatatgtctccgaaacccaatgcgactatcgagtgggagtgagattgaccaatgataatgatagcctcaccttaaaaacggtggggctgttttttttataacaaaacaacaaagaatagaacaatgaaacttttatgtatgattgctgtctttttgtgcatcccctgggtagcctctgacgcacagaagcaggactggggaaatttgaaacgctatgcagaggcaaacaaggaactggtacggaagggaaaacagaaggaccgggtggtttttatgggcaactccatcacggaaggatgggtggcaaacgatgccgctttctttgaagacaacggttatgtgggccgtggtataggcgggcagacttcttcccatttcctgctccgttttcgcgaagatgtcatcaagcttgctccggcgctggtcgtgataaatgcaggtaccaatgacattgcggaaaatgcaggcgcttataatgaagaatacacttttggaaatatagtgtctatggtagagctggcacgggccaataagataaaggtgattttgacgtctgtgttgcctgccgctgcctttggctggaatccttcggtgaaggatgctccgcaaaagataatgcagctgaatgccagaatccggaagtatgcccaggaaaacaagattccttatgtcgactattacagtgagatggtggaaggcgacaataaggctctgaactcctcgtatacccgggatggggtacaccccactctagaagggtataaagtgatggaagccttgataaagaaagcgatagacaaggtgttgtaggaaatcccggttcaggtggcctataagagcttttctgcgtcgggaatcatcatctcgcctctgtgcagttcgagcaggcctttctcctgcatgctgttcaacgctcttgatactcccatacgggtatcattgaccacctgagccaattcttccatttttattttcagtattttcctgcctgacggacgttcgatatgtgtcaggataaagttgccgatacgtttctcaaggttgtcggtgctttctgcccaaagacggctgtttaggctttgggcgcggttgctgatgatattcatgtaattcaggcggaatatgtcatatttgaacaattcgctcatgacgaaagccttgctgatgctcactgtgtgggtctcggtttgggcggtataggccgagacgtaggaggtgctcatcccgaacagagattgtggctcgatgacataaggtgcctgaaaatattccgtggagctgtatgatgtattcgcagatgaagtacatgaggagatttcacctttcaatacgaatatcagttgactgcatgtgtcaccggctttcacgataacttcgccggctttatgctttgtaaagctcagcttgactttccccaggatattggtaaagtcttcttgtgcgagtccttgaaagagtggcagttgcagtaatgtatcaaacattgtattcataatgctttttcttcttgttttgaaacaaaagtagatattatcaaggtgtactgtaaactctttgcccctctttttgttttttttattgtttcttaaacgtgctattcaatccttgtagacgaatcctcatccttctcctcttccttcttatcgtcctcatcctcattgttttcctcatcttcgtcttcctcttcgtcttcctctccggcaaacggatcgggccgttggggaccgtattccataaagcctatggcgcatagcgtgcctgctatggctccgctaaggtgtccttcccaggaagtggtggctttggcaaattgtgggaacatattccataccaggccgccatataggaacgttatcaacagtgaaatggcgataagcggtacatgtttgcgcagaatgccgctgaagaacagaaaaaaagccagtccgtatatgatgccgctggctccgatatgccatcccggtttccctataagaaaggtaagcgcaccgcatcctatccaaatggcaaagaagatgtagggggctatatgcctgtagaaatagaacagacaccacatcaggaaaaagagtggaatcgtattggcgaacagatgcttgaaactgctgtgtaccagtggatgtgcgaaaattccgaacacgccccgctgttccatcggatatactcccagtcgtgtgaagttccaatccatgcctgtctccaaaaactttaaaatgtataaaatgaatagcaggaataggggtataaccgccgccaatgccattctgcgtatatcatgcttcatatttcgtacagtgattgctatttttgtacaatactacggaatatttgacgaaaaccgaaaaaaaactgactttttattttgcctataagctttaattcgtatttttgggcatcgctacatggcttgtagcgcatataccgaaataattaacctttaaataatgcacaactatgagttatttacgatttgacaagaccctgatgattaatctgcaagaatctttgccaagggagatattgcggacgaataggtcgggagcctatcattgtacaacaattgtagattgtaacacacgcaaatatcacggtctgttggtgataccggtccccaacctcgatgatgaaaaccatgtgctgctgtcttctttggatgaaactgtaattcagcacggtgcggagttcaacctggggttgcataagtatcaaggaaaccacttcagtcctaacgggcacaagtatatccgagagtttgactgtgaaaatatccccacaactacctatcgtgtaggaggcgtcatccttcgtaaggaaaagattttcgtacaccatgaaaatcggattctgattcgttataccttggtcgatgcccattcggcaaccacacttcgtttccgccctttcctggcattccgcagtgtgcgcgagtacacgcacgaaaatgcgcaggcaagccgcgactaccagttggtagagaatggcattaaaacctgcatgtatcccggttatccggagttgttcatgcagctcaacaaaaagaatgagttccacttccagcctgactggtatcgtggtatcgagtatcccaaagaacaggaacgcggatatgacttcaacgaagacctttatgtgccgggatattttgaagtggatataaagaaaggggaaagcgttgtcttctccgccggtatctccgagatttctccccgcaagctgaagcagacttttgagtccgaggtagccgaccgcactccgcgtgacagtttctaccactgtctgaaaaactcggcgcaccagttccacaacaagcagggcgaggagcattatgtgcttgcaggctatccctggttcaagtgtcgtgcccgtgacttgttcatctccctgccgggtcttactttggccttaggcgagcaagatgaatttgaagacgtgatgaaaacagccgaaaaggctatccgtgagtttatcaatggagagccttcctcttataagatatacgagatggagcatccggatgtgctgctgtgggctgtctgggctttacagcagtatgccaaggagacctcgcgtgaaaattgccggcagatgtacggtaatcttctcgaggagattgttggctatatccgtgaacgcaggcatgacaatctcttcctgcacgaaaacggactgttgtataccaatggcaccgagaaagcggttacctggatgaactctaccgccaatggccgcccggttattccgcgtacgggctacattgtggaagtgaatgcgctgtggtacaataccctgcgttttgtagccgatatggttcgggagggaggcaatgaaattcttgccgatacactggacgctcaggcagaaatcaccggaaagtcttttgtagacgtcttccgcaatgagtatggctatctgttcgactatgtggatggttatatgatggactggagcgtacgtcccaacatgatatttaccgttgcctttgactattctccgttggatagggcccaaaagaaacaggtactcgatattgtgacgaaagaactgttgactccgaagggcttgcgtacactgagccccaagagtggcggatacaatccgaattatgtcggccctcagatacagagagactatgcctaccatcagggaacagcgtggccatggctgctgggcttctacatggaagcatatctgcgtatctataaagtgagtggcgtgtcgtttgtagagagatacctcatcggtatggaagatgaaatgacttcccactgtattggcgcattgcccgaactcttcgatggtaatcctccgtttgttggaagaggggcggtgtcatttgccatgaatacggcggaaatcctgcgtatcttgaagttattgtctaagtataatttataaaaggaggaacgaagatgaaagttttaatgtttggatgggaatttcctcccaaaatatatggtggtcttgcggttgcttcttatggaataactaagggattgagtttgcagggtgatgtggaaactactttctgcatgcccaagccgacgggcgaagaagaggacttcttgaagatagtgggcatgaaccaggtgcctatcgtgtggcgtgatgtcgattacaattatttgaagtcgaggctgacgcgcaacatgacgccggaagattattattctttccgcgaccatatttattcggatttctcttatatgcacgtcaatgacataggctgcatggactttgctggcggttatcccggcaacctgcacgaagagataaacaacttctcggtgattgccggagtagtggctcgccagcaggaatttgatattattcatgcccacgactggctgacgtatcctgccggagtgcatgccaagatggtgagcggaaagccgctctgtatccatgtccatgctacggactttgaccgttcgcgcggaaaagtcaatcctaccgtctattctatggagaagaacggtatggattatgccgactgcatcatgtgcgtgtccgaactgacccgccgcacggttattgagcagtaccatcagaaccccaagaaggtgtttgccatgcacaatgccgtctatcctctctcgcaggaataccaggacattccgcgtcccgaccattccaaagaaaagattgtgacattcctgggccgtatcaccatgcagaaggggccggaatactttgtggaagcagcttcgctggtattgcagcgtgcccgcaacatccgctttgtgatggccggttcgggagatatgatggatgccatgattaatctggcggccgagcggggcattgccgatcggttccacttcccgggcttcatgaagggaaagcaggtatatgaggtttacaagaacagtgatgtattcgttatgccttccgtttccgagcctttcggtatcgctccgctggaagccatgcagtgtggaactccttccatcatttccaagcagtcgggatgcggtgaaattcttgataaggtcattaagaccgattattgggacattcatgcaatggccgatgccatttattctctctgcaccaatcccgctctcttccaatatctgcaggaggaaggcaggaaggaagtggatggaatcacgtgggaaaaagtaggtttgagaatccgcgccctctacgaggatgtgttaagaaactatggtaaataacaaaaacaataatagaaatgagaactatctgtctttattttgaaatacatcaaatcattcatctgaaacgttaccgtttctttgatataggtaccgatcattattactacgatgattatgccaatgaaaccagtatcaatgatgtagccgaacgctcttatatcccggcattgaacaccctgattgaaatggtgaagaattccggaggtgcgtttaaagtggctttctccatttcgggggttgcgctggagcagttggaaatatatgcgccggctgtcatcgacttgttgcaccagctgaatgataccggttgctgtgagttccttgccgagccttattcccatggcctttcttctctggccaacgaggattgcttcaaggaagaggtgatgcgtcagagcgctaagatgaagcaaatgttcggtaaggcaccgaaggtgttccgtaattccagtctgatttataatgacgagattggtgcgatggtggcagctttgggattcaagggtatgctgacggaaggagccaagcatgttctgggttggaagagtccgcactatgtataccattgctctatgaatcctaacttgaagttactgttgcgtgactttaagctgtctgacgacatcagcctgcgcttctccaactccgagtggaacgagtatcctttgtttgccgacaagtacatcaactggattgatgctctgccgcaggaagagcaggttatcaatgtctttatggaactctcagctctgggtatggcacagccgttgtcttccaatattctggaattcctgaaggctcttccatactgtgccaaggaaaaggggattactttctccacaccgacggaaatcgttaccaaactgaaatctgtttcccagttggatgttccatacccgatgtcttgggtggacgaagaaagagataccagctgttggctgggtaatgtgatgcagcgtgaagcattcaacaagctgtatagtgttgccgaacgtgtccatctctgtgatgaccgccgtatcaagcaagactgggattatctgcaggcaagtaacaacttccgtttcatgactaccaagcaaagcggtgtcggtttgaaccgtggcatttatgaatctccttttgatgcttttaccaattatatgaatattcttggtgactttatcaaacgtgtcgattctctctatccggtggatatagataatgaagagctgaatgcattgctgaccactatccagaaccaaggtgccgagatagaggaactgcataaggaattggagaaagcacaggccaagttagagaagataaaggctgcagaaaagaaagagagcaaggctacagctaaatctgccgcagaaaaaccggcaaagaccaaggctcctgccaaaaagcctgccgcaaagaaaacaactaaaaaggctgctgaataatatcggcagcttgtcccatcaatcaaaaaagccttccgctcaacaatgagtggaaggcttttttatggaatatctgtcagttacttgttgaaactggtgtatgtaacttctattttcagcggagattccacttcaccttttgcattctctttcgggccgccttttagtttggcatatcccggcttaaggtcgttttggataccggtcatggttttgttaccgctactacttgtactgttgtcataggtaatggaaaccggaatcagcaataccttatcccagtcttcattttctttgttccaagttttctcccactctgtctcattccaagaactgccggctttgtctttggcggctttcttggcagcttgtttttcgttgatgcaagtggtaaccaaacgggctatgttgctgaatacatattgattagtagcaaatgcattgtgggtggttgtaaatgaggtaatattatccctgactttgttctcttcaaagaagctcttcaagtcctgtttacgtatcaacagcacgtcattgggagcactcatgctatattcgtagtcactgtttatattgtaattcgtgaaagtcagcttcacggcattcagggtgtcattggtcagtttgttgtatattgaatcgtatggcatgatagcttcggtgaagataccggcaggagatttgatataagtgtgttggggttcggcagccttttcctttatcaaatcagaattcatgaactggtttgcctggataacctctttggtagaggcaaatacagtctgcatgctatagaacaaagagtctgtaccatcttttttcttcagtgctacaccggtagtatcatttacgtggtggaaacggaattgcatatttaaagccacataatccacatagaggatggttccatctccgtaatcgctctttacatatactcctttgaaaatcttgtctatgaaagttgcggcgtctttaaagtattcgggatgctcgcgataaaccttcaatattctgtcttcgccgaaagttttcttgtccaatgggaacgtcacattgggatagaaagtgtaataaccgttattgtccttttcaaatctcacagagtccggaacagacgtatcgaaagctgaataagccttacgtccgagcagggacttggggtcgtacttgttgtagtactcttccggattgatattggtatagcgatttttgtccagcttcttgtccaattcatagatactcatccggcatgcattcagggagtcgccgaaccaactggaataatagactgcaagttgcactgaaactaccgagtcggcagtcattgtaccagttgccttgattggatttccttcactgtcccgttcggtcactttatacacttccggaagggagaagttttccgtacagttcagctccgtaaggaaacttgtttcgtaataaccgaattccgggtcggaaaacttgcctatatagccggtactcgttttggcaaatacagaatcaacggcaaatgaacgtgttgttacattaaaagtagtagtatgcgctgacatgccgtcagaatcgggcaacatacccagacctaatgttccggtgttgtcatcgcatccaaagaaagtcaggactgccaaaagcaatgttcccaggtatcttactttcatagttttaactgtctaaatcgattttatttttgttctgtttcccataccttgtcgtagaagtcattgcaggcttcagcaaagttctcgggagattgatattccaataccggttttccggattcgcgggcatagttcagtacttcctcattgacgtgttcgctttgctggataatgccgtcggagaagtcagcagccagtttgcaaagtgctgtgtagtcaatgggttccttcaatcctgcaatatctttcttggcgatgcctttcaacaatagcttgttagagaagtctgcgtggaaaggttgtttgaagtcatcttcataaagggaaaatatgactttggcatctctgaaggaaggttcgtctttataggcttttttgatgtacagaggcgctaaagcggtcatccagccgtggcagtggatgatgtcgggacaccaacgcagtttcttcaccgtttccagtacaccacgggcatagaagatggcacgggcatcattgtcttcatactcttcaccattttcgtctgttacctgcaagcggttctggaagtagtcatcgttgtcgatgaagtatacttgcatacgtgcagactggatagaggcaaccttgatgatgagcgggtgatcggtatcgtcaatgatgaggttcatgccggagagtcgtatcacttcatgcagctggtttctgcgttcgttgatatttccccatttgggcataaacgttctgatttctctgcctttttcttgaatagcctgaggtaggtttctgcctacgagggacatttcggattctgaaacgtaaggggtaatttcttgggttataaataaaaccttgttcgcctttgtcataataacaatgttctcaattattctgcaaagatataaaaaaaatcgggcaataaagcaaacagagcccgtctataattccttatgaattgttaactgcttgttattcagtgaaacagctgcttttggaattgccggaaagtgtactgagttttgcattaatttgcgatatttcttctttatatgctaaataatggtttattttgcaccgcttttgcgaacaaccaagttattatataaccaattaaaatggaaatagtacatactatcaaggacttgcaggccggactttcggctttgagagcccagggaaagaaggtaggtctggtgcctacgatgggtgctttgcatgccggtcatgcctcattggtgaaacgttgtgtggcagaaaatgacgctgccgtagtaagcgtttttgtaaatccgacccagtttaatgacaagaatgatttagtgaaatatccccgtacgccggaggctgattgccgtttgctggaggagtgtggagcggcatttgtctttgcaccttcagtggaggagatgtatccggaaccggatgcccgccgtttcagctatgcgccgctggacacagtgatggaaggagcattccgtccgggacattttaacggtgtctgccagattgtgagcaaactgtttgatgctgtgcagccggatcgtgcctactttggcgagaaagatttccagcagctggcaattattcgcgagatggtccgccagatgaaatatcctttggaaattgtagggtgtccgattgtgcgtgaggaagacgggttggctctgagcagtcgcaatgcccgtttatctgccgaagaacgtaaaaatgcactgaaaatttcgcagactttatttgaaagtcgtacctttggagcttcacatacggtagctgagacacagaagtttgtggaagacaccatcgcagccgcccccggattgcgtttggaatactttgagctggtggatggcaataccttacagaagattaccgattgggaggaaacttcttatgctgtgggttgcatcacagtattctgtggggaagttcgtctgattgataatatcaagtacaaagagcctgctgccttgtaatttataattagtaattcgtaatttataaagatatgatgattgaagtgttgaagtcgaaaatccattgtgcccgcgtcacggaagcgaacctgaactatatgggaagcattacgattgatgaagatttgatggatgccgccaacatgattgccggcgagaaggtgtatatagccgacaataataacggtgaacgttttgaaacctacattattaaaggcgagcgtggctctggcaaaatttgcctgaacggtgcggcagcccgcaaggtgcaacctgatgacatcgttattatcatgtcctacgcgctgatggactttgaagaagccaagtcgttcaagccgacggtgattttccccgacccggcaacgaacaaggtggtgaagtagtctccatattgaaatatggaaataaagccctgtttgcaatttatttgtaaacggggctttgttttacttctgattcttctccgcagggttcgtatgagaatgaggagccgatttaatcttgtcgagtaaatacagaatctcagtttggacatcgaaattatatctttggtaatcctgataggtgggcatcaagtctggataaagtgtgtgggcacaccggtctttgcccggaaagcatatttgtatggagttggagatagagccttgcataccggtatagggtagccggaataaggtttgttccatgtaggtattgggggcttgtccgctgggtattcctacaagggtagcacccattttccacagatagaaagtgtagtggaaagctgcactgaaggtacgttcgttggtaatgacgtaaatgtgttccggagtatagagcgcctttccttgttgctttctcagttcttccggcacactggatatacagttcttgatgaagtcggtccgtcgctgttctatgtttgtggtgtctgcttcgtccgtactaaaagtgtagtcaccgtaggcatagtctgttccgtatgcttggttgaaatcctgtaagtttgtctgtagtttttgcatgtagaggggagagatgatacgatagaattctatatccatatccgtttgcaggaagtggtcgccgaacagttggtaaagtgtgggtaggacaattggagtccagccaccgctattgttgcgcaaatctatgatgagggtggaggaggcttccttcttcatctctttcagcatatgggcgaaaacttcggaaagggacgggagttgccgaatggctagcagggtatcggcgggcatctcttgtttcaggatatcccgataatagaatcctatttgccggtataaatctttcagcccttgtttttgcatatactcaaaattatcccgtgccatgatactgttgatattgatgagcattatttgcttgtcgttgtctatgaactgataggccagttgtttgtctgtataagctttccaactgttattgtgttgcatgggtgtgttttgcacttcctgccttgacaataagggaagggttaatcctcttgatttgccgtcgggagtaagaagtgagaggtgaaggttgtctttcatttcagggaaaagctgtctcaagaaatgttccgtaggcatggacctgcatagattggcataacggtcatataggttttcactggcttggatagcggcagtgcgggccagtacctcttctaaagaatctccgttgatggttgtgatacggctacctaacaagtctttgtacgtttcagggattccttgaagtataatgccgtcggggatggtgcgtacttccagtgccaggtaacgctgatttgcttgttgattggctgtgggaggtaaaaggtaggtatgtccgtcttgcagattggataggaaaatgcttaccttgtcaaaaaaggtctgtttcgtaccgggagtccggcgtaactcgttctccagatggaaagcttgttcgtagaagaatacttttcctccgaagccgctgtaagggtcgggatgggttgctgccagttcttttaccagataccgaaagtctgaggcaagggaatccccgtttaggggctcttgggcgcttgccaatagggaagccagacagggaaggagggatagataaatacgtttcatattcttgaaatatttaaattgtatgctagaaggggaaagtagagggagaggttgtagtagaataaaaaaggtggagttcgtatgtctccacctttcatgacagattcttatttttttagctgctcattcatcgctgctgctgcctttcgtccgtctcccatggcaaggattacggtggcacctccgcggacaatgtcgcctccggcaaagatggtcgggatggacgactgcatgttatcattgacggcaatcgttcccttccggcccaattccaatcccttgatggagcttgggacaatcgggttgggagatacacctacgctgacgatggcaaggtcgatgtcgatggtttccgtggctccggggatgggtacgggactgcggcgtccgctggcatccggttcacccagttccattttctgaagcaccacttgtttcacttttccttgttcgtcggcaatgtattcgattgggttgtggagggtcaggaattctacaccttcttccttggcatgtttcacctcctcgatacgtgccggcatttcttcttccgaacgacggtagataatcatggcacgctctgcaccgagacggcgtgcggtacgtacggagtccatagctgtatttccaccacctatcacggctacgcatttgccgaaaggaaccggagtatcggagtcttcactggcggcatccatcagattgacacgggtcaggtattcattggacgagaggatattgatggagttctcgccggggatattcataaagttgggcagtcctgctccggaagctacgaatatgcccttgaatccttcctcttccagttgttccacgctgagcgtcttaccgataatgcagtccttgacgaattccactcccattttggcaaggttgtcaatctccacatccaccactttgttgggcaggcggaactccggaatgccgtatttcaatacaccgccaatctcatgcagtgcttcgaaaacggtaacgtcatagccatactttgccatatctccggcaaacgacagaccggcgggacccgaaccaatgacggcaactttgatgccgttcttttccttgatttccggtacggagatttgcccgctctcccgttcgtaatcggcggcaaagcgttccagataaccgatagctaccggcttctcgttcatcttcaggtgtatacatttggattcacactgcttttcctgcggacagacgcgaccgcagacggcaggcagtgcactggtttctttcagtgtcttggccgcttcgaggaattctccgcactcaatgttcttgatgaagcgggggatgtcgatacctacgggacagccttccgtgcagcccggattagcacagtccaggcaacgcttggcttcggtcagtgcctgctcttccgttaagccctgattgacttcctccttgcggctgtgcgaacgatattccgcatcgagttcgttcatctctacacgtggaatggcagtccgttctttggctttcatggatttgcgtaactcctgacgccatgcagcattacggcttttctcatcttccatgttttcaccggtagcttggcaggtctgaggttcttccagcttgtgcatctcctcgcgttcgatgtttttaaaagcgcccatacgcttcagcatctcgtcgaagtccacttgatgtccgtcgaactcagggccgtccacacatacaaatttggtctttcctccgatggtgattcggcaggcgccacacatgccggtaccgtcaaccataatcgtattcagggatacatccgtggggatttcgtatttctttgtcagcaaacaaacaaatttcatcatgatggcggggccgatggcgaaacacttgttcaccttctcgcgcttgatgacttcttctacgccttccgtcaccagaccttttcgtccgtaggaaccgtcgtcggtcatgataatgacttcgtcggagctttcgcgcatctccttttcaaggatgatcagttctttggtacgtcctgccagtacggtgatgacgcggttgccggcagctttcagcgcttgcacgatagggagcatgggagctacgcctacaccacctccggcacagaccacagtaccgaagttgtcaatgtgcgtagcttgtcccaacgggccgacaacatccgtaatataatcgccttcgttcagttcgcaaagacgggtagaggagagcccgacttcctgaaccaccagtgtgatggttccctttaccgggtcggcttccgcaatggtaagcggcatacgttcgcctttttcgcccacacgtacaatgacaaagtgccctgccttacgtgatttggcaatcaatggtgcttcaatgactaacttaaagaccttttcagaaaagtgttctttgctaatgattttattcattatctaataattttgttggtgtaattacgcaattactgtcagattgatagattttgcaaagataggggttatttggtaatatcaaaagaagaatagggtaaaactgcatgttgtcactggataacattcctttgtcactataatttgttcactttctacagcctgcctacttttgaaataaaaaatgaggaagagtatgtatcgaaatgtttttttaggggcaattttattgagtatgcctttggtggtttggtcgcagcaggatacgattgccgaccagcgtttggaagaaattatggtaactgctaaactcccgttggtagaaatatctgccggtaaaacaagttaccggatggatgcgtcagtcactcaaagtacgggaagtctttatgatgttcttgcttccctgccgggagtcgtgatagattccaatggtaatatcttgctgaacggacaaagcggtgcgacgattctgatggatggcaagcctacttatctttcgggagatgaattgatgagtctgttgaaatctactcctgcaactaatgctgataagatagacttgataacccagccttccgcacgccacgatgcggcgggaagctccgggttgattgatatccgtacaagaaaaatcagactgcgcggtgtgaatctggccttgaacggcaatggcagtcttggacggacgggtagcggttatggaggtgcctccatgaatatccgggagaataagttcaatctttatttgaactattcgtattatcaggggaaggatgtcatagacttgtttatcgaccgtgcgttcgaacgggatggaggaaggatgatgcaggactcttaccggaagcgtaggaattattcgcactattttcgtaccggatgtgattattatctcaatgagcggacagtttggggagtctcattgggtggaaacttttcccggcaaagggaaaatgcaggcatgtttacggaaatccgagaaaccggagttgcgggaaatacttacagccatgcggagcaaaaccggaataatgtttctgccggaaccagtatggtgcacaagctgaaaagagaagggggagaactcagcgcttcttttgattatttccattactaccgtgttggaaaccagttgatggatagttttaagcccgatacattgaaaggggatatgaagggaaataccgacttatatgtcggacagatagatgcggtttatccattgagtgaggtttggaagttacaggccggagtcaaaacctcatttgttacgatagacaatacggcaggttatatgcgtccgtcggtttccggctggctgccggacggggcacttggttcccgattcgtatatgatgagaatatcaatgcctcttatctacaagtcggctatgagaaagaccgcttgaaaatctcagcgggtctaaggttggaacatacccatgtacacggggattttggaggaaatacacaacagaaagactcttcgtttacaacgaattacttccatttgtttcctactattgctttgcaatacggtttgacttcggaacatctgtttcagctttcgtatggcaggcgtattacccgccccaattatggtgatttgaatccttttacctatatatttgatgactatacccatgaagggggaaatacgaagctgcatccttctttctctgataatatagagttggggtatgtgtatcgtgactggtttcagacagtgctctttttctcgcatacagatgatgctatcatgaagagctatcgcgaacaggaggggcggcgtatctatgtaatgccccagaatctgtcttcctatgtacagacgggtatgcgtgtacatgccgccaacctctcacctgtttctttttggaaggtgaatctgaccgctatcggtatttataataattatggttggacggagcaagggcagaaaatgaaaaaccgtatgtttaccccgatattcggctgcatgaaccagtttgctttcacttccgtatggtcggccgaactttcggcaaattataatggacgaatggcctacggacaagccacagtacatccggcgctggaagtgaatgtcggcatccaaaagaagatgttccgtaacagatgcaccgttaccttgtttgccaaggatgtattcaacaccaattatcaaaaagtagatattcaatctcccggtgtgcaggcgtttgttgacgaacggcacaacaaacgtgtgctgggtattgctttcgcctggcgttttcaaaaaggcagcgagacaaaagaaagcagaaggaaaaaagaaatagatgaaacaaaaagagtaaatttgtaactgttatgggcagactgtggaacaagtggctggtgccggcattatttgccgtgattctttttctgtgtattcgtgtggcgaatgatattccgaaacatgaatactattgggaaagtaatgagtggaatttcatgctgaaggatatgcttgtggtactcttcatgtcttatcctatcttttttctattgaagtattggcttcgtttgtgccggaagcggaagttggtatggtggcaggaatacggggtagttgtcctgacggttcccgtctggtgtcttctgacgatgtgggtcatccgctttttgatgggggtaagtcttgatttatacgatgtgcctgttccggccatagtcagtatgttgcttggcggcttcttttatatattcttgcgtaatcagatgatacagaaggaaaatgaagctcaacgcctgcagttggagaagataaaaaatgaccagctccagacagaactgaaattccttaaagcgcaatatcatccacactttctttttaatgtactcaatacggtttattttcagatagatgagaataatgaggctccgcggcatactcttgagcaattgtccgatttgcttcgttaccaattatacaatgatggggagaaagtgcaagtccgtgtggaagtggaatatctgaaacaatacatcagcctatgtaaacttcgtgctacgaagcggctgcagttgcaggtgcatttcgatgaaatggaggcgcaggttgagatttatccattgttgtttgtaccgttggtggagaatgctttcaaatatgtgggagggaactattttatagctatggatatgtgtctgaaagaaggcaagttgtgttttagtattgaaaattctataccggaaccattagtgcaccagaaaggaaaacatggaatcggcatagaaaatctgaggcgcaggctggagctgctatatccggagcgtcatacgctggacataaatagaggagatactttgtttagagtaaaacttgtgatagaattataggatgaaacaggtaaaatgtgtaataaccgatgacgagcctactgcatgtgaaggattgcaacgctatgtggaaaaggtggatttcctttctttaatgggtgtatgtgaagatactatgcagttgaacactcttttgcagactgagcagccggacttgttgtttctggatattgaaatgccttatctttcggggcttgaactcttggcatctcttgcccatccgcctcatgtgattatcacttccgcttatgagcagtatgcattgaaaggttatgaacttgatgttacggactatctgttgaaaccgatttcgtttgaccggttcctgaaagcggtgaataaagtacatggtcttttgcagcaggagaaatggccggatgaagctaataattttatatttgtccgttcagaccgtcagatgcataaggtgttgtttaaggatattctggtggtggaggggctggaaaattacgtctgtatttatacggaaagcacaaagctgcttgtacgttctaccatgaagcgtatgatagaggctcttcctggtggagtatttcagcaagtccataaatcatatctgataaatttggaaaagattgagatgatagatggcaatcggattatagttgggaggcatactgttccggtggcacgtaatttccgcgaggaggtgtttgcacgtattttgaagaatactttgtagttgcgcaggagaagcttgtcatgataaaactccgggcacgaattacatggatttcacgttttttgctaaccgcaactgtgaaattcatgtaattcgtgcccgaaagaaagtgtcaaaggcgtattgctgcacgtgactattatggccttagtctattatttcaaatcccgtatacggaaccaatgcctttggtatgcggattccttctggagtctggttgttttccagcaaggcggcaacaatgcgtggcagagcgagtgcggaaccgttcagcgtatggcaaagctctgttttcttttctgccgtacggtagcggcatttcagacggttggcttgataagtgtcaaaattagagacggaacttacttccagccagcgtttctgtgcttcggaatacacctcaaagtcaaaacagagggcagccgtgaagctcatatcgccaccgcaaaggcgcaggatgcggtaggggagttccagcttttgaagcaaaccttccacgtggtccaacatctcctggtgggattgtttgctgtgttccggtttgtcgatgcgtaccagttccactttggagaattcgtgcaggcggttcaagccacgtacgtctttcccgtatgaaccggcttcacggcggaaacattgtgtgtatgcacagttcttgatgggcaactgcttttcgtccagaatcacatcacggtagatgttggttacggggacttcggcggtaggaatcaagtagaggtcgtccacttcgcaatgatacatttgcccttccttgtcaggcagctgtcccgtgccgtagccggaagcggcgttcaccactgtgggcggcattatttccgtatagccggatttgcgtgcttcgtccaggaagaagttgatgagtgcgcgttgcagttgtgcgcctttgcctttgtatacggggaagccggcaccggtaatcttgacacccaggtcaaagtctatcaagtcatatttcttggccagttcccagtggggcagggcgtctttgggcagctcggtttccataccacctattttctctactacattgtcgtcggcacctacgccttcaggcacgctgtcgtagggaacgttggggatggtataaagcaaagtctgcaaatcgttggcagcctggtccatattggcttgcaagtccttgttgacttctttcagctcggccacgcggcttttggcggcttctgcttcttctttcttgccctccttcatcagttgtccgatggatttggagagtgagttggcttctgccaggtttttatctaggatggtttgattggcttttcttttgtcattgaagtccagcacttgtgcaatggtttcttttgcattcttgaagtgcttcttttccagtccgcggagaaccgcgtcggtgttttctgtaatttgtttgatggtaagcatatcttatacttgtttttatgttattcggttttgtgagtgcaaagatatggaaaaaacaaataaagtgttgcttttgacataaaagaaagggatgcaacctattcggattgcatcccttttccttatttcttgttcggaaacttatgcttctgcattttctgcagggataacagaaactgaacgtctgtcttccttgcccactttgaactgtacagttccgtctactaaagcgaaaagagtgtggtcttttcccataccgatgttattacccgggtggaattcagtacctctttgacgaacgatgatgttacctgctttgcaagcttcgccaccaaatatcttaacgcctaatctcttgctctgtgattcgcggccgttcttagaactaccgacaccttttttatgtgccatttcttcttactgttttaattgattaagctactacttctgtaattgttaactctgtgaattgttgacggtgaccgttcaacttacgataaccttttcttcttttcttgtggaaaacaagaactttatcgccttttaccatgtttgatacgacctggcaaacaacctttgcaccctctactgtgggagcacctacggtgatgttgccgtctttgtctaccaaaagaaccttgtcaaactctactgttgcaccgttttctgcattctggatgtggtgtacaaacagctttttgccagcttctgctttgaattgctgaccgttgatttctacaattgcgtacatttcttatatataatgtataagttagctccgtcgggtggtctctaatcacttagaaagcacttggtcgaacccggtgcggaataatcgggcacaaaagtactctttttattctaaatggacaaatgttcttttgcttttttgttcttttaatgcagattgtacttttagattattggagaaaaactgtttcatcaaggagaaacagtccgtgtagggatggtttctgttacaaaatgaatttcagaacatagataccggccagcatcagcgccattacaagacacgcgaatatgacgagtagcacaagactgtaagtcagcatgaggatagtgcgccaaaagcttctccaccaggtgcagcggtacaattgtttgtaatcccaacagaataggacgaaaataagccataaaggcagctcatacaaatcgtctacctttgcgtacccgttgaaaggcagcacgatgatgctcagcaggagtatctggcaagctatgtaggcttgtatgaacacatgctccgtggtattgtagtttaacttatatttccggcgtcggaaggcaagttgggtggcaagtgcaaacaaaggcagtgtggcaatgatgcggaatgccttgtttccgtgtccccagctcttcatcagattccatactttcattaggaaaggagagttctggaagactttttccagtctgtctcccacttccgaggtgtcgtttacaaattcatcgatgaggtcgccatcatcgctgttctgttcggatacctgtgtggcagaagtggagtcgttcttctcttccagtttgttcaagcttttctccaggctttttatagtgatggcgagggctcgcttttcctctttgctataggttttctccatctttttggtaagcttctctttagcggcaatgatttcttctttgtctgtctgctctgtcttttccgtcttttcttttttgctcagagcttccgggtctaccagttgtacagccatgatataaagggctgcaagaatgaagagtgtctggaacgggcgaaaatactctacacgcttaccgccgatgaagtctctaatcatgtatcccggacggtagaggagttccagaagggtacgtccaaagccattatctatattgaagaagcctccggcaatgtttttaagcgcgttgctcaaccgatagcgtggagtgttacggctttgtccgcaacggttacagtagttgccggtataggtggtgccacaattcaggcaggtgcaggtttcgttgccagcgggaggagtttttctcccttgtatcagcttgatgtgaaatgcgcgtaagcgtactgcgcaggggtgccaccatgagtcgatgaaagtttttgctttgttgggtagtatccttcttttttggaggataccccacaatgtcagtatgaaaacaaccgggaagaagttgctgtcgtcggtcatgtccagctcttcaatagccagccagaagagtgtcactagaaggaggatttgccagacgcttatccttttctgtttccggggagaagtggcatgcgcattttccggccggatgggattttcaatcttgaatatggaaggatgctcctcctgaactgccagcagttcttccaaggtgttcattattttccggtgtgggtacttctccaattctttggcagtggttactccgtgggtgactccagcaaagtctactccggccgcttgggctgtttccgcatctaccgtgctgtcgcctatatagagggtctcggctttgctgacatgtagccgcttaatggcaaggagtagcccttcgggagatggcttggcggctttcacgtcttcaccacccacgatgatgtccataaaatcttcaggaaaatgctggttgaggagttccttgatgcggaatcggtatttggtcgagatgattccgatgcgggcgccggagtccttcagtgcagtcagtacggacttggtttccaggaaaagcaccgtgttgacagtcatatgcgtatcggcctcttttcggtattctgccttgaatcctgccagttgtccggcatctgtcacgccggtgaggatggaaaaagagtcttccagagtcttgccgatagtacgtttgatgtcgtcatccgtcacctctgtatatccgtgacgggtcagtacgttgtggaaacaagtgacgattccgcgggaagaatcagcaagcgtataatcaaagtcgaaaagataggtcgtgtaattcattgtgactttttgtgacaaagatagtgtaaagtatatttttacaaaataaaaaagaggattaatcggaattttgtattacttttgtttgcatgaattctgtagaaaagtgacaagatgtgtaagtgttttatccggttaggttgttatactatacacgttaaccctataatgttatgaatttgataaaatcttgttgtttgtttgtggtcttttcatcctttctggcatgcacctcgcaggtgtcggatgtgaagagtgtgtcttatacagagtttgtgaatccctttatcggtacagattttactggaaacacctatccgggtgcccaggcgccgtttggcatggtgcagctcagtcctgacaacggactgccgggctgggaccgtatttccggatatttttatccggacagtaccattgcaggcttcagccatacccatctctccggaaccggcgctggtgacttgtatgacatctcttttatgccggtgacattgccttataaggaggcggaagctccgctcggcattcactctttgttctctcattcggaagagtcggcaagcgctggatattatcaggtgcgtctgaaagattataatataaatgtagagttgacggccaccgagcgttgtggcattcagcggtatactttcccaaaagccgatgctgccgttttcctgaatttgcggaaagccatgaattgggattttaccaatgattctcacatagaagccgtcgattcggtaacggtgcaaggttaccgttactctgacggttgggcacgcgaccagcgcctctacttccgtacacgtttctccaaaccgtttgctgcgatgcagctcgatacagctgccatagagaaagaaggcaagcggatagggacatctgtcattgcacgattcgactttcagactaaggaaggagaacagattcttgtcagtactgccatctccggtgtaagtatggaaggggcggcacgtaatctggcagcagaagtacctgatgatgatttcgacaaatacctggctgctgtgcaggatgattggaacgaacaattgtcccggatagaaataaaatgcgatgaccgcgatgagaaagtcaagttctatacagctttatatcattcgatgattgctcctaccatttacagtgatgtggacggcgcctattacggtcccgacaagcaagtgcaccgggtagagggctggacaaattacagtactttctccttgtgggacacttaccgtgcggctcatcctctctatacttttattgagccggaacgggtgaatgatatggtgaagtccttcctcgccttcttcgaacagaacggccgccttcccgtatggaattttcaggggggcgagacagatatgatgataggttaccactctgtgccggttattgtagatgcctatctgaaaggtattggggacttcgatgcgaaaaaggccttggaggcttgtgtagctactgccaatatcgattcctatcgtggcattgggttatataagaaatatggctatgttccttataatgtgacggatcagtataattcggaaaactggtcactttctaaaacactggaatatgcatatgatgactattgtatagcccgtatggcagagaagctgggcgataaggaggttgcggacgagttttataagcgttcccgtaattaccggaatgtctacaatccggtaagttctttcatgcagccccgtgatgacaagggagagtttatccggaacttctcgccggacgactatactccgcacatctgcgagagcaacggctggcaatacttctggtctgtgcagcaggatattgacggtttgatagttttgaccggaggtaaggaacggtttgcccagaagctggacagtatgtttacttacaatccttctgcagatgatgagttgcctattttcagcaccgggatgattggccagtatgcgcatggaaatgagcctagccatcacgtcatctatctgttcaatgctgtggatcaaccttggaaaacccagaaatatgcagcccgggtgatgcgtgaactctaccagaacactcctgccggtttgtgcggcaacgaggattgcggacagatgtccgcctggtatgtgttcagtgcgatgggcttttatccggtagacccggttggtggaaaatatgaaatcggtacccccctatatccggaaatgaagatgcacctgcccggtggaaagacctttacggtactggcgccggcggtgagcaaggaaaattgctacattcaatctgtcaaactcaacggtaagaactatgacaaaagttatattacgcatgaacagataatggatggaagtgttttcgaatttgaaatgggggataagccaggtcaggcatggtacagtccccgataaccggctaacatatgaatgaacatttcgacttgacatataaatcccttttccgcaggtattataccaacctgctgttctatgccacacgcattgtgggggaagaagatgcggaagatgtggtacaggatgttttcgtggagctgtggaagcggaaagataccatgaaggtgggagagcagattcaggcttttctgtatagggcggtgtatacccgtgccttgaacgttctgaagcatcgggacattgtgagtggctatgaggctgtcatgctcgaaatccataaaaagagggttgagttctatcaacctgacagcaatgatgtggtgaaacggatagaggatgccgaactcaggaggaagctgtccgatgccatcaatgaattgccggacaagtgccggatggtattcaaactcagctatctgcatgatatgaaaaataaggagatagctgatacgatgggagtgtcattgcgtacggtggaggctcacatgtacaaagctttgaagttactgcgcgataaactggggtatctgaacctgatgttggctctgtttttcatcgggaaagtaagtgtttttgcgagcagcgttgttttattatcataatgaaggaaagaatgaataagttgaatgaggagatattggccaagttccttatgggtgaatgtacggaagatgaacttcgtgaggtgaacgcctggctggaagggtcgggtgagaatgcacgcgaattgttcaggctggaggagatttaccacttggggagactgggggatacttcgaatacacaagacatagaaaaggccgaaaagcgattgtttaaaaggctggaacaagagaagacgaaacaatacaaggtacggaggatggttgggtggatgcggtatgcggccgtatttgtgggcttcttccttttgggaactttcggctatcttttttatcagacttatagccagccggaaacattactggctgtcaccactcatgataagattaaggaactgaaactgccggatggaaccaaagtctggctgaataaaaacactaccctgaaatatccacatgagtttgcagggaagggaagaaaggtttatctggaaggagaaggatattttgaggtgatgaggaatctggaaaaaccgtttgtcgtacagagtgaggccatgcaggtcagagtattgggaactgttttcaacctcaagtctgacaaggctaagatgtctgcagtagctacccttttgaaaggcgaagtagaggtgaaaggtaatcatggcgagggtatgattatccttgcccccggacagaaagccgagctgaacggaatgactaggcgtctggtggtgaagcaggtggatacgggaatcgaaaactggcacaataatgagtttgtctttgagaaggctgacctatacaccattgcgcgtacattggagaattcgtatggggtgagggtaattctggcaccgaacatagatgtaagcaagacttactcgggtacactgaagaaaaaagagagtgtaggggctgtgctgaatctgataaagaatgccattccattggagtataaaattgtggggaacagtgttttcctctcctcaacgaagtaggaaggctgcacaaattcgagatatgacgagaagaatttatttaatactaacaactttctaatattatgcgaaaattaatcctattgtttttttttgtgagcagtgctttatggctgcatgccaaagactttacccggtatgtcagtcctcttgtcggcacgcagtctactttcgagctttccaccggtaatacctatcctgcgatcgcacgtccctggggtatgaacttctggactcctcagacgggtaagatgggtgacggctggcaatacgtctatacagcgaacaagatccgtggtttcaagcagacacaccagcccagtccttggattaacgactacgggcagttctccattatgccggtggttggcaaacccgagtttgatgaagagaagcgtgcaagctggttctcccacaagggcgaagtggcacttcctcattattataaggtatatcttgccgaacacgatgtggttaccgagttcacccctaccgaccgtgccgtattgttccgtttcactttccctgaaaatgatcattcatacattgttgtcgatgcctttgacaagggctcttatgtgaagatacttccggagcagaatcgtattatcggttatactacccgtaacagcggcggtgttcccgagaacttcaagaactatttcgtgatagagttcgacaagccttttacttataaggcttctgtagccgatggcgtcttgagcgagaataaggttgagcaggaagccggacatgccggtgctgttatcggtttcaaaacccgtaagggtgaagtggtacatgcccgtgtagcctcttctttcatcggttttgagcaggctgaccgtaacttgaaggagcttggcaatgacaatttggaaacattggttcagaaaggtcaggatgcctggaacaaggtgctgggccgtattgatgtggaaggcggaacccttgaccagtaccgtactttctactcatgtttgtatcgttccttgttgttcccgcgtgcattctatgaactggatgaggcgggaaatccgattcattacagtccctacaatgggcaagtgttgcccggctatatgtatacggataccggtttctgggacactttccgctgtcttttcccattcctcaacctgatgtatccgtcggtgaacaggcagattcaggaaggccttgtcaacacctataaggaaagcggtttctttcccgaatgggcaagtccgggtcaccgtggctgtatgattggcaacaactctgcttccgtgctggcagatgcctatctaaaaggcgtgaaggtggaggacgtgcagacactgtacgaaggtctcatcaacggtacaaagaatgtccatcccgaggtttcttccacgggtcgcctcggctatgagtattacaacaagcttggttatgttccctacgatgtgaaaatcaacgagaacactgcccgtactttggagtatgcttataatgactggtgcatctaccgcatggcaaaagaactgaaccgtccgaagaaggagcagaaactctttgcggaacgtgccatgaactataggaatgtatttgataaggaaagcaagctgatgcgtggtcgtaatcaagacggccagttccagtctcctttctctcctttgaagtggggtgacgcctttactgaaggtaacagctggcactattcctggtctgtattccacgaccctcaaggtctgatagacctgatgggtggaaaagagtctttcgtagagatgcttgactctgtatttattgtcccgcccttgttcgatgacagctactacggccaggtaatccatgaaatccgtgagatgacagtgatgaatatgggtaactatgcccatggcaaccagcccatccagcacatgatttacctttataattatgctggggagccttggaagccccaatattggcttcgtcaggttatgaaccgcatgtacactgccggtcccgacggttactgcggtgacgaggacaacggtcagacttcggcgtggtatgtcttctctgcacttggtttctatccggtttgccctggtacggacgagtatgtactgggcgcccctctgttccgtaaggctaccctccatttcgagaacggtaagtccctgacaattgacgctccggataactcaccggagaacatgtatattgagtctctcaaggtgaacggcgtggattattccaggaattatctgacgcatggcgatttgctgaatggcggtaccttgaggtttgatatgggcagccagcctaatatgaagagaggtacgcagccggaagattatccttattctttctcgaatgaactgaagaagtaaagaatagtaataatatagtaagaaaagggttgcctcgaaaataagttgatatatcattttgttatttactatctgtattataggtgtttttcttgaatcaggtggaaataattatttacttcgttagtaatattgagcaaaatgatatatcaacttgttttcggggtaactcttttttttaggattaatgataaaaaagatactttttcagtaagtgtattttcattgtctgttgttttatataggaatgcgagagaatgaatctctcgaagtaatttattgtataacctataaattgtgtttatgaaagacaattatgcttttcggagttcgacgttcatgcgggctttattagttttgttgttcatggcagtttctatccagtggggctttgcccagttaaacctgaatgtgtctcgcggcacattggggacagtcattgaacaaatcaagtctcaatccaagtatcaatttttttatgacgacaaactggctgcgttgccggtagaaaacgtcaaagtgaacaatgcgtctatagaagatgctttgaatgttattctcaaagggaaagacatttcctataaagtggaggataacatcgtttatctttctgaaaagtctgctgctcctcaagagggcaaccaacaagggaaagaacggacgattaccggagtcgtgtcagatgacatgggacctctgattggtgtgaatgtattgataaaaggtaccagcaacgggtgtattaccgacctcgacggtaactttacgctgaccactacggaggcgaatccggtgattgtattctcttatatcggttatactacgcaggaaatccctgtgaaaggtaatgcgccgattaatgtaatgatggccggagatacccaacagcttgaagaagttgtggttactgcactcggtatcaagcgttcggaaaaggcattgtcctacaatgtacagcaggtgaatacagatgccattacttccaataaagatgccaactttgtgaactcattgagtggtaaggtagcgggtgtgaacatcaatgcttcttcatccggtgtaggtggtgtatcaaaggtagtgatgcgtggtacgaaatctatcatgcagtcttccaatgcactttatgtaattgacggtgtgcctattttctctggccgtggtactgccggaggtaaggagttcgactcccagggatcttcagaaccgattgccgatatcaacccggaagacatcgagtcaatgtcagtcctgactggtgccgccgctgctgccttgtatggttcggaagctgccaacggtgccattgtcattactacaaagaaaggtaaagaaggtaaggtgagccttactgtcagcagtaatactgaattcaccaatccgtttgtgatgccgagcttccaaaaccgttacggtacgggaaccggtggtgtgatgagcacttcaggagccatgagctggggagcgcctttgtctgcagccaataactacaattacagcccgagagatgattatttccagacgggtattgtaggaacagagagcatttctttgtcaaccggtacagagaaaaaccagacgtatgcatcggctgctgctgtaaactccaagggtattgttcccaacaacaaatacaaccgttacaactttacggtacgtaacaccactactttcctggacgacaagatgactctggatttcggtgcaagctatattctgcagaatgaccagaacatgacgaaccagggtacttacaacaacccgttggtgggtgcttatttgttcccgcgcagcaacgactggtctgatatcagcatgtatgagcgctatgacgctgcccgtaaaatttatacgcaatactggccggtaggtgacgaaggtatggtaatgcagaatccttattggattaactaccgcaatctgcgccagaacaagaaggaccgctatatgctgaatgccggtttgagctataagattctggactggctgactgtttcaggacgtgtacgtttggataactccaacaatgattatacagaaaagttctatgcttctaccaatacacagctcaccgagagctcttcacgaggtctttatggtattaccaagacgcaggacaaacagttgtatgcagacttcctggtgagtatcaacaaatatttcggtgaagattggtcactccaggccaacgtcggtggttcattctccgatatacgttcggatgcaatgaaaacacgtggtccgattgctgatggtggcgatgccttcagcggcgaaccggtaggtttgaccaactactttgccatccagaacctgagtgccagcaagacacagcgtttgcaggaaggatggcgtgaacagacccagtctctcttcgcttcggctgagcttggttacaagaacacttacttcttgacgctgaccggacgtaacgactggccttcacagctggcaggtcccaactccaacagcaaatcattcttctatccttcagtcggtggttctgttgtactgtctgagttaatgcctaacttgaacaaagattatctttcttttataaaggttcgtggttcatgggcatctgttggtagtgctttctccagatatttggctaatccccactatgaatggaattcaagttccggccagtggagtatcacgacccaatatccgttgtacaatttgaaacctgaacgtaccaattcttgggaaatcggtttgaacatgcgtttcctcaagaactttgaattggacgtgacatattacaatgccaagactatgaaccagacattcaacccgcagttgcctgtcagcggttggtcggctatgtatatccagactggtgccgtacgtaactccggtattgagttgtcgctgaattacaagaatacctggaaagattttacatgggataccggtataaccttctccagtaacaagaataaaatcctgactttggcagacaatgccatcaatcccgttaccggtgagctgttctctttgagcacgttgaatatgggtggcttaggtgatgcccgcttcttgctgaaagaaggtgggagcatgggtgacctttactcactgcgagatatgaaacgtgatgccaatggacagatttttgtggaccaaaatggaacggttgctacggaagccataacggacccggataaatacatcaagttgggaagcgtacttcctaaaggtaatttggcttggcgtaacaacttcatttggaagaatttcacagcaggtttcttgatttcagcccgtttgggtggtgtggtttactcacgtacacaagctatgttggactattacggtgtgtccgaggcttctgccgatgcacgtgatttaggttacgtgttggtgaatggtagagataaggtaaaccccgaaacatggtacggtgtagtaggtagcggcacgtctgttccccaatactacacttattctgctaccaatgttcgtctgcaggaagtatctttgggttacaccatccccagaaagttgttgaatgatgtgtgcgatatcaaggtttcgttggtaggccgcaacttgtggatgatttacagcaaggctcctttcgatcccgaaagtgtagcttctaccgataacttttatcagggaatagactatttcatgatgccggctttgcgtaacatcggctttagcttgagctttaaattttaataccaaacgatatgaaaaagaaaaatattataaataaattgattgttgctccgttggttatgggctttatgtcctgtaccggcaattatatggatatcaactccaatccttatcaaccgggtgatttgactccggatgattatgcactgggttctgccatgagtaacttggcaagtacggttatctcatcagatgtcaatacggcacagtttactgattgtttgttgggtggaccgttgggaggttattttgccgattcaaatgccggctggtccaatacaatatccaattttaatgctacaaatgactggacgcgtgtgttcttgataagtgaccgtatcatttcaacactttacggtaacttgagcacagtgaaacaagtatcggagaataccaataatccggttccttatgccattgctcaaatcataaaggttgctgccatgagtcgcgtgactgatgcgtatggtcctattccttattctaaaatcggtcaggatggcaagattaccattccttatgatacgcaggaagaagtatataacgcattcttcaaggaactggacgaatccatcgaggtgctgactgaaaacagaaatgcggcgttggttgcttctgcagatttcgtgtacagtggtaatgtacagaagtgggtgaagtttgccaattcattgaaactgcgtttggctatccgtattgccaatgtaagccctgctaaggctaaagaaatggctgaaagtgcagtgaatcacgagttgggtctgattgaaacaaatgcagacaatgctacatggaagtatttcggtacaattagcaatccgttgtttgtggcagtacgttacaatgaagaagcttcaggtggtgatacccatcctgctgccgacatcatctgttacatgaacggttacaacgacaatcgtcgtgccagctattttgaggaatcaaaatggcctggagagacttatgtaggattacgtcgcggtatcaacctcagtaagatgaaggagtatttcatcaattattcacgtgtgaagatttcctcttctgatcccgtgctttggatgaatgcggcagaagttgcttttttgcgtgctgaagccactgcaatctatggtttcaacatgaaaggaaccgctgctgatttttatgaacaaggtgtccgtctctctttcgaacagtggggagctaccggtgtagacagctatctggctgatgaaagcagtgtacctgctctttacaaagatcccgccggtcttaatacttatgaaaagaacctttcagccattactgtcaagtggaatgaaggggcatccaaggaagaaaaacaggaacgtatcattacccagaagtggattgcgaattggccgttaggtaacgaagcttgggctgactatcgccgtacaggctatcccaaactgttgcctgcaaccagtgaaggtaacttgagtggtggaattgttgatagcgagaaaggtgcacgccgtatgccttatccttctgaagaatatacaagtaatactgaaaacgtgcaagaggcagtaaacagctatctgggtggaccggacaacatggctactgacgtatggtgggcacgcaaataataacaataaatgctgaataattatgaaattatataagaaatcattcaaaggaatcgcgctggcagctttttccgtattggcattgtctgcctgctccgactggacggattcagagagtattaaactgaaagaacccggaatcgacgaacagtctcccgaactgtatgccaagtatctgaagaacttgcaggaatacaagaattctgaccataagattgtatacggctggtttgataatagtgagaaagttcctttcagccgcgggcagcacatgtcggatgttcccgacagcctggacgtaattatcgcaactactcccgatttggcggaattcgaattggaagatattgcaaatgtacatgagaagggaacgaaagtattctattccatcagctatgacaatatcttgaaggaacataccgacaaggtgaaagaaggaacagaaacatctgcattctcggcttatctgtcggctgagctgaacagactgatagctcttgaagcacctttcgacggtattgtagccgagtatcgtggtagcaatcctatctacatgtccgaagccgacaaggctgaagcaaaggcaaatcaggatactttcttcggtgtgatatccaactggaagagtgccaattcaggtaagcaactggtgttccaggggtatcctgccaacctgataggccagtctgtgctctcttcttgtgaccatatcatcttgattacaaatgatgtcacagatgttgcccaactggggatagaagcgcttcaggccttgatggcagacggtgttccggctgaccgcttcattgtatcggcatctaccgtctctctggatacaacagataagactaccggatattacaatgctttgagagctctgtcggaagccgcttattgggtgacagagccgtctgctgagtttataaaagctggtttggctattgagaacatgcagaatgattactacaatgcaaccaatacctaccaatacgtgagagaagctatcaatattatgaatcctgctcctaaaaaataaaagaatatcatgaaactgaaaagtatatatttagtatcgatggcattattggcaggtgtatttgctgcttgtaatgataatgacgttgagaatttcgataatcaggtgtatatcaacagctcggcgatgaccagcactgtgttgttgaaaaacacagtttccgatacggaaggttcattccggatttcaatggctcgccctgaatcacgggacataactatttccttgaaggcggacccttccttggtagctacttataacgccacctattatgacacagccgaggcgctgccggaaaattattatacggtagaaactccgcaggctaccattttggccggtgctgtcatttcagatgacatcactgtcagcttcaagaacttggcggaactggaccgtgagaaggtatatgtattgccggttacggtagaccaggcaagcatcggagtcttgaagagctccggtaccatgtactacgtgctgaagggtgctgcattgattaatacggttcctgatattaccaagaatctggtttacgtaacttggaccaatccggatgtagccaataatatgaataaactgacggcagaagcgttgattcgcgtaagcaagttcgacaagatgctgacttccattatgggtatcgaaggcaagttcctgctccgtatcggtgatgccggaattcctcagaaccaattgcaggtggctacaagcagtggcaatgtgactgatgagagtctggctattccgacaaatgaatggacacatatagctgtgacctacgatgcggatgcaaaaactgttatagtttacatcaatggtaagaatatgttggagactactttggactgcggtgctgtgaactgggggcagactatgactgatgaaggtaacggattctggattggtcattcatacaatcgtgaccgctggttggaaggtaacatctcagaggtacgtatctggaacaaggtgttgacatcagcagaaatcaatgcaaaggaccacttctaccaggtagatccggatgctgacggactggtttcttactggaagttcgatgaaggtgccggtactgccattcatgactatagcggaaatgagaacaatgctactgcagttgaaccattgacttggactgctgtggaactgcccgccaaataatttagttataccttaattcaaataaaaagatattgattatgaaatatatgaatcatgtaaaatcaggcttgctggcaatggcttttgcatgtgcaggaatatgctttaccggttgtgaagatgatgttgtcatcaacaccggcaacagcgacaagctggatactgtggatggcgtgtatggttatgtaaagtctgccgctggtgcacgtgaacttactccgatttccgtttttggcgacaaggttgctaccggacatctctattttgaactgagcaaagctgcagagcaggatgttacggtgaccttcaaagtggacgaagacgttttggaagcttataataagaagaatggaacaagctataaaatgtatcccgccgataagttgagtctggcgaacggtggaactgtcattatcaaggcgggcgaacagaagtcggcttctgtggaactgaatatcaatgcaggaggcacaatcggacaaacttatgctgttgccgtttctgcatctgccaataacggtgtggaagtttctacaaacaatcaggaatatatttacttggtaaagcctttggctgctattcctgagagtatcagtaagggtgatatacttacacattgctttgtggaagtaaatgacgagaacatcttgaatatgggtgaatataccatgaagagcgacggaaagcctttctttgatgtagtcagcatttttgctgccaatatcaatgtggatagcaagaccggtcgcgtacatgttttttgcaatgaccaggtttctttcttgctgagaaatgcggataagttcatccgtcctttgcaggctaagggcattaaggtggctatgactattcttggcaaccatgatgaggccggtatgggtaacctttctgaagctgctgccaaagactttgccaaggaactgaaggcttatttggatatctatggtttggatggcattgactttgatgatgagtacaccagttacaacaactccaaccccagtcccggcttcgaaaaacgttcacgtgccaacttcgcacgtttggtttatgagtgccgccaggtatttggagataaactgatcggtgtgtatgaatatggttcgcttgattctcccgatggcgaggtagaaggtgtgaaagttggtgatattgtggactatatgacctatggttattaccagaatcagaatcctaatggagcttttggccgtgaagcgtctcattttgagaacctgcccaaatccaagtatgctccgctgccttggaagattaatgatgagttgaacggaggttggaatggatttgacaagagcaaattccaaaaagtgaaagatgaaggttatggcattcagatgttctacaatcccaaaccgctgatgtatcagtattatacgctgctttcggaaataagtaaagtactttttgatgatgaagtggagtggagcggtaagtactggaaccgtactggtgaagcttatcaaggaaagatgatgggctatgaagatttggtcggtgaatggaaagtaacttccagtaactccctctttacctatgtggatgaagaaggcaatcctcgctggtgggattggaaaggcagtcaggattttgagaagaatgtaattatagagaaagatgaagaaggtaccggatatgtggtttacaactggggtactttccccgaaattaccggtaagtatccgatgcattgcgattactataacggtgcactgctcatctatccgcaaaccattcatgagggcgatgctgaagaccctgctacctacaagatgcatttcggtacttatagtaatgccttccagtggaaagcatatcctaagtatgataattattccatggatggcgatattgctcctaacggtgatattcgtatctatggtttgggcaacagatgggctatcaacccttataagtatgtaggcggtgagattgagaacgacatcttccccgatgttccttacttcgtgagtgagaactatacgatgaagaaggtacgctgatgccatgttttccgtaaactgaggtttcggaaaaatggatgcttgaaccttttcatacatgaaacaaaggagggctttgctcaaagtaatggggcggccctcctcaagcattctcatataacaagattctattatgaagctatacacttacttatacaataaacaatatgaagaaaaacatgaaatctagttccatactgttgggcggactttttctgctgggggcggtttgcagctgtacccagacggcaccggactatgcgtcttacgtcaatccgttcatcggtacgggcggacatgggcatacctatcccggagcggtagttcccaacggaatgattcagcccagccccgacacgcgtatctacgagtgggatgcctgctccggatattactatgcagatactactatcaacggattttcacatactcacgtcagcggtacgggttgtgccgattacggggatgtgttgctgatgcccactgtagggcggcaggattaccactctatgggctcgaagagccagcagatggcgtacgcctctgccttttcccacgagaatgaaacagccgaaccgggatattattccgtatttttggaccgctacggggtgaaagccgaactgacctctaccaaacgtgcggcgattcatcgctataccttcccgaaagcggaagatgcaggctttatcctcgacttggattatagcattcagcgccagaagaatgaacagatggagctggaagtaatcagcgatactgaaatccgtggacgcaagaagactgtatattgggctttcgaccagtatatcaacttctacgccaagttctctaaaccatttacctatacgctggtcacggactccatggcattggacgaaggcggtccgcttctgcctacagctaaagctttactgcaattccagacggagcccaatgaggaggtattggtaaaggtaggtgtgtctgccgtggatatggacggtgcccgcaagaatgtggaagccgaaatctccggatgggattttgacggtgtgcgccgtgctgcccgccagcagtggaacacttatctctccaagattgacatcgatacgaaggacaacgaccagcgtaccatgttctacacggcactttaccacacgggcatgcagcccaacttatttaccgatgccgacggacgttactttggtatggacttgaagccccatcaaggcagggtggacgagcctgtctacaccattttctctttatgggacactttccgtgcctatcatccgctgatgacgattatcgatccggaactgaacgaggccttcatccgttcgctcatccagaagtcccgcgagggcggcgtcctgcctatgtgggaactggccggaaactatacgggtaccatgattggttatcatgcagcttccctcatagcggattcgtatgtaaagggataccgtaactttgacgtgcaggaggcctataaggcttgcctccgtacggcagaatacgatacgacgggcattatcacgcatcctttggttgtgccgcatctgatgccgcaggccaagtactggaagaacaagattggctacgtgccttgcgacaaagacaatgagtccgtggcaaaagcgctggagtatgcttacgatgactggtgcatctctgtactggcaggtgccttggacgacgaagtcaaccgcgacaagtatgctgcctttgccgagggatataaagtttatttcgatccgagtacccgtttcatgcgtggactggacagtgagggcaactggcgtacgcctttcaccccccgcgcatccaatcaccgtaacgatgactattgcgaaggcactgcctggcagtggacttggttcgttccccacgatgtagacggattggtagaactgatgggaggacgcgacgctttcatcggcaagttggattctctgttcactgccgattccaagctggaaggtgaatcgacttcggtggatatttccggtctgataggccagtatgctcacggcaatgagccgagccatcacattgcccatctctacaactacgtaggccagccctggcgtacgcaggagattgtggatgaggtgctgcatacgctttacttcaacaaccccgacggactttcgggcaatgaagactgcggacagatgtctgcatggtacattctgaatgcgatgggcttctatcaggtatgccccggcaagtcggtatattccatcggacgcccgctgttcaacgaggcgaccgttcatctgaaagacggcaagtcgttcaaggtgatagcccacaacaatagccgcgataacaagtatgtgcagagcattgtgctgaacggcaataagctggagactccattcttcacgcatcaggatatagtggacggcggtacactggaactgactatgggcagcgaaccgctgaagccggaagagtaaatggattattatgctcacaagattccctgatgagcaatacctttaataaggtggagtcctaccgggaaatgaatagcagcagcaacggcatgtattcttttagctcgttgcgcagaaattccaatgttttttgtttatagcggttgactgacttcacactaaggttcagctcttccgctatttctgtatgcgtttttcccttgaagaagctctcgatgaagacaatgcggtagctctcgggaagcttgttcagggtaccgtacagcatccggtacatttcgtctaaggtatatacactgtccggttccgtttcgtagacaggggttttctttttgacgacttccgcataattccattcatattcctgatgcttcaggtagttcaggcaattgttcctcacgcacatcttgaggtaacccaatatcgttttcgggtctatctcgaagttgtccatgttgttccatagggaggcgaatacttcggaaacaatgtcttcgcgagtctctttattgtcaacaaaacgcttggcatacaagcagaagggggcatagtactcctcgtagagctgcttgaatacttgtttcttgctttgttcattaagagatagtttcataatatatctacagtatttcgaaggcaaatatacaataagaaagtcaaataaaaggttctttttgaaatttaaaagaacaaagctgtggcaataggcaagtagtattttgttattaaggacccaattgaaaaaactttgttttagctgtccctttttgatttcccgattgtattatctatgtaattgcaattataaataggttataaggtttagagattatggaaaaattagattcggatttattgtttcggaaagcacaagcattgggagatgatatccgggaaatggaatcaattgatgtggccaaagcttttgaacggacacagcagttgataaggaaaaagcggggtaggcagatgtatgatagcttgatgcgctatgccgcattcttgacgttacctttgctgatgatttcgctgacgttgggctacttatatttcagtggaccggaagcggtagactgctacgccgaagtcacggctgccaaaggttcggtcatccgttatgagcttcctgaccattcggtggcgtggctcaatgcgggaagtaccttgcgttatcccatagttttcaggaaagacaatcggagtgtggaactgaaaggggaagcgtattttgaagtgcaggccgacaagaaacgtcctttttatgtgaacacaccggatggattgagtgtatatgtatacggaacgaagttcaacgtggctgcctacgaggatgaagaacttattggtacggtgttggagaaaggtaaggtaaatgtggtaacccccaatcaggagacaatggaattgttacccggagagcagttgctttacaatcggaacagtcggaaatggattaaaaataaagtggatgtctacgagaaggtggcttggaaagacggaaagctgattttcaggaatgcgacgttggaagagatattcaaaaggctttcaaggcatttcaatgtggatattgagtttgacaataggttgggaaaggaatacaagtaccgggcgactttccacaaagagaccttgcagcagattttggattatctggcaaagtcggcagccttgaagtggagggtggaagatgctgcgcagcaggcagacgatacccttacgaaggctaggattatagtaaacttatattagtaacccttaaaaccataaagagcctatgatatagcataagaagagcaaaaacaagaaaggaagaaaactgtccccacagctttcttccctactcattaaaaaactcacggattttggtttagcagacaagaagccgtgaatcaaaccttagttcatttagtaataaactttagttaaccgcaaatgtatgaaaaataatcattcatttagtgcagtatgccttaaatataccttaaaattaaaacttcctttacctatgaggataagtctaatactactttttgctgttgtattacagcttcctgccagtaacgggtacgcccagcggacgcgaggctccttttctatgtcgagtgtttccatagaaaatgtattgaataagatagaggagaactccgactatgtgttcctctataataacaagacgattcaggcagaccgcattgtttcggtaaacagccggtcgggaaagataacagagatcctggatgacatgtttcgtggaacaaatgtcacttatacattggtagacaatcagataatcttgtccacgaaacagataaagcaacaagaacccaaaatcaaggtggacggcgtggtcaaggatgctaccggcgaaccgctgattggcgtcaacgtgaaggtgaagaataccattgccggtaccattactgatttggacggcaagttcaacttggcggtaaacaagggggacgttctcgaaatctcttatgtgggatatactactaaggaaatcaagataatagacgatcgaatcctgaatgtgctgttggaagaagattcgcagaagctgaacgaggtagtggtcactgccctgggtatcaagcgtgccgagaaagcgttgagctacaacgtgcagcaggtgaaacaagacgagctggtccgtgtgaaggatgctaacttcgtgaactcgctgagcggaaagattgccggtgtaagcatcaacaagagtgctagcggcgtgggaggagctacccgcgtggtgatgcgtggagccaagtccatcgagggcgacaacaatgcactctacgtggtggacggtatccctttgttcaacaccaatatggggaatacggacagcggtatcatgggtgagggcaaggccggaacggaaggtattgctgacttcaaccccgaagacatcgaaagcctctccgtgttgagcggcccttcggcagccgccttgtacggtagcagcgccgccaacggggtgattctgattactaccaaaaagggcaaggaaggaaaactttccgtccagttctcttcttccacggagtttagcaaagcctacatgacaccggagttccagagcacctacggcaataaaaaggacatgtacgaaagctggggagaaaagctggctaccccttctgcctacgatccgaaggacgacttcttcaataccggaaccaacttcatcaactcgttgacattgaccacgggcaccaagcagaaccagacgttcgcgtccgtatcatccaccaactcggccggtattgtgcccaataactcttacgaccgtctgaacttcactatccgcaacactgccaccttcttcaaggataaactgcaactcgacctgggcgcgtcgtatgtgaagcagaaagaccgcaacatggtgtcgcaaggacagtactggaatccggtgatggctgcctacctcttcccgcggggagaaaactttgaagacatcaagacttttgagcgttatgatgacagccgtaagtttcccgtacaatactggccggtgtccgaacctacctacgcttcgcagaacccttactggactgcctaccgcaatgtggctaccaacgagaagagccgctacatgttcaacgtggggctgacctacaagattaccgactggctgaacgccgccgcacgcttccgcatggacgatacgcatgtgctcttcgaacgcaagatttacgccacttccgaccagaagtttgccgagggaaagaaaggacattatggctacagcaactataacgaccgccaagaatacgccgacttcatgctgaatgtcaacaagcatatccgggacttcagcattgctgctaacttgggctggagctattctaactattggctattggagagaggatataaaggaacattgagcctggtacccaataaattcgtggcagtcaacatcgacccggccaatggacgtgtctccgaaaagggcggtgatagccgcgtgcgcaaccatgccgtctttgccaatgtggaattaggctggaagagtatgctttacttgacgctgaccggacgtaacgactggaactcccgtctggtgaacaccgacgaagagtccttcttctatccttccgtaggtttgtcggccatcatttccgaaatggtagatttgccccggttcatttcttacttgaaggtacgtggttcctttaccgaagtgggcgctccaatttcccgttccggtctgactcccggtacggtgacaactcccattgacggcggtacggtgaagcctacctatatctatccgtttaccgacttcaaggcagagcgtacccgttcgtatgaattcggtttaagtttgcgtttgtggaacaagttgagtgcagaagtcacttactaccattccaataccaagaaccagactttcttgggtaacttgcctgaatttaccggttacaagcagatttacttgcaggccggtaatgtggagaaccgcggatgggaagcctctttgggttacaatgacaagctgaagaacggactggcattctcctccacattgacattttcgcgtaacgtcaacagaattaaagaaatggtggatggttaccatactgatttgttggacgatcccatccagatttctgaagttgtgaaagatggcggacgtatcattttgaggaaaggtggcagcattcacgacatttacgccaataccttcttgaagaaagatcatcagggttatgtagagataaagagtgacggtacgtttgaactggataatagcggtaagcccgtctatttgggcaagacttcccccgacttcaatatgggatggaacaactccttgtcgtacaaaggactcggactcagcttcctgctcaacggacgtttcggaggtgtggttacctcctctaccgaagcattgctcgaccgtttcggcgtgtcgaagcgttcggccgaggcacgtgacaatggcggtgcattattgccgggacagggcagggtagatgcaaagacctactaccagatgattggtacaggaggttacgagacctccggctactatgtctacagcgctaccaacatccgtttgcaggagttgacactcagctacaccatgcccaaccgctggtttggcaacgtactgaaggacgtgacggtttccttcattgccaacaatccctggatgttgtactgcgaggctccgttcgaccccgaactgactccctctaccgccacctacggacaaggcaacgattactttatgcagccaagtgtgcgtagctttggctttggtattaaattcaaattataacagaccgacttttaatatgaaaaagataaatcaatataagcttttagcgggaatatatgccctagcattgttggcatcctgcgattacgaggaaatcaataccaattgggctgaaatgaacgagaaggaagaagccatggacggtgttgccgtcggaggattggtgacaacgatggagcagaccgtcttcccggtagggacacaagccgacgatacggacatcatcaacatgtaccagaccgactatcatctgtctgccgactgctggagtggattcttctcacaaaacaactcttggaacggtggtaacaacaataccagttattatttgattgacggatggattaagggtacttatgcacgttcttataccaatgcactcgacccgtggaaaaaattgaaagccgcttctgaaaagaacgacactcccgaagtttttgccttggcacaagtattgaagatttcggcttggcacaaggcgttggagagtttcgggccgatgccttattcacatgcagccgatgctacgatgaacattcctttcgacttggagaaggacatatatgctgccatgttcaaagacttggccgatgctgtggaggttttgaccaagaaagcggatgccggggtgaccattatgggagattatgatgcggtttatgcgggtgactctaggaaatgggtgaagtatgccaattcgctgatgcttcgtctggcgatgcgcgtacgttttgccgatgccgaactggcaaagcggtatgcggctttggccgtgaaacactccatcggagtgatgacctccaaagacgaagaggcgcagatgagttcgggtgcgggcatcactttccgcaacaacatcgagtggttggccgagcagtacaatgaatcgcgcatggggtcgtccatgttctcttacctgatgggttacgaagacccacgtctgagcgcttacttcaaaccggtggatgacaaatgtactttgggacagttggcattcgatggcaagaaatatcaagccattcctgccgggcatctttacgggcagaacgatgtctatacgacattctcaaagccgaatatcaaaggtgacactccgacctattggatgcgtgcttccgaagtctatttcttacgtgctgaagctgctttggtgtggggaggtgaattcggtaatgccgacgagctctacaagcaaggtattgggatgtcgttccaggaaaacggggtgacagcttcggtcgatgattacatgaactccggcaatgtaccaatcaagcatgagttcggtggttcttactcttgcagtttttccgcccctcgtgccgttacagtcaagtttgaaggcagccgggaagaaaaattggagaagattattatccagaagtggcttgcgctctttcccaacggtcaagaggcttggacggagtggagaagaactggctatcccgacttgaatccggtgatggcaaacagaggttcgttccaaggagccaccattgaaaaaggagtgcgccgaatgatttatccgaccagtttccatcagacaacggaggacgaggccaactatcagg

SEQ ID NO: 4395 - DNA, 11359 bp, Unknown
  gut microbiota DNA sequence
gaaacaacaagtttgctctacttcctcaaaagaagtaatctcttttatactggatatccttcgttttttacaaaagaaattaccctttgattggcttcgtcaatctttctgttgctgaaaggtttcagataagtttccgtcactgtgatggaagagtgccccatggcttctgatatgattccaggatgtatctcgcagtggtaagccatggtcgcccaagtatggcgtgccgcataactactgagtgccgactgcattcccaagcattgtctgagtactgccaaacgttggttgaatgccctgagtgccgactggtattcccggtatgccgcttctgtgccttcctcactttgtaatatggggaataaataaggagagtccttgtccttgtttgctatcattctcaccatttgcatagcctccggcgtcagtgagacggtcagtgcccgtcccgtcttcctgcgcctataggacaaggtatttccttgtaaatcccttttgtgcaaataggccaggtccacaaaaggaatccctcttagcataaacatcaatacaaagaaaatttttgttttctgtcgggtgttgggagaattaccggcctgcaggctcatctctgtctcccgtaccaagcagcctatgtcggaagcttcgagcgcctttttcctatccgcccgtgtgccggtatacacatgctcaaacagcctgggtacatatcgcaccagctttttgtccaccgcccggttgtaaaccgaacgtatcgctttgatataggtggataccgtattccaactacaattcctctgcctgaggaagttttcgaatctcttcagcacggtcgggctcagcttgcgcatgggcatcggttgccattgggtgaatgccgagaatgcattcaccgctgactggtagatgtgtgccgtcccccacctgccgctttcccggagttccccgatgattgaggagaacatctcttgtaaggtaatttcatttctgctcatttccaaattatttataaaaaggtttatcctgcaattataaataaattgagagcaagtgcaaaggcatcattctgaaatctgcgaaacgggaatgatgccgtatccgacagcttatttgttggctaacgtctgtttagtggctgatatacgtatcctggaagaaccgcttgttatcattcaggctgcaagtggcatccactccggcttgttgcaggcgttcggcaatctcattcagtttctttctcgaaacccttccgatatagaacagacggtagcggtaatcgttgtccagcaattccatgacgtgcgtgaaattctgttcgcgggcaaagtcgaagtttacttttcttaggttctggtacggatagcggatagtcctgcctacgctgtgtatgatgaggccgttattgtccaacgtcaggtagcagaagcgggtcatcagcatgctgatgaaaaaaagacttaatgcaaacgaaatgatagccgggatgaagccccaccatacgttgccactgatggaataatatcccaatataaggaatatcaggaataagacaaagaaccagaacatatagagtgacggacgctggtatgtttctgtgggaacctctgcgactgtccgttccctcggtgcgtagttgtcgaaggggatttcttgggagaccaggtagcggatgaccgaggaagggtgacggaaaggaggcagatagattactttttctttcccttcctttagatgtaaagtcagtatgcccggaccatatttgtctttcgcagccaagttgcttttgcggggaacctggtggtaacgcttcatgaaactgaaactcttgatttggtgcagtccgatgtgctggctttgcagcagttgttcggctcttttctgttctttactggtcacttccatagttcttattttttaagttcgggataactgatgcgggtatggtatatagtcttcagcttctccttgaatacgttcttcacggtggcaatatccttgaaggtgatggggcattccttgaaatagccttctgccacttgcgaatcgataatcttgtctaccagattgctgatgctctcttccgtatattcgggcagactgcgtgaagcggcttccaccgaatcggccatcattaggatagcctgctctttggtgaacgggttgggaccggggtaggtgaatgcctcctcgttagggtcttcaccggggtgctcgtttttccaggagatatagaaatacttcgttttcccacggccatggtgagtggtgatgaaatccttgattactttggggagattgttcttctcggccagcttcagcccgtccgtcacatggctgatgacgacttgggcactttgctcatagcccagattcttgtgcggattgactccacccgattggttctcggtgaagaacaccggattctccatcttgccgatgtcatgatacagcgctccggtacgtaccagctggcttttggctccgatacggttggccgcttccgccgcaaggttggcaacctgcatggaatgctggaaggtgccgggaactgtctcggacatgcggcgcagcaggctgttgttgatgttggacaattcgaccagggtgacattggaggtaaagccaaacgtcttttccaccaggaagagcaggggataggtgaacagcagcaacactccgttgatgacgaaataggtgtacatgcttccgttgatttttgtcaagtcgttttctgtaatcagctcgaaagcaaagtagacggcagcgtaggtcaatatgacgaggaaggctgtccggaacagttgcgaccgttgtgaaagttccctcagactgaagatggcaaccagccccgctgagagttgcagaagaatgaattcatgcggatagcgcaggcagatggagcatatcagtatggtggtgacttgtgcgatgaaggccgtgcgtgagtcgaggaacacccggatgatgaccggcagcatggcatacgggatgatatagacattgaatatgttgttggcaaccatgatggccgtcaccacgcaatagaacatgatgagggcgaagagcagggagaggctgcccttgcgcttgtagtaatctttacggaacaagtcgaggtagagcatgaaacacagcatgaagatactgacaaacaatacctgccccgccagcatcaaccgtttttgcccgatggactcactgcgtttgatggattctttccgtagactctcaaggatgttgtatgtctcctggctgacaatctcgccgcggtcgatgattttctgtccgctcagtacgatgccgttggcccatgaatagttgtcgagcatctccttcttagcggtttcggtccgctgctcgtcataggtcagattagggaacagatattcgttcagcgagcattgccgtagaatgtccgggcggtagtgggcggtatcggccgtgagtatatagttataggcatccttcaccgaatataccttgttgatgtcctgctggttggccagtttgtcgttaatgaccatgatggcggttgtgctgtccttatgcagttggttcagctcttcggtagaaacgatgccggcgcgatatacttcagagagtttcctttccagaaagcggacgtagtcggtggagggaagcaggccgcgcaggtgggtctgatagtctgccttcaacttggcgagcacacttttctcaatgcttttgtccagctggaaatacggctggaaggcggcgaggatactgtcttgctcgcgtttcaccacttcatcggccttatagatggggaagtcgaaggtggccatgagctgtccgtacttccagggcttgtcaatgtcgaactggtagttgaatttaccgtcacgtggcagaaaatagacaataatccccacagtgccgatgaatatcagtgctctgtatagcaaatctctgagcgagaactctttttttgtattgaaataactcatatcggctgaaatttttgcgaaaagtacaaaaaaaaacattagtgtggaaaaaaaggtttaattttgccgtctaaaatattcataagtaaggtagattatgacagaaagaaaggtcagagtccgttttgccccgagtcctacgggggcgttgcacatcggcggtgtgcgtacagctttatacaattatctctttgcgcgtcagcatggaggagatttgatatttcgtattgaagatactgattccaaccggtttgtaccgggtgcggaagaatatatcctggagtctttcaagtggttgggcatcccgtttgacgagggcgtgagtttcggtggagaccatggcccgtaccgtcagtcggaacgtcgggaaatatacaagaagtatgttcagattctgctggaggccggaaaagcctacatcgctttcgatactcctgaggagctggaagcaaagcgtgcggagattgcgaatttccagtacgatgcttctacccgcatgcagatgcgcaattcactgacccttcctaaagaagaggtagacgcgctgattgctgccggtaagcagtacgtggtgcgtttcaagatagagccgaacgaagatgtgcatgtgaacgacctgattcgtggggaagtagtgataaactcttccattcttgatgacaaggttctttataaatcggcagatgaacttcctacttaccatctggccaatattgtggacgaccatttgatggaagtgtcccatgtgatacgcggtgaggaatggttgccttccgcaccgttgcatgtattgctctaccgtgcctttgggtgggaggataccatgcctgcctttgcgcatttgcccttgttgctgaagcccgagggtaacggcaaattgagtaagcgtgacggcgaccgtctgggcttcccggttttcccgttggagtggcatgaccccaagtcgggagatgtctcttcaggctaccgcgaatcaggctatctgcccgaagcggtcattaatttcctggctctgctgggctggaatccgggcaatgaccaggaactgatgtctatggatgaattggtgaaattgtttgatttgagccattgcagcaagtcgggtgccaaattcgactataagaaaggtatctggttcaaccatgagtacatcatgatgaaaccggatgcggagatagcttgtcttttcagaccggtgctggagtccaacggcatagacgcctccaactatagcgacgagttccttacgaaagtggtttcactggtgaagggacgcgtcaacttcgtaaaggaactgtgggaccagacccgttttttcttcgtagcccccacggaatatgcggcaaaggatgtgaagaagcgttggtcggaagatactccccgcatcatgaccgaattgatggatgtgttgcgcggcatcggggatttctcctccaagccttccgaagatattgtgattggttggattactgagcgtggctatcacatgggaaatgtgatgaatgccttccgcttgtcagtggtgggcgagtgtaaaggcccgcacatgttcgacattaccgagctgattggcaaggaagagacgttggcccgtatacagcgtgctgttgatgctttaaagtgaataaatcttcttcatccttaatccatatagtatgctatatgacttggcaatagccatctacgatattctggtgcatctggctgctccatttagccgtaagccccgaaaaatgatgaagggacactgggtggtctatgaacttctccggcagcagttggagaaggacgtgcgctatatatggttccatgccgcttctttgggggagttcgagcagggacggccgttgattgagaaaattcgtgccaaatatccggattacggtattctgctgactttcttctcgccgtcgggctatgaggtccgcaagaattataggggggcagacgttgtctgttacttgcctttcgacaagtcccgcaatgtgaagaagttcctggatatcgtgaatccctgcatggcattcttcatcaagtacgagttctggaagaactatctggacgaactgcacaagcgccgtattccggtgtacagcatttcttccattttccgccgcggacaagtattcttcaagtggtatggcggtacgtacagacatgtgctgcgcgacttcgaccatttgtttgtgcagaatgaacgctccaaacgctatctggcgaagataggtatcagccgtgtcacggtggtgggggatacccgttttgaccgtgtgctgcagattcgtgaggaggccaaacatctgcctttggtggagcttttcaagaacaacacgatgactttcgtggcaggaagctcctggcagccggacgaggatttgtttattgaatactttaaccagcatccagaggtgaagttggttatcgctccgcacgttatcgacgaaaaccatctggtagagattatccgtaaactgaaacgcccctacgtgcgctatacccgtgccgacgagaagaatgtccgtaaggccgactgcctgattatcgactgcttcgggttgctctcttccatctaccgctatggcgagattgcctatatcggaggtggtttcggagtgggaatccacaatactcttgaggctgcagtttatggcattccggtgattttcggaccgaagtatcagaaattccaggaggccatccagttgctggaggcaaaaggcgctttctcggtgaaggattatgaggaactgaaaactttgctcgaccgtatgctgacagatgaagtctttttgcgcgaatcaggcatgaatgcaagcaattatgtgaccggcaacgccggtgcaacggataagataatgagtatgataaacttttagaaaagtaaagagtgataaaagcgatagggcggtaaaggtgatggaatggcatccctttatcgccctgcctttttggggcgccttgctccctttatttgtaccagtcggaatacatcagatagttgtgtgcaatcttctggttcagctccttggcctgctccggatctactttcttgatgaacttggcggggactcctccccagatgcttcccggctcgatgaccgtattgctcaataccagggaaccagcggcgacaatagccccttcgcccactactgcgtggtcaaggatggtggaacccatccctaccaaagcatagttcttgatagtggctccgtggatggtcacgttgtgccccacggatacgtggtctcctatctctatggtcgatttctcgtacaaggtgtggagcacgcttccatcctggatgtttactccgttccctatgcggattgagtttacgtcaccccgcagcacggtgctgaaccagatgctgcaatcccgtcccgtcttgacgtcgccaatgacaaccgcattgtccgccaaaaaacaattctccccgatttcgggagtgaatcctcttactgattttattaatgccatttttttagtgattagtggttaggttactgcatgcttccttcagccattcccgttctccttcgttcaggcttggcgaaagtgcctcgtatacatgctggtgatagttgtccagccatgccgtttcctctgccgtcagcatctctttgatgatacctttcttgcagatggggcagagggtaatggtttcgaacttcaggtaatttccgaacatgccttcaccgtccttcacggtcagcaccaggttttccgtgcgtattccatggcttccggctttataaacgcccggttcgttggaagtgaccattcccggccgtagggttaccggattctcattcatgcggatgctttgcggaccttcgtgcacattgaggaaatggcctacgccgtgcccggtaccatgcaggaagttcatgtggtattgccatatcggcatgcgggccagtacatccagttgcgctcctcgcgtaccttccgggaagacagccatggcgaggtcgatatgtcctttcagtatcagggtgtagtccgtcttctcttcttcggtcagtttccccagtgcgatggtgcgggtgatgtcggtagtgccgtccaggtattgcgcacccgagtccagcagcaggaatccctcgggtttcagtggcacgtccgttgccggagtggcttcgtagtgtacgatggctccatgttccttgtacccggcaatggtgtcgaagctttctcccatgtagagtggctgtgcggcacggaattcgtgcagtttcttgtctacgctgatttctgtctcgttgcctgcgggaacggcctcctccagccatttcaggaacttcaccagtgccactccgtcgcgttgcatggctgcgtggatgccggctatttcccggtcattgcggaccgctttcagcaaggctatcggtgagcgctcgtcaagtacccggcaggaaggggggagggcggaataaacggcataattcgtctttcccatgtcgagcatgatgctgccgtccggtattcttgtcacaaaggattcggtgtccccataagcatggatggtgacgccggcttcttccagataggctgaaagctcttccgttactttctcgggctggatgaaaaagtgtgtttcttgttcgttgattatcaggtagcttactactacggggttgcaatgcacatcgttgccgcgtatgttgagtgtccatgctatctcgtccaatgccgacaccaataatacgtccgcttcactctttttcatctcccggcggatagcagccagtttgtccggacagcttttcccggcgtatttcatctcgtggataaaggcgggtgcttcgggcatgggagggcggtctgtccatatctcattcatcgggtcggcaatgctctttacggtgatgtcgttttttgccagatcctcttgcagggctatggcttgtgtggtggaaaataccttcccgtctatacctacaactgaattcgctgtaaggttctcccgcaggaaatcgaggatgctgggcgtttcgggcagcatttccttgtataagtcgatgccgctgccttccagctgctgctcggcttggagaaaatagcgggaatctgtccacagtcccgccttgtcgctggtgatcaccgccgtgcctgccgaaccggtgaagcctgatatccattctcttgatttccagtacggtgctacgtactcgcttaggtgcgggtcggtactggggataatgaaagcgtctatgccttctctttttaacaatgcccgtagagcatctatacgttgattgattgtctgagccatatttttataaatgtaattaagtaggcgtgtaaatgagtttataatctctccattctctgctttcaaagttacacattctcttttaaaaatgtgctatgcttcacggattttagcggattggctcaataaaaacatctttccctttgctcattcgtttgataattaggaatcatgggtaatttttttgcagaaagttttgtgaataaagaaagtatgtgtaattttgccgctcaatttaatcgtgagatttttaaaccattaacatttaattaaaagaaaatgattgtagtacctgtaaaagaaggcgaaaacattgaaaaagcgctgaagaaattcaaaagaaagtttgaaaaaactggcacagttaaggaattgagacgcagacaacaatttgataaaccgtctgtgactaaaagacttaagaaagaacgtgctgtttacgttcaacaacttcagcaagtagaagattaataattcgtaaattcctttgaattattgaattctttttcatacattcgttgcatgattttagatatgtagcgatatgttgttgacagattcttttcttgactatcttctgcatgagcggaactattccaaaggtacggttgagtactatcgggcagatattcttgaactgcagaggtttggagaagaaatgttgggagacttgactccatcggatgtagatgcggaacttgttcgtgaatggattgcttccttgatggacaaaggacttgcttctaatacgataaaccgaaagctgagttctatccggacatactataaatttcttttgaggagaggcgaggtcgcggtagatccgttgcggaaagtgacggggcccaagaagaaaaagccgcttccggtatttctgagagagggtgagatgaataggttgctggatgatatggactttggtgaaggttttgaagggtgtcgcgaccatatgattattgaaatgttttatgctaccggcatgcgactttcagaattgatagggttggatgataaggatgtcgatttttcggcttctctcgttaaagtgacgggaaaacggaataaacaacgtcttatacctttcgatgaggagctgggacgctcgatgcgagaatatgtcaatgtgcggaatgaagctgtcccggttcgctcggatgctttttttgtccggaagaatggaaaaaggctttaccgcagtatcgtagcatgccttgtgaaacgaaacctttcgaaggtagtgactgtaaaaaaaagaagtccccacgtgctgaggcacacctttgcaacggctatgctgaacaatggtgctgatttaggctcgataaaagaactcctcggacacgagagtctggcgacaacggaagtttatacgcatactacttttgaagagcttaaaaaagtgtataatcaggctcatccccgagcctaaagtaaaaaggaggtaagtatggaagtaagaattcaatcgattcactttgatgcgtcagagcaattgcagtctttcgttcaaaagaaagttgctaagttggagaaattttacgacgatataaagaaagtagaggtgtcattaaaggtagtaaaaccagaaacagccgaaaataaagaagccggagtgaaagtattggttcccaatggcgagttttatgcaaacaaggtttgtgatacgtttgaagaagcagtggatttatgcctggaagctttggaaaaacagctggttaagtacaaggaaaagcaacggagcaaataattttccgctaaaattttgcgggtaaaaaataaatgcctaaatttgcagccgtttcgctcacactatgaacgttacggttgcattttttagcttgcctctttagctcagttggccagagcacgtgatttgtaatctcggggtcgttggttcgaatccgacaagaggctcgctcaaggatgagtggaatgagtctttcttcacgaggtggagatgatatgagaacggaaatcgtccgggtaaagttcactctgcgatgatttagtaaggaaaagagttctttttgtaatgtaggggcaaataccagagtggccaaatggggcagactgtaaatctgctggcttacgccttcggtggttcgaatcc

SEQ ID NO: 4396 - DNA, 65115 bp, Unknown
  gut microbiota DNA sequence
ctcttattctccttgctgttatagctcagcggtagagcacttccttggtaaggaagaggtcccgggttcaagtcccggtaacagctcacaaagatgtaaaagctgattattaatcaaataaataacaagtaaagctatggctaaagagaaattcgaacgtaccaaaccgcacgtaaacattggtacaattggtcacgttgaccacggtaaaaccacgttgacagctgctatcactacagtgttggcaaagaaaggtctttctgaattgcgttctttcgattctatcgataacgctcctgaagaaaaggaaagaggtatcactatcaacacttctcacgtagagtatgaaacagctaaccgtcactacgctcacgtagactgcccgggtcacgccgactacgtaaagaacatggtaactggtgctgctcagatggacggtgctatcatcgtagttgctgctactgatggtccgatgcctcagactcgtgagcatatcttgctggctcgtcaggtaaacgtaccgagactggttgtattcatgaacaagtgtgacatggtagacgacgctgaaatgttggaactcgttgaaatggaaatgcgtgaactgctttcagcctacgaattcgacggcgacaacactccgttcattcagggttctgctcttggtgcgttgaatggcgttgaaaagtgggaagagaaggttatggagctgatggatgcttgcgacacttggattcctctgcctccgcgtgatattgacaaaccgttcttgatgccggttgaagacgtattctcaatcactggtcgtggtactgtagctactggtcgtatcgaagctggtgttatccatgtaggtgacgaagttgaaatcctcggtttgggtgaagacaagaagtctgttgtaactggtgttgaaatgttccgcaagttgctggatcaaggtgaagctggtgacaacgtaggtctgttgctccgtggtatcgacaagaacgaaatcaaacgtggtatggttctttgtaagcccggccagattaaacctcactctaagttcaaagcttctatctacgttttgaagaaagaagaaggtggtcgtcacactccgttccacaacaaataccgtcctcagttctatctgcgtactatggactgtacaggtgaaatcactcttccggaaggaactgaaatggtaatgcctggtgataacgtagaaatcactgtagaactgatctacccggtagcattgaacgtaggtttgcgtttcgctatccgtgaaggtggtcgtacagtaggttctggtcagattactgaaattcttgactaataaccaatataatcttaatcagttcccggtatacatcgggaactgattatgtacaaacgggagtagctcagttggtagagcaccggtctccaaaaccgggtgtcgggagttcgagcctctcctcccgtgctaatatttttgaaatgaagaagattgtagcttattttaaagaaacttacgacgaacttgttcataaagtgtcgtggcctacgtattctgaacttactaacagtgcagtagttgttttatatgcttccctactaattgcagtggtagtatttgcgatggacttctgtttccagcatctgatggaatttgtttatccacattaaaagtaaggagaaatgtctgagattgaaaagaaatggtacgttttgcgtgctattagcggaaaagaagctaaggtaaaggaataccttgaagctgatattaaaaacagcgaccttggtgattacgtatctcaggtattgattcctaccgaaaaggtatatcaggttcgcaatggtaagaaaattgtgaaagagagaagttatctccctggttacgttttggtggaggctgctctggtgggtgaggttgctcatcatctgagaaatactcctaatgtgatagggttcttgggtggttcggaaaaacccgtacctctgagacagtcggaagtgaatcgtatacttggtacggtcgacgaattgcaggaatcaggtgaagacttgagtatcccgtatgtagtcggcgagactgtaaaggtgaattacggtccgttcagtggattcagtggaatcattgaagaagtgaacaccgagaagaagaaactgaaggtcatggtcaagatattcggacggaagactccgctcgaattgggctttatgcaagttgaaaaagaatagtgcaggtgttacgctgtagtattcttcattaatgtttatatatataaatcaattagaaaatggctaaagaagttgctggactaatcaaattacagattaaaggaggcgcggcaaatccatcacccccagtaggacctgcattgggttccaagggtatcaatatcatggagttttgcaagcaattcaacgccagaacccaagacaaagcaggaaagattcttcctgtgattatcacttactacgcagacaagtctttcgattttgtaatcaagactcctcccgtggctatccagttgttggaagtgacgaagcaaaagagtggttctgctgagcctaaccgtaagaaagttgccgagattacttgggaacaggttcgtacgattgctcaggacaaaatggttgacttgaactgtttcactgtagaagctgccatgaaaatggttgccggtacagctagaagtatgggtatcgctgtaaaaggggagttcccggttaataattaataaacttcaattagaatgggtaaactgacaaaaaatcaaaagttggctgcagaaaaaattgaagcagggaaagcatactctctcaaggaagctgctcagttggtaaaggaaatcacttataccaagtttgacgcttctctggatatcgacgtacgtttgggcgttgacccgcgtaaggccaaccagatggtgagaggtgttgtatcacttcctcacggtactggtaaggttgtacgcgttttggtgctttgtacaccagatgctgaagctgctgcaaaagaagccggagctgactatgttggtcttgacgaatatattgaaaagatcaaaggtggatggactgatattgatgtgattatcactatgccgtccatcatgggtaagattggtgcactcggtcgtgtgctcggtcctcgtggattgatgcctaaccccaagagtggcactgtaactatggatgttgctaaagctgtaagagaagtaaaacaaggcaaaatcgactttaaggttgacaagagcggtattgttcatacttctatcggtaaagtttcatttagcgctgagcaaattcgcgacaatgcgaaagaattcatctctactttgaataaattgaaaccgactgcagccaagggtacatatattaagagtatttatctttctagcacgatgagtgcgggcatcaagattgacccgaaaacagtagaagaaatctaataaaacggagtaataatgagaaaggaagataaaagtacgattattgagcagattgctgctacagtgaaggaatacggtcacttctatttggtggataccactgccatgaatgctgctacaaccagcatgttgagaagagaatgtttcaaggctgacatcaaattgatggtagttaagaatacattgcttcacaaggcattggagagcctggaagaagacttttctccgctttatggttctctgaaaggtacaactgccgtaatgttcagcaacgttgctaacgctccggccaagttgattaaagataaggctaagaacggtattcccggactgaaggctgcatatgcagaagaaagcttctatgttggtgctgaccagttggatgctctcgtaagtatcaagagtaagaatgaagttattgccgatatcgttgcattgctgcagtcaccggccaagaatgttatttctgctctgcaatcaggtggtaacaccctccacggagttctcaagactcttggtgaacgtcccgaagcgtaaatttcggaaaaagaattatatcaatttatttagtatttaaacaattaaaaatcatacaaaaatggcagatttgaaagcttttgcagaacaattagttaacttgacagtaaaagaagttaatgaacttgcaacaatcctgaaagaagaatatggtattgaacctgctgctgcagctgtagctgttgctgctggtcctgcagccggtggtgctgctgccgcagaagaaaagacttctttcgacgtagtattgaagagcgctggctcagctaaacttcaggtagttaaagccgttaaggaagcttgcggtcttggcttgaaggaagctaaggacatggtagacggtgctcctagcgtagtaaaagaaggtttggctaaggacgaagcagaatcattgaagaaaacattggaagaagctggagctgaagttgaacttaaataacattagcctgtaaatcaggtaattcggttaggaacccttcgtgaaaagggttcttaacctttttgtgtatatatttaaaattaagttctacaaatccattaacagatgtcttcaaatactgtaaatcaaagagttaattttgcttcgactaagaatccgcttgaatatccggattttctggaagtacaattgaagtcattcaaagactttctacaactggacaccccacccgagaaacgtaagaacgagggactgtataaagtatttgctgaaaacttccccattgccgatacaagaaataattttgttcttgagtttttggactactatattgatccgccgcgctataccattgatgaatgtatagagcgagggcttacatatagcgtgcctttgaaggcaaaattgaaattatattgtaccgaccccgaccacgaagattttgacacggtcattcaggacgtgttcctcggtcctattccttacatgacggataaggcaacattcgtcatcaacggtgcggaacgtgtggttgtatcccagcttcaccgttcaccgggcgtattcttcggacagagcgtacatgccaacggtaccaagttgtactcagcccgtatcatcccgttcaagggttcgtggattgagtttgccaccgacatcaacaacgtcatgtatgcgtacattgaccgtaagaagaaattgccggttaccactttgctgagagccatcggatttgagaatgacaaggacattctcgagatttttaatttggcggaagacgtgaaggtgaacaagacgaacctcaagaagatggtgggacgtaagttggccgcacgtgtgttgaaaacatggattgaggattttgtagacgaagataccggtgaagttgtttccatcgagcgtaacgaagtcgttattgaccgtgaaactgtaatcgagccggaacatgttgacattatattagagtcgggcgttcagaatatcctcgtacacaaggaagaaccgaaccagtctgactattctatcatatataatactctgcagaaggatccgagtaactcggaaaaagaagctgtactctacatctaccgccagttgcgtaatgcagaccctgccgatgatgccagtgcacgcgaggttatcaataacctgttcttctcagagaagagatatgacctgggtgatgtaggccgttatcgtatcaacagaaagttgaacttgacgaccgatatggacgtgcgtgtccttaccaaggaagatattatcgaaattatcaaatatctcatcgagttgattaactcgaaagcggatgtggacgatatcgaccacttgagcaaccgtcgtgtgcgtacagtgggcgaacagttgtccaatcagtttgccatcggtctggcacgtatgtcgcgtactatccgcgagcgtatgaacgtccgtgacaatgaagtctttactccgattgacctgattaacgccaagacaatctcttccgttatcaattcattctttggaacgaatgctttgtcacagttcatggaccagaccaacccgctggccgagattactcacaagcgccgtatgtctgccctgggtcccggcggtctgtcacgcgagcgtgcaggcttcgaggttcgtgacgtacactatactcactacggacgtctttgtcctatcgagactcctgaaggtccgaacatcggtttgatttcttcactctgtgtgttcgcgaaaatcaacgagcttggcttcattgaaactccgtaccgcaaggtggcagagggtaaggttgatctttctgacgaaggtttggtttacctcaccgcagaagaagaggaagccaagattattgctcagggtaatgctcctttgaacgatgacggtacttttgtacgtgataaagtaaaatcccgtcaggatgccgactatccggtggttcctccttccgaggtggaattgatggacgtatctccccagcagattgcttctattgcggcttctttgattccgttcttggagcatgatgacgccaaccgtgcattgatgggatcaaacatgatgcgccaggctgttcctttattgaagagcgaagctccgattgtaggtaccggtatcgaacgccagctggcacgcgattctcgtacgcagattactgccgagggtgacggtgtggttgaattcgtggatgcaacgactatccgtattctgtacgaccgtacggaggaggaagagttcgtaagcttcgagcctgcattgaaagaatataatatcccgaagtggcgccgtaccaaccagaatatgacgattgacctccgtccgatttgcgagaagggtcagcgcgtgactgcaggtcaaatcctgacggaaggttattcaaccgaagacggagaacttgcactgggtaagaacctgctggttgcttacatgccgtggaagggctataactatgaggatgctatcgtactgaatgaacgtgtggttcgtgaggaccttttgacctctgtacacgtagaagaatattctttggaagttcgcgaaacgaagcgtggtatggaagagttgacctctgacattcctaacgtaagtgaggaagcgactaaagaccttgacgaaaacggtattgttcgtgtgggtgcccgcatcgaaccgggtgatatccttatcggtaagattactccgaagggtgaatcggatccttctccggaagagaaactgctccgtgccatcttcggtgacaaggccggtgatgtgaaggatgcttctttgaaagcctctccttctttgaagggtgttgttatcggtaagcgtctgttctcccgtgttgtcaagacccgcagctccaagctggccgacaaggctctgttaccgaagattgacgatgagttcgacgctaagattggtgacctcaagaaagtgttgataaacaagctgttgaagcttacagaaaattatacatcggaaggtgtgaaggattacatgggtgccgacattatttccaaaggcgccagattctctgcttccgacttcagcgatttggacttcaccgctgttcagttgagcaactggacgaaggatgaacataccaacggactgattcgtgcattggtgatgaacttcatcaagaagtacaaggaactcgatgccgagctgaaacgcaagaagttcgccatcactatcggtgacgagttgcccgcaggtatcattcagatggccaaggtatacattgccaagaaacgtaagattggtgtcggtgacaagatggccggtcgtcacggtaacaagggtattgtttcccgtgtggtacgccaggaagacatgccgttccttgctgacggtactccggtagacatcgtgctgaatccgttgggtgtgccttcacgtatgaacatcggtcagatattcgaggccgttctcgggcgtgccggaaaaaacctgggcgtgaagtttgccactcctatctttgacggtgcatctttggacgatttgaacgaatggaccgataaggccggcttgcctcgctacggcaagacaacgctgtatgatggtggtaccggtgaagcattcgagcagcaggctacggtaggtgtgacttacatgctgaagctcggtcacatggttgaagacaagatgcacgcacgttccatcggtccgtactcactcattacgcaacagccgttgggtggtaaggcacagttcggtggtcagcgttttggagaaatggaagtttgggcactcgaagcgttcggtgccgcacacattctgcaggaaatcctgactatcaagtctgatgacgttgtaggacgttccaaggcttatgaagcaatcgtgaagggtgaaccgatgcctgctccgggtatccccgagtcactgaacgtattgctgcacgagttgagaggtttgggcttgagcatcaacttagaataatggataattgataattgagagtggataatgcaagttaccattctcaattatcggttttcagtttttcaatttcaattttccattgtcaattatcaattaaataaatttatggcttttagaaaagataacaagataaagagtaatttctcgaaaatctctatcggtttggcttctcctgaggaaatccttgagaattcgagtggtgaagttttaaagcctgaaaccatcaactatcgtacgtataagcccgaacgcgacggattgttctgcgagcgcatctttggtcctatcaaggattacgagtgccattgcggtaagtacaagcgtatccgttacaaaggcatcgtctgcgaccgttgtggtgtggaagtgactgaaaagaaagtgcgccgtgagcgtatgggacacatccagctcgttgtgcccgtggctcacatctggtacttccgttcacttcccaacaaaatcggttacttgttgggcttgcccaccaagaagctggatgccattatctattacgagcgttatgttgtcattcagccgggtgtactgtccgatgaagtggcacagtatgacttgcttgaagaaggagaatacctggacttgctggaaaagttgccgaaagacaaccagttcctcgaagattcagatcccaataagttcattgccaagatgggcgcggaagctatctacgatttgctgtcacgcctcgaccttgactctttgtcttacgaactgcgtaaccgtgccggaagcgatgcttcacagcaacgcaagaccgaagctctgaaacgtcttcaggtagttgagtcgttccgtgcatcacgcggacgcaacaagcccgagtggatgattgtacgcattgtaccggttattccacccgaacttcgtccgttggtcccattggatggcggccgtttcgcaacttctgacttgaatgacctttaccgtcgtgtcatcatccgtaacaaccgtctgaagagattgattgaaatcaaagctcctgaagtgattttgcgtaatgaaaaacgtatgttgcaggaagctgtcgactctctgtttgataactcccgtaaatcgagtgcagtgaagaccgacgctaaccgtccgttgaagtcactttccgacagtttgaagggtaagcaaggacgtttccgtcagaacttgttgggtaagcgtgtcgactattccgcacgttctgtaatcgttgtaggtccggagctgaagatgggcgaatgcggtatccctaaactgatggcagccgagctttacaagccgttcatcattcgtaagctcattgagcgtggtatcgtgaagacggtaaagagcgccaagaagattgtagaccgcaaggaacccgttatctgggacattttggaacacgtgatgaaggggcatccggtgctgttgaaccgtgccccgacacttcaccgtctgggtatccaggcattccagcctaaaatgattgaaggtaaggcaatccagctgcacccgttggcatgtacggcgttcaatgccgacttcgacggtgaccagatggccgtgcacttgccgttgagcaacgaagcgattctggaagcacagatgctaatgctccagtcacacaatatattgaaccctgccaacggtgctcctatcactgtgcctgctcaggatatggtacttggtctgtactatattacgaagctgcgtaagggtgccaagggtgaaggcctgacattctacggtcctgaggaagcgctgattgcctacaatgaaggtaagtgcgacatccatgctccggtaagcgtaatagtgaaagacgttgacgagaatggtaacattgtggacaagatgatgcacgatacctccgtgggccgtgtcattgtcaacgaaattgttccggcagaagcaggatatatcaatacgattatctccaagaagtcactccgagacatcatcagtcacgtaatcaaggtgtgtggtgttgccaaggcagccgacttcctcgacggaatcaagaacctcggttattacatggccttcaagggtggtttgtcgttcaacttgggcgatatcattatcccggaagagaaggaagcattagtacagaaaggttatgatgaagtagagcaggtaatcaataactataacatgggtttcatcacgaacaacgagcgttacaaccaggtaatcgatatctggacgcacgtgaactctgagttgtccaacatcctgatgaaaaccatttcaagcgacgaccagggtttcaactctgtatacatgatgctggattccggtgcccgtggttctaaggaacagattcgtcagctctccggtatgcgtggtttgatggcgaagccccagaaagcaggtgccgaaggcggtcagattatcgaaaacccgattctttctaactttaaggaaggtctgtccgtgttggagtactttatctctacccacggtgcccgtaagggtcttgccgataccgctttgaagacggccgatgccggatacctgacccgtcgtctggttgacgtatcgcatgatgtgattattaatgaagaagactgcggcacgctccgcggattggtttgtacggcactgaagaacaatgatgaaaccattgccactctgtatgaacgtatcctgggtcgtgtatccgtacatgatattgttcatcctacaactggcgaactgattgtggccggcggtgaggaaattaccgaggacattgcacaacgcattgaagactctccaatcgagagcgttgaaatccgttctgtattgacctgcgaatccaagaaaggtgtttgtgccaagtgttacggacgtaacctggcttccagccgtatggttcagaagggcgaggcagtcggcgtaatcgctgcacagtctatcggtgagccgggtacacagttgacactgcgtacattccatgccggtggtacggcagccaatattgctgccaacgcaagcatcgtggccaagaatcctgcccgtctggaattcgaagaactccgtacggtagacgttatcgacgaagcaggcgaaccggcaaaggtagtggtaggccgtttggccgaagtgcgttttgtggatgtcaacacgggtattgtgctttccactcataatgtaccctacggttctacgctctatgcagccgatggtgaaatggtagagaaaggcaagatgattgcccgttgggacccgttcaacgcggttatcattaccgaagctaccggtaagattgaatttgaaggcgttattgaaaacgtgacttataaggtagagtctgatgaatctaccggtttgcgcgaaatcatcatcattgagtctaaggataagacgaaggtgcctaccgcacacatcatgacagaagacggcgaactgatccgtacatacaacttgccagtaggtggccacgtagtggttgaagacggtcagaaggtaaaggccggtgaagttatcgtgaagattccgcgtgccgtaggtaaagcgggtgatatcacgggtggtcttccccgtgtcactgagttgttcgaggcacgtaacccgtctaatcctgctgtggtttcagaaatcgacggtgaggttaccatgggtaaggtgaaacgcggtaatcgcgaaatcatcgttacttccaagaccggtgaagtgaagaagtacctcgtaccgttgtccaagcagattctggttcaggagaacgactatgtacgcgccggtactccgttgtctgacggtgctatcacacctgcggacatcctggctatcaaaggtcctacggccgtgcaggaatatattgtgaacgaggttcaggacgtttaccgtctgcagggtgtgaagattaatgataagcactttgaaatcatcgttcgtcagatgatgcgcaaggtggaaatcgacgagccaggtgatacccgcttcttggaacagcaagttgttgacaagatggaattcatggaagagaacgaccgtatctggggaaagaaggtggtagtggatgctggagattcccagagtctgcaggctggccagattgtgacggctcgcaagctgcgtgacgagaactccatgttgaaacgccgcgacttgaaacccgtggaagtgcgcgacgctgtacctgcgacttctactcagattcttcaaggtatcacccgtgctgcattgcagacttcaagcttcatgtcggctgcttccttccaggaaacgacgaaggtactgaacgaggctgccatcaacggaaaggtggaccgtctggaaggtatgaaggagaacgtaatttgcggtcacctgattcctgccggtaccggacaacgcgagttcgagaagattatcgttggctccaaagaagagtacgaccgtatgcttgccaacaagaagacggtacttgattatgctgtagacgagaaagtagagggatagccttacaacgtcaatataattctattaaatagagagggaatatcctataagaaggagtattccctctctgttttgtctttgcctcttccttctgtactgcaatgcttctgtatgtttgttacagtgctactgcaaaacggttgcagtggcttgctcctttttcagaacggattattatgtgtctttttgagcttaaatgtatatcatccgaaaaaaaagagtacttttggtctatcttttaagaacattttaaaaacaattgtgcaacatggaaaatcaagaaaacaacaacggtcaactccagatagaattgaaggaagaagtggcgcaaggtacatatgccaatttggctattataactcattccagttcggaatttattctcgactttatccgcgtgatgcctggaatgccaaaggctggcgtgcaatcgcgcatagttttggcacccgaacatgccaagcgtttgctgcgtgcactcgaagagaatattgggaaatatgaacgcgctttcggactgattcgcatgccggacgaacaaacatttccgcctcttcccaatatcaagggtgaagcgtaaaatcaaaaaaaaacttgtagtgcattgattattcaaaacttattagtatctttgcagcccaaaagtgtatagttttgaattaatataaacaataatatataactaaaaacaattaaaatgcctacaattcagcaattagtaagaaaaggacgcgaagtgctggtggagaaatcaaagtctccagccttggactcttgtcctcaaagacgtggcgtttgcgtgagagtgtatacaaccactccgaagaagccgaattcagctatgcgtaaagtagctcgtgtacgtttgaccaatggtaaagaggtgaactcttatattccgggagaaggtcacaacttgcaggaacactctatcgtgttggtacgtggtggtcgtgtaaaagaccttccgggtgtgcgttatcacatcgtacgtggtactttggatactgcaggtgttgcaggtcgtacacaaagacgttccaaatacggcgcaaaacgtccgaaaccgggtcaagcagctcctgctaagaagaaataatctggtggcctgattcccaaaataggaaaatttaaagtaataacttacgttttagtttgttggaaatgctaaaggttgagtaaattctccggagggagagttgaagaagacagaagtaaacaaccaagaacgaaaaacattattctttcagacaaatgagaaaagcaaaaccaaaaaaacgcgttatccttccggatcccgtgttcaatgatgtaaaagtttccaagttcgtgaatcacttgatgtacgatggaaagaagaacacttcttatgaaatcttctatgctgcgttggaaacagtgaagaacaaaatgcagaacgaagagaaatccgctcttgaaatctggaaaaaagctctggataatgtgactcctcaagtggaagttaagtctcgccgtgtgggtggtgctactttccaggttcctacagaaatccgtgctgaccgtaaggaatcaatttccatgaagaacttgattatctttgcacgtaagcgtggcggtaaatcaatggctgataagctggctgccgaaatcatggatgctttcaatgaacagggcggtgcttacaaacgtaaagaagatatgcatagaatggcagaagctaaccgtgcatttgctcatttcagattctaatactataagagactaaccaattagaagattaaaaaacttaaagtaagggaattagaaaatggcaaagcatgatttacatttgacacgtaatatcggtatcatggcccacatcgatgccggaaagacaacgacttctgaacgtattttgttttacacgggtttgacccacaaaatcggtgaggtacacgatggtgccgctacaatggactggatggagcaagaacaagaacgtggtatcactatcacttctgctgctactaccactcgttggaaatatgccggtgatacttataaaattaacttgattgacactccggggcacgttgactttaccgctgaggtagaacgctctttgcgtattcttgatggtgccgttgctgcttattgtgcagtaggtggtgttgaaccgcaatctgagacagtttggcgccaggctgataaatataacgtaccgcgtatcgcttacgttaataagatggaccgttcgggtgctgacttctttgaggtagtccgccagatgaaggacgttttgggtgctaatccgtgtcctatcgtcgttcctatcggtgctgaggaatctttcaaaggtctggtagaccttatcaaaatgaaagctatctattggcatgatgaaacaatgggtgctgactatacagtagaagaaattcctgcaaatctggtagacgaagctaacgaatggagagataagatgctcgaaaaagtggctgagtttgacgatgctttgatggagaaatatttcgatgatccttctaccattacagaagaagaggttttgagagctctccgtaacgcaacagtgcaaatggctgtcgttccgatgctttgcggttcttcattcaagaacaaaggtgtacagacattgctcgattacgtgtgtgcattcttgccttctccgctggatacagagaacgttatcggtacaaaccccgaaactggtgctgaagaagaccgtaaaccgagcgaagacgaaaagacttctgctttggcatttaagattgcaacagacccgtatgtaggtcgtttgactttcttccgcgtttattccggtaagattgaggctggttcttatatctataactctcgttctggtaagaaagaacgcgtatcccgtctgttccagatgcactcaaacaagcagaatccggtagaagttatcggtgctggtgatattggtgctggcgtaggtttcaaggatatacatactggtgatacattgtgtgacgaaactgcaccgattgtattggagtctatggacttcccggaaccggtaattggtatcgcagttgagcctaagactcagaaggatatggataaactgtcaaatggcttggctaagctggctgaagaagatccgacgtttacagttaagactgacgaacagactggtcagacagttatctctggtatgggtgagcttcacttggatattatcatcgaccgtctgaaacgtgagttcaaggttgaatgtaaccaaggtaagcctcaagttaactataaggaagctatcactaagacagtcaacttgcgtgaagtttacaagaagcagtccggtggtcgtggtaagttcgctgatattatcgtgaacatcggcccggttgatgaagacttcaaggaaggcggattgcaattcgtcgacgaagtgaagggtggtaacattcctaaggaatttatcccgtctgtacagaagggtttcactactgccatgaagaatggtgtgttggcaggttatccgttggattcactgaaagtaaccttgattgacggttctttccacccggttgactctgaccagttgtctttcgaaatctgtgctatccaggcatataagaatgcttgtgctaaggcaggtccggtattgatggagcctatcatgaagctggaagttgttactccggaagagaacatgggtgacgttatcggtgacttgaacaagcgtcgtggccaggtggaaggtatggaatccagccgttccggtgcacgtatcgtgaaggcaatggttccgctggcagaaatgttcggttacgtaacagcattgcgtaccatcacttctggtcgtgcaacctcttcaatggtatactctcaccacgcccaggtttccaactctattgccaaggcagtattggaggaagtaaaaggtcgtgctgacttaatctaaaaaaacttgaagtcccgtaggctagcgaatgactcttagcctgcggaacttcatcttatataactatttaataattaaagacagtaatgagtcaaaaaattagaatcaaactgaaatcttacgaccacaacttggttgacaagtcagctgagaagattgtaagaacggtgaagacaacgggcgccatcgttagcggtccgattcctcttcctacgcacaagcgtatctttaccgtgaaccgttcgactttcgttaacaagaagtcgcgtgaacaattcgaactctcttcttacaagagactgattgacatctatagctcaacagctaagacagtagatgctctgatgaagttggagttgccgagtggtgtggaagtagaaatcaaagtgtaagtattaaaaattaagtgaaatgccaggattattaggaaaaaaaatcggaatgacatccgttttcagtgccgagggtaagaatgtaccatgcactgttatcgaagcaggtccttgtgttgttactcaagtgaaaactgtagaaaaggacggttatgaagctgttcagctgggcttccaggacaagaaggagaagcacactacaaagcctttgatgggccactttaagaaagctggagtaactcccaagaaacacttggctgagttcaaagaatttgaaacagagttgaatctgggtgacactgttaccgtagaactgttcaatgacgcaacttttgttgacgttgtaggtacttctaagggtaaaggtttccagggtgtagtaaaacgccatggttttgggggtgtaggccagactactcacggtcagcacaaccgcgctcgtaagccgggttctatcggtgcttgttcttaccctgcaaaagtattcaaaggaatgcgcatgggcggacagcttggtggcgacagagtaactgttcaaaacctgcaggtattaaaggtaatcgcggagcacaatcttcttttgattaagggatctgttcctggttgcaaaggttcaatcgtaataattgagaaataatggaagttaacgtatataacattaaaggtgaagacactgggagaaagattacgttaaacgagtctatcttcggaattgagcccaacgaccacgctatctacttggatgttaaacagtttatggctaaccagcgtcagggtacacacaagtcaaaggaaagaagcgaaatcagtggttctactcgtaaaatcggtcgccagaaaggtggtggtggtgcacgtcgtggtgacatgaactcaccggtacttgttggtggtggacgcgtattcggtccgaaaccgagagattactacttcaaattaaacaaaaaagtaaaggctctggctcgtaagtcagctttgtcatacaaggctcagaacaacgcagttgtagtagtagaagacttctcttttgaagctccgaagactaaagattttgttgcaatgacaaaaaatcttaaagtttctgacaaaaagctgcttgtgattttaccagaagcaaataaaaacgtatatttgtcggctcgtaatgtgaagggtgctaatgtgcagactatctcagggttaaatacttacagagtattggacgctggggtcgttgtgtttgctgaaagtgcactttctgctatcgacaatatcttaatgtaaaaaggaggcttaaataatgggaattattattaaaccgttagtgacagagaagatgactgcaattactgataagacgaataatcgtttcggctttatcgtgcgtcctgaagctaataaactggaaattaagaaggaagttgaagccctttacaacgttacagtagttgatgtgaatacaatgaagtatgccggcaaaaacaagagccgctatactcgtgccggtatcatcaacggacgtacgaatgcgttcaagaaggctatcgttacgttgaaagaaggagatactattgatttttatagcaatatttaataaaaatggcagtacgtaaatttaagcccacaacaccggggcaaagacataaaattattggtacttacgaagagattactgcacgggtaccagaaaagtctcttgtatttggtaagaaatcttcaggtggtcgtaacaacgaaggtaagatgactatgcgctacatcggtggcggtagtaagaagattattcgtatcgtagatttcaagagaaataaagatggtgtgcctgcagtggttaaaacaattgaatacgatccgaatcgttcggctcgtatcgctttgttgttttatgcagatggagaaaaaagatatattattgctcccaatggattgcaagttggtacgactttgatgtcaggtgagactgccgctccggaaatcggaaacgcacttccgcttcagaatattccggtcggtactgtaattcacaacatcgaattacgtccgggacaaggcgctgccttggttcgctcggctggtaacttcgctcagttgacttctagagaaggtaagtactgcgttatcaagttgccttcaggtgaggttcgtcagatcctcagtacttgtaaggctactattggtagtgtaggtaactcagatcatggattggaaagttcaggtaaagctggacgttctcgttggttaggacgtcgtccgcgtaaccgtggtgttgttatgaacccggttgatcacccgatgggtggtggtgaaggacgtgcttcaggaggacacccgagatctcgtaagggattgtacgctaagggtcttaagacaagagctccgaagaaacaatcgtctaagtatattattgagagaagaaagaagtaatctgattaattgagtaaattatgagtcgttcattaaaaaaaggtccgtatattaacgttaagcttgagaagaaagtgcttgccatgaatgaatcgggcaagaaagtggtagttaagacctgggccagagcttcaatgatttcgcctgatttcgtaggccatactgttgcagttcacaacggaaataaatttattcctgtttatgttaccgaaaatatggtaggacacaagttgggcgaatttgctccaactcgtactttcagaggacacgctggtaacaagaaaaaataaaacaggatttatctgaaataataaagtaataatataatgggagcaagaaaaaaaatatcggctgaaaaaagaaaagaagcccttaagaccatgtattttgcgaaattgcaaaatgttcctacttccccccgtaaaatgcgtctcgtggctgacatgattcgcgggatggaggtgaacagagcactcggcgttttgaagttctcttcaaaagaggctgccgcaagagtggaaaagttgctgcgctctgcaattgctaactgggagcagaaaaacgaacgtaaagctgaaagtggcgagctgttcgtaaccaagatttttgttgatggtggtgctacactcaaaagaatgagaccggctccgcagggtagaggttacagaattcgtaaacgttcaaaccacgtaacgttgttcgttggttctaaaagtaataacgaagatcaaaattaaggtaaatgggacaaaaagttaatccaataagcaaccgtttaggaattatcagaggatgggattccaattggtatggtggaaagaattacggcgattctctgctggaagatagcaagattcgtaaatatttgaacgctcgtctggcaaaggctagtgtgtcaagaattgtaattgaacgtacactgaaactcgtgactattaccgtttgtactgcacgtccgggtatcattatcggcaaaggtggccaagaagttgacaagttgaaagaggagttgaagaaggttactgataaggatattcagattaatatcttcgaagttaagagaccagagttggatgctgttatcgtggctaacaacattgcccgtcaggttgaaggcaaaatagcctaccgtcgtgccatcaagatggctattgccaatacaatgcgtatgggtgcggaaggtatcaagattcagatttcaggacgtttgaatggtgcagaaatggcccgttctgaaatgtataaggaaggaagaactccgttgcacactttcagagcagatatcgactattgtcatgcagaagcattgactaaggttggtcttctcggcattaaagtttggatttgtagaggtgaagtttatggtaagaaggagttggctccgaactttacgcaaagcaaggaaagtggtcgtggaagcaatagcggaaacaatggcggaaagaacttcaaaagaaagaaaaataatcgctaacgaatttgatttttaggaattatgttacaaccgaaaaaaacaaaattcagaagacaacaaaaaggccgtcaaaagggtaatgcccaaagaggaaaccagttggctttcggatcttttggtattaaggccttggaaacgaaatggattacaggccgtcagattgaagctgcgcgtattgcagtgacaagatatatgcaacgtcaaggacagatttggattcgtattttccccgacaaacctatcaccagaaagcctgctgatgtgcgtatgggtaagggtaagggtgcgccggaaggattcgtagcgcctgttacaccgggtagaattattatcgaagccgaaggagtatcttatgaaatcgctaaagaagctttgcgcttggctgcacagaagcttcctatcacaactaagtttgtggttagacgtgattatgatattcaaaatcaaaatgcgtaagaagtatgaaaacagcagaaattaaagagatgcctaccagtgacttggtagaaagagttgaagcagaagtagctaattacaaccaagtgattttaaatcattctatttctcctttggataatcctgctcagatcaaacaattacgcaggactattgcgcgtatgaagactgaattacgccaaagagaacttaacaataaatgatgagcttgatggaagcaagaaatttaagaaaagaaagaactggggttgtgctgagcaacaagatggataagaccattacagtagcagctaagtttaaggagaaacaccccatatatggtaagttcgttagcaagacgaagaagtaccatgctcatgatgaaaagaatgagtgcaatatcggcgatactgtacacatcatggaaactcgtcctttgagcaagactaagagatggagattggtagaaataattgaaagagctaagtaattatgatacaagtagaatccagacttacagtatgtgataatagtggggcaaaagaggctctctgtatccgcgttttgggtggtacaggtcgtcgctatgcttcagtaggggacgtgattgtcgtttctgttaagagcgttatcccttcaagtgatattaaaaaaggtgcagtgtctaaagctttgatcgtacgtactaagaaagaaatccgtcgtgctgatggctcttacatacgttttgatgataatgcttgcgtgttgttgaacaatgcaggtgaaattagaggtagtcgtattttcggtccggtagctcgtgaacttcgtgctactaacatgaaagttgtgtcactcgctcctgaagtactttaatattgtaaaagatttgagtaatgagtaaattacatattaaaaaaggcgatacagtttatgtaaactccggtgaagacaagggtaagactggtcgtgtattgaaggttcttgttgataaaaaccgcgcaatcgttgaaggtatcaacatggtgtctaagagcacaaaaccgaatgctaagaacccgcaaggtggtattgtgaagcaagaagcttctatccacttgtcaaacttgaaccccgttgatccaaagactggcaaagcaacgcgtgttggtagaaaagtaagtgctgaaggcactttagtgcgttattctaaaaaatcaggagaggagattaagtaatgagtaatactgctagccttaagaaagaatatgcagagcgtattgcgcctgcattgaaatcacagttccagtattcttcttctatgcagatacccgtacttaagaagattgttatcaatcagggtctgggtatggctgttgccgacaagaagattattgaagtggcaattaatgaaatgactactatcactggccagaaagccgtggcaaccatttctcgtaaggatattgcaaactttaagttgcgtaagaaaatgccgattggcgttatggtaactctgcgtcgtgagagaatgtacgaattccttgaaaagttggttcgtgtagctctgcctcgtatccgcgacttcaagggtattgaaagtaagttcgatggtaagggtaactatacccttggtattcaggaacaaatcattttccctgaaattaatatcgatagtattactagaattctcggaatgaatattacctttgtaacctctgcgcaaacagatgaagaagggtatgccttgttgaaagaattcggtttaccgtttaaaaacgctaaaaaagattgataatatggcaaaggaatcaatgaaagcacgcgaagtaaagcgtgctaaattagtagccagatatgccgagaaaagagctgcgttgaagcaaatcgttagaaccggtgatcctgctgaagcttttgaagctgcacagaaattgcaggatttgcctaaaaattctaacccgattcgcatgcacaaccgttgcaagctgacaggtcgtcccaaaggatatatccgtcagtttggcatctccagaatccagttccgtgagatggcttctaacggtcttattcccggtgtaaagaaagcaagctggtaattattgtttttaaatattgtcagggtaggcctgattaatttaatttattttttatatgactgatccaatagcagattatttgacgaggttgcggaacgctattcaagcgaagcacagagttgtggaagttccggcttctaatttgaaaaaagaaatcactaagattctttttgaaaagggctacattcttaattataagtttgtagaagatggtcctcaaggtacaatcaaagttgccttgaagtatgatccggtaaacaaggttaacgcaatcaagaagctggagagaatctcttctccgggtttgcgtcaatataccggttataaagacatgccgcgtgttattaatggtttgggtattgctataatatctacttccaagggtgtaatgaccaacaaagaagccgctgaactgaagattggtggtgaagttttgtgttatgtatattaataggaggaattagcaatgtcaagaataggaaaattacccattagtattcccgctggagtaacagttactctgaaagatgacgtggttaccgttaagggacccaaaggcgaaatgagccaatatgtaaatcctgctatcaatgttaccatcgaagacggtcatgttgttttggctgagaatgaaaatgcaatgctggataaccccaagcaaaagcatgcattccatggattataccgttcattggtgcacaacatggttgttggtgtatcagaaggatataagaaagaattggaacttgtcggtgtaggttaccgtgcctctaaccagggaaatatcattgaactggctttaggttatactcacagtatctttatacagttgcctcctgaagttaaagttgagactaagtctgaaagaaacaagaatcctttgattatattggaatcttgcgacaagcagttacttggtcaagtttgctctaaaatacgttctttccgtaagcctgaaccgtataagggtaagggtattaagtttgttggcgaagaaattcgtagaaagtctggtaaatcagctggtgctaaataatcatttaaattgatattattatgacaacaaaaatagaaagacgaattaagatcaaatatagagtacgcaacaaaatttcaggtactactgaatgcccgcgtatgagtgtatttagaagtaacaagcaaatctatgttcagattatcgatgacttgtccggtaagacattggctgccgcttcttcgttgggtatgactgaaaaaatgcctaagaaggaacaagctgctaaagtaggtgaactgattgcgaaaaaagctcaggaagcaggtattactactgttgttttcgaccgtaatggttacttgtatcatgggagagtaaaagaggtggctgatgctgcccgtaacggtggacttaaattttaatcattatggcaggacttaataatagagttaagattacaaacgatatagagctgaaagacagattggttgctattaatcgtgtaaccaaagtaaccaaaggtggtagaacttttagtttctctgctattgtggtagtaggaaacgaagaaggcatcatcggttggggccttggtaaagctggtgaagtaaccgctgctattgccaaaggtgttgaatctgcaaagaaaaacctgacaagagtgcctgtactgaaaggtacagttcctcacgaacagtctgcaaagttcggtggcgctgaagtatttattaaaccggcttctcacggtactggtgttgttgctggcggtgcaatgcgtgccgtattggaaagtgttggtgtaacagacgttttggctaagtcaaaaggttcttccaacccgcacaacttggtaaaggctactatcttggcattgagtgaaatgcgcgatgctcgtatggttgcccagaacagaggagttagtatggaaaaagtatttagaggataaggaggaagaatatgtcgactataaagattaaacaagttaaaagtagaattggtgctcctgctgatcagaagagaactctcgatgcactgggacttcataagttgaatcgtgtggttgaacacgaatgcactccttcaattcttggaatggtggataaggttaaacacttggttaccattgttaagtaattatttgttgaatataaaacgaattacaatatgaacttaagtaatttaaaacctgcagagggatctactaaaacaagaaagagaattggacgtggtccgggttctggcttgggaggtacttctactagaggtcataaaggagctaaatcaagatctggatactctaagaaaatcggttttgaaggtggtcagatgcctcttcaacgtcgtgtacctaagtttggctttaaaaatatcaatcgtgtagagtataaggctatcaacttggatacaattcagaaattggctgaagcaaagaacttgcagactgtaggtatcagtgacttcattgctgctggtttcatttctgcaagccagttggtaaaagtattaggtaacggaactttgactgctaagttggatgtacaagcacatgcattttctaagactgctgttgctgccatcgaagctgctggtggacaagtagtaaaactctaattcaatgagaaaagctattgaaacattaaagaatatatggaaaattgaggatctgagacaacggatcctcattaccatattgtttgtggcaatctaccgttttggttcgtatgtcgttttgccgggtatcaatccgtcaatgctgacacaattgcatcaacagacaagcgaaggtcttttagccttgttaaatatgttttccggaggagcattttccaatgcctctatttttgcattgggtatcatgccgtacatctctgcctccattgtgattcagttgctgggtattgcggttccgtatttccagaaattgcagcgcgaaggtgagagtggtagaagaaaaatgaatcaatatactcgttatctgacgattcttattcttttggttcaggctccttcttatttgctcaatcttaagatgcaggctggtccttctttaaatgcttcattagattggactctgtttatgtttacttctaccattattttagcggctggaagtatgtttattttgtggcttggtgagagaattacggataagggtatcggtaatggtatttcgctgattatcatgattggtatcatcgcccgtctgccacagtccttattccaggaattgatttcccgtatgacggacaagactggtggtctggtaatgttcttgattgagcttgttgttctgctggttgttattgcattcgctattcttttggtgcagggaactagaaagattcctgtacaatatgcgaagaagatcgtgggtaacaagcaatatggcggtgctagacagtatattcctttgaaggtgaatgctgctaacgtgatgcctatcatttttgctcaggctatcatgtttattcctatcactcttgttgggttctcaaatgtaaatgatgcaagtggtttcgtacgtgcattgactgatcatacaagcttttggtataatttgatttttgcagtgttgattatattgtttacgtatttctatactgcaattactattaacccgactcagatggctgaagatatgaagagaaacaatggttttattccgggtatcaagccaggaaagcaaactgctgagtatattgacgtgattatgtcgcgtattactttgcctggttctttcttcttggccttggttgccattatgcctgcgtttgccggtatattcggtgtgaaagctgagtttgctcaattctttggcggtacatctttgttaatccttgtgggtgtggtgcttgatactctccagcaggtagaaagtcatttgttgatgagacactatgacggtttgctgaaatccggacgtattaaaggccgcagtggtaatgtagctgcatattaatcttttttgaagaatgatatttcttaaaacagaagatgaaatagagctgctccgcaagagtaatttgcttgttggaaagacgttggctgagatagctaaggttataaagcccggagtgacaacaaaagagctggatagggtggcggaagagttcatcagagacaatggtgctgttccaacctttaaaggttttcctaatcaatatggcgatccgtttccagcttctatttgcacatctgtaaatgaccaggtggtacatggtattccgggagatgatgtggtactgaaagatggtgatatcgtgtctgttgattgtggtacttacatgaatggcttttgtggcgactcagcctatacgttttgtgtaggtgaagttgacgaagaagtccgcaaattactgaaggttactaaagaagcattgtacatagggatacagaatgccgttcacggcaagcggttgggtgatatcggttatgcgatacagcagcactgcgaatctaattcttatggtgtggtgcgtgagtttgtgggtcacggaataggcaaggaaatgcatgaagatcctcaggttcccaattacggaaagcgtggttatgggacaatgctgaagaaaggcttgtgcattgccattgaaccgatgataactttaggtaaccgacaaatactcatggagcgtgatggctggacggtgaggacaaaagaccgcaagtgtgcagctcattttgaacatacgatagcagtcggcactggtgaagctgatatattgtcatcattcgagttcattgaagaagtattaggagataaagcaatttaagaaattaatatggcaaagcaatctgcaatagaacaagatggagttatagttgaagcattgtctaatgcaatgtttcgtgttgaattagaaaacggacatgagattactgcacatatttccggtaagatgcggatgcattacatcaaaatcctgccaggggataaagtaagagtcgaaatgtctccttacgatttatcgaaaggaagaattgtatttagatataaataaaattaagatatgaaagtaagagcatccttaaagaaacgtacgccagagtgtaagatcgttagacgtaatggccgtttgtatgttattaacaagaaaaatcctaagtataaacaacgtcaaggataatattattatttttgcaaaaaaaataatttagtatatggctataagaatagttggtgtcgatttgcctcaaaacaagagaggtgaagttgcgttgacctatgtatatggtataggtcgtagtagttcagcaaaaattttggataaagcaggtgttgacagagacctgaaagtaaaagactggacggatgatcaggctgccaagattcgtgagatcattggtgcagagtataaggttgaaggtgatcttcgttctgaagttcaattgaacattaagcgtttaatggatatcggttgctatcgtggtgttcgtcatcgtattggtcttccagtaagaggtcagagcacaaagaacaatgcccgtactcgtaagggtagaaagaaaaccgttgctaataagaaaaaagctactaaataataattgttgatatggcaaaaaaaacagttgcagcaaaaaagagaaatgtgaaggttgatgctaatggacagttgcatgttcattcatcttttaacaacattattgtttctctggcaaatagcgaaggtcagatcatttcttggtcttctgccggaaagatgggttttagaggttcaaagaagaacactccctacgcagcacagatggctgctcaagattgtgctaagatagcatacgatcttggcttgagaaaggtaaaagcatatgtgaagggcccgggtaacggacgtgagtctgctattagaactatccacggtgcaggtatcgaggttactgaaatcattgacgtaactccgcttccgcacaacggttgtcgtcctccgaaaagacgtagagtttaaaatttacctttaatagaagtgagacttgattttgttattggattgtaaactttctctctgcaatcgcggctgcaacaaacccaagttcatgaataaacaattaaatatttaaaagaaatggctagatatactggaccaaaatcaagaatagcccgtaaattcggtgaaggtatctttggagcagataaagtattgtcaaagaagaactatcctcccggacagcacggtaattccagaaagagaaagacttctgaatacggtgttcaacttcgtgagaaacagaaagccaaatatacttatggcgttttggaaaaacaattccgcaacttgtttgagaaggctgagactgctaaaggtattactggtgaaatccttctccaattgttggaaggtcgccttgacaatatcgtattccgtttgggtattgctcctactcgcgcagctgctcgtcagttggtgagccacaagcacattactgtagacggtgaggttgtgaatattccttcttatgcagtgaaaccgggtcaggtgatcggtgttcgtgaaagatccaaatcattggaagttatcgctaattcactggctggctttaaccatagcaaatatccttggttggaatgggatgataactctaaggtaggcaaattgctgcatgtacctgaaagagcagacattcctgaaaacattaaagagcatttgatcgtagaattgtattctaaataataattaatttcatggcgatattagcatttcaaaaacctgataaagtattaatgttggaagcggactctagattcggaaaattcgaatttcgtccgttggagcccggtttcggtattaccgtgggtaatgcactgcgccgcatcctgctttcttcattggaaggttttgctatcactactatcaagatagacggtgttgagcatgaattttccagtgttccgggggcaaaagaggatgttactaacattatcttgaatctgaaacaagtgagattcaagcaagtagttgaagaattcgagagtgagaaagtaagtattacagtcgagaattcaagtgaatttaaagcaggtgacataggtaagtatttgactggatttgaagtgttaaatcctgaattagttatttgtcatttagattcaaagtcgactatgcagatagatattacgatcaacaaaggtcgtggttatgttcctgctgacgaaaaccgcgaatattgcaccgatgtgaacgtaattcctatcgattctatttatactccgatacgtaatgtgaagtatcaggtagagaacttccgtgtagagcagaagaccgactacgagaaactggtacttgagattactaccgacggttccattcatccgaaagaagccctgaaagaagctgcaaagattctgatttatcacttcatgcttttctctgacgagaagatcacgctggaaacaaatgatgttgacggcaatgaagagtttgatgaagaagtattgcacatgcgtcagttgctgaagaccaagctcgttgatatggatctctctgtacgtgccctcaactgtctgaaggctgcagatgtagagactcttggtgacttggtacaattcaacaagacggatttgctgaaattcagaaacttcggaaagaaatcgcttaccgagcttgatgatttgctggaaagtctgaatctgtcgtttggaactgatatttctaaatataaattagataaagaataaaaaatgagacataataagaaattcaaccatttgggtcgtactgcctctcatagaaacgctatgttggctaatatggcgtgttctttgattaagcacaaaagaatcactacgaccgttgcaaaggctaaagctttgaagaagtttgttgagcctttgattacaaaggctaaagacgatacgactaattcccgtcgtgttgtatttagcaatttgcaagacaagtatgctgtaactgaattgtttaaagaaatctctgtgaagattgctgatcgtccgggtggttacactcgtattatcaagactggtaaccgtttgggtgacaacgctgaaatgtgcttcattgaactcgttgactacaacgaaaacatggctaaggaaaaggttgccaagaaggctactcgtacccgccgttcaaagaaagctgctgctactgaagctactcctgctgcagaaactgctgcaccagttgcagaagctcctgctgctgaggaagctaaagctgaataattcaactattctttttatatatagaagccgttccaatttgtttggagcggctttttatttcctataaatcatccaagaaacattaaaagatgtgtgcattaaacaaattcctgaaagaaactgttatatttgcacatagatatggctaaattcttaagattcataggattcatggtgcttgcattggctttatggcagactgtaagcgatacatttgccaataaagcggcgagtggtgggaatgttgtgagtgagaatactattgccgtacatgagcagactgatgcctatattgcgatgcctcaattgccttatctgccggatgcagagctggcgggcatgggtggacaattacattcgctgacgtactcccgtatacagcgtatttctaccacggaatatatattttctttaaaggactggattgacaaactggcccagcgagcggctgttttgtctctgcatcgtgagaaactctatgatgccactgcctattatcgttgccagccggtgtgcgaatattacattttcacactaaggcgtattctcatttagtgttttattgaattttcctttttcccttgtgtatggtcagactatgtgtttttgcagggaaatactgtattttctatttctaataaattcattaaaacatattataattatggcaactcaaactattgacgcaactctttttgcgtcttcacatcccgatattgtaaagcgtaccagtgtttcaggacttatcttttcagtagctatgctgctggtcggtgtttttatttttgcatccatttttgagatgagtgataaatcttccactctcagcatggctttgatggtgctgggtacggcattcgtcttgcttggcgtgttccgtctgttttggaaatcgaaggaagtggtctatttgccgacgggcagtgtgaccaaggaacgcagtgttttcttcgatttgaaatatttgggcaaacttacagatatgattgagaatgaacagctgaatggcgagactgaaataaaaagtagcggcagtggaaatgtgcgcatggatgtcatgatttcgcaggacaataaatttgcggctgtacagttgtatcagtttgtgccttacacgtatactccggtaacttccgtacgctattatacgggtagcgatgcggttgcagtatctactttcctggagaaatgtaaaacagcataatcagtcaaagagttagacttgactttaactgtggtggggattagtcggcaacggcaatccccatttttttcatcaggaagcaggcgttcatattctgggcgatgcctgggcgcaagcggtaggagaaggtcagttcattgtctgtaatgtctgcttcgaagcgatagttgcggatgtcatcggggaagaggtcgatgagtgttcccagcagcaggtcgtgggtggcaatgatgccattggcctgcaaagtcatgaattgcttgataagggaaaaggagcctttctgcttgtccatggagttggtacctttcagaatttcgtcgaggatgatgaaaagctcctcaccagcctgcagcttgtctatgatgagtttcagacgtttgagttcggcaaagaagtaggactcgttgtcgttcagtgaatccgaggtacgcaggctagtgatgagccgggccgggcatatttccatttggcgggcacagacgggggcgccgatgcaggcaaggaggtaattgatgcccaccgtacgcagataggtgcttttccctgccatgttggcgccggtgacgatgatgaaaaacggtcgtttcaccatgtcgatgtcattgcggacacagcggtcacggttcatcagcggatggcccagggcttcggcacggagacggaaggaggaaggggcattgatgggtgcttccgtttcagaattgctttcttcttctttatttaggtttccttttccctttctttccgcttgaactatctttgggtaaatatagtccggatgattataggcaaatgttgccagtgagttgagcgcatccatttgtccgatggcatcgagccacccgggcagttcagcggcatattgctctttccaggcttcaatgcgcatgatttgacgcagttcccagaagaagaggccgttcagaatgacgtacataaagacattgttgcgttggtcgagttcatccatgagcttgttcagcctgctgatggagtgggaggctttccgtttttctccgtcaatctgttgtcttatctctttgagcagggtggcttgtgcaggctgcttttccatgaggtggagcagggcggcgtaggtggagagaatttgcagttttttgccatagatggcctgcatcttggtgactttgccagtgaagccgaagccggcgatgacgaagcaggtccagatgatgccgtagatacttgcggacagaattcctgccatgacgagtgcgaggcagatgaggttggctcccgtcaccagtaccggcaggaggcgcagtaatttccggctccggaagatgctcggactttccgcccattggcacagttctgtttcatcggcggcttttcctttgtacagcaggccgaggatacggaagcgctgacggaatttcagttccggagccagttcactgacggcttcttgtcggcggatgatttcttcctttctctcgagatgtttccccagccagtgggcgaggcggtgtttcccgggctgtgtgcaggtacggttgatgtactggaaaagggaatgcggaccgaaaacatccaaatcataggtgtagagatgggtggggtctatgtatgcttcgccgtcatcgaaagaagacgtatcgtaatccagagcggcgagttcctgctcgttgatttccatcttcttttccagatagtccttgcgatggaacagccggttgtggtatttcattaaaaataggaacggcagtagggtgatgagggcaatgcaggccagtataccccagctctcgctccagaaatagataattcctactactcctgccacaaatagcagcaggcgcaggctgccgatgcggtaaatcttctgttgtactttattcagttcttgtcttgcctcttctgccgtgttgcggtagacggcgctgattttatctatcgtatttatttgctccatacatgttaagtttaaggcaaagatatacatttccaattgttttttccgcgattttttgtctacttccgataaaaaatgtacctttcgctcactaaaacaaagtttcagaaaagaggaggttgggatatgaagaagagttggttgttaggcgttctgatgttgctggcggttttgccggtgggggcgcaacaggtaatgtattccaatctgaaagagttggtggagaaccgtggcgatacggttaccacactgaagattgagaagcgtacaaagaaccagatttacctcatgggcggtgccgattatcgtattacggtagacgacaatcccggtctttgccgttatttgaagtcccgttgttatgctgtacgggtagatacctcgctttatgtcaattgccgtaagatgcgctataagcgttatcgcttcgggcagtggtatgcacctgccatgtggctcggcggcaaggtttacttctgtgcacagcctgtgggacaagcagccaccagtaccatgactcccgatgatgccacacgattgggcggtgaagtgggagacgccatcaatgcttcgggactggtgcatgcccgcgtctattacgaactgaatcccgaaaccggaaagtccgagttcgtgggacgtgagcgaatgatgcaattgcttgccggatacccgacactgcacgccgaattcgagaaagaaacaagcgagtcggcagaggtcatcggcaagtatctgcgtgcactccgtccattaatcactaatcattaatcattaataagatgatattattgcaagacgtgcccgatgggtacgaatactgctttgcgggtaacggaaagtgccccaaagcctcttcctgcctgcgggcgatagcggcacaactgttgtccgagagtgaaggcccccagccacagtccgttcgtgcggtgaatcctttttatgtcggcagcttgtccgggtcctccacttgtgcccgttaccgctccagcgagcagctgcactatgcccgcggtatgacacgccttttcgacgaagtacccaccaagctgcttttcaccgtgcgccatcgcgtgatgggatgcttctcttgcgaacgctattactatcattgccgcaagggcgagcgccctatctctcccgaagaacagcagcggatagcccgggtattcaatgcggtaggcataggcaccaagcctaagttcgaccactacgagtatgcggtagcttggtgaccggctgcaaagtcactgcacaccttttgcagcgtcactgcaaacccgttgcagtcgcgctgcaaagcagttgcagtatcactgcaaataggtatgcagtgatgctgcaaacggtatgcagtggcactgcaaaatgcatgcactcactttgcagtgagaagtcgctgttgttcacgttgttacagtatgaatacaatgaggccttatctccctcttttcggcctgctgtttacagattgcagaagaaggatacgaataccggtacactcatatcaattaatattccgtggaatatagcgataggaatcacgtcctttccggaatattgggtgatggagggtagaagtacatccatcgaattgacccctgccgccgatataggtgccagcttgccgaaatatttccggatgagcggtgcacccagcaaagccatcatttcacggaagatattggcaagcagggcgatggtgcccagctccgtggcgagttgcaggcctatggaaggttccttgaattgcgtaatcagaatggaggaaagcgaataataagcaaatccgctaccaaccgccatgcagtcgaacacactccattggctcaacagcagactggcgaaggcggagaacaacagtgttcccacaatggtggccatcggcaccaaaagcattttgggccgtagactcttgaccagctccttcagttgcttgttgctcccgatgccgatgcccacctggaacatcaatgcatagagcacatacatggataagtcgtgcaggtcgaactgaaaatcattggctactcccatcaggcagccggcacagaaaaatgcaacaaccgtcaaacttcccttcatctcttctctcctttcttgaaaaataggtgaaacaccatcagtgaggccagcatactgcccgtaatgctcagtgaggccagtacggcggcctgccacccgaatcttcccagattgtcaacaatcagacggttggaaccgatggatacaccgagtacaaagagtagcagtaagatggtgagcgaggcgcttttctccactttttgcaacatttgtacgttacgcatcaggtatccgataccgattcctataaacatgatagatataattgtaaacataagttttcttcttttttgggtgaatacataggttagtccggtttcttcgaacggaaactccatacgcggcatttccccttccttttctcggtaagggaagtgcaaaatagtaaaatgtaaattgcagggtagttaaatgaatccgctgaaccaatgtacgtgcactatgaaatggccgcataaggtcttgttgccccatgcagcattgcgcgtattgtatattgtagttaagtactggttcatatcgtttttgaatttcggtgcaaaggtaatgctagtttgaataatttccaaataaatattcataaattgttttgcgaaaaaaagactcttcagtgcgtggcccccccgtaaaaacattatttttgcaagagaatagaggaaatacaagagctcctttgtttagaaatatagttttaaaaagaaaagagacatgaaaagattgagagatttaactgctgttcttggcatggttgctttaactgcttgcaacaacgcctccattgaaggctcctgggtggagccggttccgggaatgcccggcatgcagcaaggtttcgttcttgatggggacggaagcgcttcttccattaacatggccaccttgaaatatgaggcatggaaaaaagtaggaaaccggttgttgctttcaggtaccagcatcggcaatcaccagaatatttccttcacggatacgctgacaatagaaaaactgacgcaggacagcctgattctcaaaagaggagagctgctcttgaaatatgccaggaacaatgaagttctgaatcaaaaaacaatacctgccgcggtgcttacccctgccaagaaacttttgtcagtaaaaggcgagctggtcgtcggccatgaagtgcgttccttcaaagccgaaggagattctgccgattattggattgtggatgagaccggagaactcatgcaaaaatatgatgatatgacgaaaggagttaaaaacggaaaaccggtatacgtagagttggaagtaatcgatatgggcaaagccgatgacggatttgccgccgattatgaaggtgtctatcaggtaatgaaaatcaataaaatggctttaaaatagaattcctctttgttggtttctgactaaaagataaataatcccggcattccgttgcgaatgtcgggatttatttctatattgcggcaaatataacccttgcgggctgacactttgtaaatccttaatctttataggacatggagataaccttaagtaaaacattgccttcctatccttcctttgtcgagggtatccggcgggcacccgaccgtggctacacccttacccctgcgcagacggctacggcattgaagaacgctttgcgctacatccccaaagagctgcacgaaaccctcgctccggagttcatggaagaactgcgtacacgtggacgtatctatggctaccgctaccgcccgcagggcgacctcaaagcgaaacccatcgacgaatacaaggggaactgcattgaaggcaaggcattccaggtgatgattgacaataatctttgtttcgacatcgccctttatccgtatgaattagttacctatggtgagacgggacaggtctgccagaactggatgcaataccggctcatcaagcagtacctcgaagtgttgacgcgcgaacagacactggtcatcgaaagcggacatccgttggggcttttcaagtccaagcccgaggcgccccgtgtcatcattaccaatgcgctgatggtggggctctatgataatcagaaggactggcacaccgctatgcagatgggcgttgccaactacgggcagatgactgccggcggctggatgtacatcggtccgcagggtatcgtgcacggcacgttcaatacgttgctgaatgcaggccgtctgaaactgggcattccgcaagatggcgatttgcgcggacgcttgtttgtttcttccggtctgggaggcatgagcggtgcgcagcccaaagctgccgagatggcaggggcggcggcaatcattgccgaggtggatgcttcccgcatcgaaacccgccatacccagggctgggtgggacacgttacagattctctggaagaagccttctcgctggctcgacaagccatggacgagtgtcgcccggtttctgtggcctatcacggcaatgtcgtcgatttgctggaatatgcggtgcagaagcagttgcacatagatttactttccgaccagacttcctgccatgccacctatgagggcggttactgtcctgccggactgacgtttgagcagcgtacccatatgctgcacgagaatccgtcgaaattccggtgtctggtggatgcttccttggagcgccatttcaaggctataaaaaggctggtggaacacggcacgtacttcttcgattatgggaactccttcatgaaagccgtctacgatgccggtgtgagcgaaattgctcgggacggagatgataagaacggcttcatctttcccagctatgtggaagacataatgggaccggaactgtttgattatggttatggtccgttccgctgggtgtgcctcagtggaaaacatgaagacttggtgaagaccgaccgtgcggcgatggaatgtatcgaccctacacgtcgcggacaggatttggataactataattggattcgtgatgcggagaaaaacaacttggtggtaggcacgcaggctcgtattctttatcaggatgccgtgggacgtatgaatatagctttgcgcttcaatgaaatggtgcgtaagggagaggtcggccccattatgttgggacgcgaccatcacgatgtcagcggtacagactctccattccgtgaaacatccaatatcaaggacggcagtaatgtcatggcagatatggcggtgcagtgttttgctggaaactgtgcgcgtggcatgagcttggtggccttacacaatggaggtggcgtaggtatcggaaaagccatcaacggcggtttcggcatggtgtgcgacggcagtgagcgggtagacgaaatcctgcgttccgctatgttgtgggatgtgatgggtggtgtggcccgccgttcgtgggcacgcaatccgcatgccatggagacgagcgaggagtttaaccgtacgcatgcagacggctatcatatcacgatgccgtatgtggctgatgagaagttggtgcagaaagtggtgaaggagtaagtaaagtgatgatttcattttttagacgcggataacgcggattttttctttcaaaagaatcccgacgtctctgtattccgataaaaagaattcgcgtcatctgcgtctgaaaaatcagagtatatatatttttttttaaagagcattatgaataagattatggaatgcgtccccaatttcagcgaagggcgcgatttgcagaagatagataagatagtagctccttttcggggcaaacaaggtgtgaaactgttggattacagtaacgatgaagaccacaaccgccttgtggtgaccgtagtgggcgagccggaaccgcttcgtgatgctgtgctcgaagctatcggcgtggcggtagagctgatagacctcaatcaccatcagggacagcatcctcgtatgggtgctgtagatgtagtaccttttatccccatccggaatgtgacgatggaagaagccgttgccctctcgaaagaagtgggcaaggaggttgcaaaacgttacaatcttcccgtcttcttatatgaaaagtctgcttctgcccctcatcgggagaatttggctgctgtccgtaaaggggagttcgaaggtatggccgagaagataaagcaaccggaatggcatcccgacttcggactggccgaacgtcatcccaccgcaggcacagtggctatcggtgcccgcatgcctttggtggcctataacatcaacctcaatacccccagtctggagatagcccatgacatcgctaagaaaatccgtttcatcggcggaggactgcgttattgcaaggcaatgggagtggagttgaaggaccgcggcatcacgcaggtatccatcaacatgacggactatacccgcaccgccctctaccgtgctttcgaactggtgcgtgtggaagcccgccgctacggcgtcagtattgtgggcagtgagattatcggtctggtgccgatggaggccttgatagatacagcgtcctactatctgggattggagaacttctccatggagcaagtcttagaagcacgaatgtaaccgaattaaatagtactaacttaattcccctccctacgggggaggggttaggagagaggctttatgacagaaaaccttattatattcaatacccgtgtagtgacccccctcggcttttctgcccgttgcggcaaggagatggagcaactgagcatcatcgacaatgctacggtggaagtgaccgatggcatcatcacctacgtcggacctaaccgtggagaggagcgtgacggctattatcagcactactggcattacaatgcctgcggcaagtgtctgctacccggctttgtggactcacacacacattttgtgtttggtggcgagcgtgccgaggagttctcctggcgtttgaagggagagagttacatgtccatcatggaacgtggaggaggcatcgtgagtacggtgaaagctacccgtgcatgtaatttcatccagctgcgcagcaaggcggagggctttctgaagcagatgagtgctatgggagtgactaccgtagagggaaagagcggctacggtctggacaaggaaaccgagctcctgcagcttcgggtgatgcgtagccttaataatgacgagcacaagcgtgtagacgttgtctccacttttctcggtgcacatgctgtgcctgcagaatacaacggacagacggacgagtacgtggactacattatccgcgaagtgatgcccgtagtggttcataataatttggcagagttctgcgatgtcttctgtgagcagggcgttttctccatcgagcagtcccgtcgccttttgctggcagccaaggaaatgggacttgccttgaaactccatgccgacgagattgtaccattagggggtgccggactggctgctgaactttctgccgtctctgccgaccatctgctgcatgcttcggatgcggacatccgcgccatggccgacaagggagttgtggcgacccttcttccgctgacagcctttgctttgaaggaaccctatgctcgtgggcgcgaaatgattgatgctggttgtgccgtggcccttgccaccgacctcaatccgggcagttgtttctccggttccatccccctgacatttgccttggcgtgcatttatatgaaaatgagtattgaagaggccatcactgctctgaccttgaacggtgcggccgctctgaaccgtgcggacagcattggtagtatcgaggtgggtaagaaaggaaacttcgtagtgctcaatacggataattatcactttttaccttattatgtaggtatgaattgtgtcaataccaccataaaggggggagtgctttatcctgtactttaagaagtgctgatatcccctcttaatccttaatctttaatatttaatatcatgttagttgatttgacagtaaaggaatttttgaataaagtggcgggtagcgatcccgtccccggtggcggtagtattgccgctttgaacggtgctattgcttctgctcttgccgctatggttgctaacctcaccatcggtaagaaaggttatgaacttcacgaagagctgatgcgccatatctccggagttgccttgcagcaaaagggggcttttgtagaagatatagaccgcgactctgaagcctacgacaaggtgtttgcctgcttcaagatgccgaaagctacggatgaggaaaaggcggcgcgcagtactgccatccaggaggctaccaagtttgccgcccttgttcccatgcaggtggcacgcaatgcgtatgagctgatgacggttatcatggatgtagctcgcctgggcaaccgcaatgccgttacggatgcttgtgtggccatgatgtctgcccgttcggctgtgctgggcgcactgatgaatgtacgcatcaacctgggttcgctgaaggacaaggagtttgtgtccaagctccaaagtgaagccgacgaattggaacacttggcttgtgcgaaagaaaaggaattgttggacgaaatcaatcaagagctgaaagtatgaagaatgtctattatgtaggttccggtgagttgaccttcgacctcatcgaacgtatcatcaatgaaaatctgaaactggagctggctccggaagccaagctgcggatacagaagtgccgcgattatctggacaagaagattgcggagtcggaagaacccttgtatggcattaccaccggtttcggctcgttgtgcagtaagagcatttcgtcggacgagctgggcaccttgcaggaaaatctcatcaagagccatgcttgcagtgtgggcgaggagatacgcccggtcatcatcaaactgatgatgttgctcaaggcgcatgctctctctttggggcatagcggtgtgcaggtcatcaccgtgcagcgcatcctcgatttcttcaataacgacgtgatgcctatcgtttatgaccgtggctcactgggcgcctccggcgacctggctcctctggccaacctcttcctgccgcttatcggtgtgggcgatgtctattataaaggaaagaagcgcgaggctatcagtgtgctcgacgagttcggttgggaaccggtgaagctgatgagtaaagagggattggcattactcaacggcacccagtttatgagtgccaacggtgtctttgctcttctcaaagccttccgtctctccaagaaagccgacttgattgccgccctctccctggaagctttcgacgggcgtatagatccgtttatggactgtatccagcagattcgtccacacaagggccagatagaaacgggtgccaacttccgcaaactattggaaggcagcgagctgatagcccgtcccaagcagcatgtacaagacccttattcgttccgttgcatccctcaggtgcatggggccacgaaagacgccatccgttacgtggcttccgtcctgctgacggaaatcaattctgtgacggacaatcccaccatcttccccgatgaggaccgtatcatctcgggcggtaacttccacggccagccgcttgccatttcctacgactttctcggcattgccctggcagagctgggcaatatatccgagcggcgcatcgcccagcttatcatggggctgcgtggacttccggaattccttgtggccaatcccggtctgaactccggtttcatgattccgcaatatgctgccgcgtctatggtaagccagaataagatgtactgctatgccgccagcagcgactccatcgtttcctccaacgggcaggaagaccatgtcagcatgggtgccaatgcagctactaagctttatcgcattatggacaatctggagcatatccttgccatcgaactgatgaatgccgctcaaggcatcgacttccgccgtccggcaaagacttctcccgttctggagcgtttcctgcacgaatatcgcaaggaagtcccttttgtgaaggaagacatcgtgatgtataaggaaatccataagacagtcgctttcctcaaccggacaaagtttgattattaggaacttcccaataaatctgccagaaacataataattattaatctgttaacaataagaaaggaaacttaattggcgaattgagttttctttctatatttgtcccgttttattccgataatgaataaaaatagttttagtttagaaagggaagaaaaatgggcgaacacacgaagcattcaacatcacgggtggaactgagggaacgtatcattctggccgccgtagaattatttacaacaaatggaataaaaagtatcacgatggatgagattgccgcatctttgggtatctctaagcgcactctctacgaagtttttccggacaaggaaaccttgttggaagaatgtatcctgaagtcccagaaggatggtgatatttttgtgaaaggagtaatagagacttccagtaacgtattggaagttttgttgagatgttatcagtggagcatagagcgttttcatgccacgaacaagaagttttttgaggatatcaagaaatatcccaaggcttatcagctgatgaagaacaatcggaaccggagctcggaagatacagtgaacttcttcaaagagggcgtgaagcaaggcatttttcgtgatgatgtgaatttcgccattatcaatctgctcgtgcgcgaccagctcgatttgctgatgaattcggacatctgcaatgagtattctttccttgaagtgtacgaatctatcatgttcactttcttgcgcggtatctctacggagaagggtgcccgtgtcctggaggactttatctgcgaatatcgcaagaatcaggtaaagccggatgaaacgaaggagtagttttaataaataatctatttttgatttatgaagatgcagagattttgggtaggaagagcactactgttggcagttgctgtgctgtatgccggcggctatgtgcgcgcacaagaggcaaaggataccctgaccctgacccttgaccgtgccttggagattgctttaagcgacaatcctaccataaaggtggcggaggaagaaattgctttgaagaaagtgactcacaaggagacctggcagaacttgcttccgcaggcaagcattgacggtacgtggaatcataccatcagtgcggcacagatgaatcttggcggacagtcgttcaagatgggtatggacaattcgaatacggtaagcggggtgctgaatatcagtttgcccatattcgcccctagcgtatataaggccatgtcgatgacgaagacagacattgaactggctgtggaaaagtcacgggcttctaagctggacttggtgaaccaggtaactaagggttactatcagctgatgctgacgcaagactcctacgatgtgttgcagaagagctataagctggcggaagacaactacaacattgtcaatgccaagtatcagcagggtgccgtcagtgagttcgataaaatcagtgccgaggtgcagatgcgcagcattaagccgaatgtgatttcggcgggtaatgccgtgacgttgtccaagttgcagttgaaggtactgatgggggtaacggccgatgtggatatagagattgccgacaatctcggcaactatgagacggagctgtttgccaatgaactgaatcagcccgctgccaatctgaacaataatacgacgatgaagcagttggacttgaaccggaagatgctcaatcagaacatcaagtcactccgtgccaacttcatgcctactttgggtatgaactattcttaccagtaccagtcactctacaacgaggattggaacatcctcgattataattggagcggaagttccgcactgatgtttacgctgagtattcctttgtataaggcaagcaatttcaccaagctcaagtccaaccgtattcagatacgtcagttggagcagaaccgtctggacacagagcgaaagctgaacatgcagattaccagctaccagaacaacatggctgccagttccgagcaggttgtcagcaaccgcgagaatgtgatgcaggcacagaaagctgtgcagattgccggtaaacgctatgaggtaggcaaaggtacggtgttggaactgaacacatcacaagtgcagcttacggaggctgaactgacttacaatcagtccatctatgattatctggtagcgaaggctgaccttgaccaagtgctgggaaaggattatattgcagagaacgaagaatgaagaactaagaatgaagaatagaaataagaacaacgatatgaaaaaaggttttcaatggatggccctgctggttgttgccatgttgggggcatgtagcggaggtagtgataaagctgctgctgagaaggtggacgagaagccgagggtgaaactggccgaggtgtcgtcccgtcccgtggaacagattcaggaatacaccgctacggtggaagccgaagtaaaaaacaatattgctccctcttctccggtgcgtatagaccgcatctttgtggaggtgggcgaccgcgtgtcgaaaggccagaagctggtcagcatggatgctgccaatctgaagcagataaaatatcagttggacaaccagcagatagagttcaagcgtattgacgagttgtataaggtaggcggtgcctccaagtcggagtgggataccgccaagatgaatctcgacatccgtgagacttcctataagaatctcttggagaacacctcgttgctcagtcccattaacggggtggtgacggcacgcaattacgataacggagatatgtatagcggtggagaaccggtactggtagtggagcaaatcactccggtaaaactatacatcaacgtatccgaaggctactttaccaaagtgaagaagggcgctcccgtatccgtgaaagtagatgtctatggtgacgaggagttcgaaggcaaaatcagccttgtttatcctaccatcgacccggctacccgtactttcccggtagagatacagcttgtcaaccgtgatcagcgcgtacgtccgggaatgtttgcccgcgccacgctgaacttcggaacacaggaccacgtggttgttcccgacctggccattgtgaagcgtgccggttcaggcgaccgctatgtctatgtctacaaggacggcaaggtgtcttataataaggtagagcttggccgtcgtatggatacggagtatgagttgatttccggtgtagacaataactctcaagttgttattgctgggcagtctaaattagccgatggtgtggaagtcgaggtagaaaaataatatggtaatgtggtaatgtgataatatgctaatgtgccgatgtagctacattgcgcagccaattagcatattagcacattggcaaattaaagaattaatcttatgagtttatacgaaggagcggttaagaaaccgattatgacctcgctctgcttcctggcagtggctatatttggtctgttctctctgtcgaaattgccggtagacctttatccggacatcgagaccaacaccattatggtgatgacgacctatcagggtgccagtgcctcggacatcgagaataacgtgacccgtccgttggaaaacgtgctgaattcggtcagcaacttgaagcatatcacttcccgttcgtcggagaatatttccgtgattacgctggagtttgagtatggatatgacatagacgtgctgacgaacgacgtgcgtgataaactggacatggtgagctccatgctgcccgatgaggtcgaaactcccatcatcttcaagttcagtacggacatgattcctatcctgctgctctccgtgcaggcagaggagagccagccggctctttacaaaatattggatgacaacgtggcgaatcccttggcgcgtgtgcccggtgtgggtacggtgtccatttcgggtgcccccaagcgtgaggtcaatgtatattgcgaccccaataaactggatgcctacaacctttctgtagaaactatcagctctattatcagtgccgaaaaccggaatacgccgggcggtacgttcgatgtgggtagcaatacctattcgctgcgtgtggaaggtgagttcaaggatcccaaagagatggagaacatcgtggtaggtacgcacaacggtgcttccgtctatctgcgcgatgtggcaaaagttgtggactctgtggaggaacgtgcacagaagacgtatagcaacggtgtgcagggcgctatgattgtggtgcagaaacaatcgggtgccaattctgtagccatttcgcagaaggtaattgatatgttgccacagttgcagaagtcactgccgagcgatgtgaagctggggatcattgtcaatacttccgataacatcttgaatacgatagacagcttggaggaaaccattatgtacgctatgctgttcgttatcttggtggtgttcgtttttttggggcgttggcgtgccacggtcatcatctgtatcaccataccgatgtcattggttgcctcgttcatctatctgggtatcatcgacggcggttcactgaatatcatctcgctctcttgtctctctattgctattggtaacgtggtggacgacgccattgtggtactcgagaatgtaacgacccatattgaacggggttccgaaccgaagcaggcagcgatacatgccacgaacgaggtggccatctccgtaattgcatctacgctaactatgattgcggtattcttcccattgacgatggtaagtggtatgtccggtgtgttattccgtcagttgggatggatgatgtgtgtgattatgacggtttccacagtttcagccttgtcattcaccccgatgatgtgtgcgcagcttctgcgtttgcagaaaaagcagagtaagatgttccttacgctctatacgccgattcagcgtgcgctggacggtcttgacgtgtggtatcagaaccggttgaactgggctgtgcgccatcgtctgacggttatggcaggctgtgccgcattctttgtggcaagtctgttctgtgccaagtacatcggtaccgagttcttcccggcagcagacaatagccgcatcggtatcaaccttcagttgcccatcggggcccgtgtggagcgtgcggaagcgttggcttcggaactgacaaacaagtggatgacgcgctacggagatatgatgaaagtttgcaactacactgtggggcaggcggactctgacaatacgtttgcttccatgcaggacaacggtagtcatatcattagtttcaatatcagtctggtgagtccgggagaccgtgacgtgacactggaaaccgtttgcgacgaaatgcgtgaggacttgaaggggtatcctgaattggataaggcgcaggttattctgggcggtagcacaggcggcatgagcgcccaggcaagtgccgactttgaggtttatggttacgacttcaccgctacggacaaagtgtcagccgaactgaaagagaaattgttgcaggtgaaaggtgtgagtgaagtgaacatcagccgtcaggattatcagcccgaatatcaggtggactttgaccgtgagaagctggcattgcatggcttgaatctttctactgcctccaactatctgcgtaatcgtgtaaatggtgctttggcatcttattatcgcgaagatggtgacgagtacgacatccgtgtgcgttacgctcccgaattccgtacaaagattgaagatttggagaacatccttatttatacgccttccggtgagggtatccgcgtgaaagacctcggcaaagtagtcgagcgttctgctcctcctaccatcgaacgtaaagaccgtgagcgtattgttactgtatctgcggttatttcgggagcacctttgggcgatgtggtggccgatggtaatgctataattgataagatggacctaccaagtggtgtttctatccagatttcgggttcgtatgaggaccaacaggattcattctccgacttgggaacgctggctgtattgattgttattctcgtattcattgtgatggcagctcagtttgagtctttgagttatccgttcatcatcatgttttccattccatttgcattcagcggtgtgttgatggcattattctttacgggaaccaatttgaatgtgatgtcgcttttgggtggaatcatgttgattggtattgtggtgaagaacggtatcgtactcatcgactacatcacgctttgccgcgaacgtggtcaagcggtgcttcactctgtagtcacggcaggccgcagccgtttgcgtccggtattaatgactacactgaccactatcctcggtatggtgccgatggctgtagggcagggtgaaggtgccgagatgtggcgtccgttgggtgttgccgtaattggcggtctgacggtatctaccattctgacattgattcttgtccccgtactctattgctcgtttgcaggtgttggtatccgccgcacgcgtaagaagattaagaaagaccgtgagctgaatgattattaccagttgcataaggagaagatgacgaaaccacgtaaacaatgattaatcattatccgttaatcattaaacattaatcactaaacattatatagcgtgaaatcagtatttataacattcgaccaagcgttctttgaacgtatcatggcattgcttgaccgccacaactgccgcggcttcagctattggcagcaagtacaggggcgtggcagtaagacgggggaaccgcactatggcagccatgcctggcccagtatgtgttccgccatcatcactatcatagatgaggctaaggtggctccgttgctcgaagcgctccaccggatggacaaggagaccgagcaactcggactccgtgcttttgtttggaatatcgaacagaccatttaatcgggtctgctctgtctataaccgttatccccggagaaaaaatcttgtttctttggggataattcttttttgtccggagagattttttcaacctatatctatatctttgcggccacattaggtatggaaaagaattcattgaaatatacgggtctgttggcgtttatcgtatggggtgcattgttgctgatgcatctgttgccaagtattacgatgggtggccgtgtgctgaggcgtgtggatatcttgggggacgtgcgtcgtccttccaagccggtgagtgagccggacagcctgctgcctccgcccccgaaggtgaagcccgcctttgtggacacctgccgtgcgggcatgacgtgcattgaagattacagcgattctaccatgcgtggcatgacgcggttctatcaggcgctcgacgagcttgccaaagcaccccgtccggttcgtatcgcctacttcggcgactcctttatcgaagcggatattctgacggctgatttacgcgagatgcttcagcagaaatatggcggttgcggagtaggttttgtcaccattacgtccatgaccagtggcttccgtcctacagtgcgtcattccttcagcggatggcagagtcattctgtcatggactccgtgttctttgaccgtagcaagctgggagtctccggacattactttattccgaataccggtgcttatgtggaactgcgggggcagaagaactatgcctcccgtctggatacttgccagcgtgccagtatttttttctataaccgtggcacaaccaccctttctgtccgcgtcaatcgtggcgaagcaactaccgagacttttgagccgattgatgatttgcaggagatgacggtagagggaaatatcggttctgtccgttggacggtggaaagtgcggactccaccttgttttatggccttgccatggacggtacttccggcattgtgctggataacttctcactgcgtggcagctccggcctttccctccgctctgttcccgtgtggatgatgcgtgagttcaatgaacagcgtccttacgatttgataatcctgcagtacggactgaatgtggctacagagcgcggacggaattacgacaagtacattgccggcatgcagacaacggtgcagcatctcaaggaggcctttccgcaagcagccatcctcatagtcagcgtgggcgatagggactataagaccgaagaaggggagctgcgtaccatgcctggcatcaagaatctggttcgttatcaacagaatttggcggcggatgaggctgtcgctttctggaacatgttcgaggctatgggtggggaaggcagtatggcagacatggtgcatgccaagccgtcattggccaattatgattatacgcacatcaacttccgtggtggaaagcatcttgcgggattactttatgagtctttgatttatggcaaggaacagtatgacagaaggagggcctactatgaagaggagccataaggaggattcacgattgtacgatttacgatgtacgatttgctgcgcggtgctggtgctgattgcggcgatacggccgctccatgcacaagatgtattgccaggcagcctttcgtgtcatgccggtggagcggattgtgatactctctgcctctattcccaacgtacggatacggtgtctgtccctttgataacttttcccgccgcattccggcaaatgaaggagaatgtacttaccgacagtctgggtattcttaatcctttctgggagaagttgcgtctgtctcggctgggcgcttccgctgatacgcttcgcatcgtacatgtgggcgacagccatatacgcggccatatcttcccccgtaccaccggtgcgttgatgcaggacactttcggggcagtctcttataccgatgtaggtatcaacggtgcattttgtactactttcacccgtccggaccgtattgctgatattgcggctctgcatcccgacctgcttattctttccttcgggacgaacgaaagccataaccgccgttacaatacaatgctgcactatcgccagatggacgaccttgtacgcatgcttcgcgagaaactgccgaatgtaccgatgttgatgaccactcctccgggctcttacgagagtttccggcagcgtcgccgtcgtcggacctataagattaatccgcgtactgccgttgccgtgcagactatccgctgctatgccgatgaaaacggattggcggtatgggacatgtacgaaatacttggcggtacccaccgtgcctgcctcaactggcaggaagccggattgatgcgtccggaccatgtacactatttgccggacggttaccgcctgcaaggcgagctgttctaccaggccttgttaaaagcttataacgattatgtggaatattgacgaatttttatccggattgaatatagacttggaccgtttgcgcgatgtcttcacttatgacccgcaagccccgatgatattcagcagtggtattttcctctggctgtttgtcgcttttatattggtttatctgttgttgcaacgccggacgacggcgcgtttgctgtttgtcaccttgttttcctattacttctattataaaagtagtggcacttatttcttcctgcttggactggtgacggtctgtgactttttcattgcacgcttgatggcacgcgaggctattccctggctacgtaaggcatgggttgtgttgagtctgttcatcaatttgggattgttgtgttacttcaagtacaccaattttctgggcgaaacttttgcctcgctgacgggaggcacgttcacgacaatggatattttccttccggtgggcatctcttttttcacttttcagtcgttgagctatacgatagatgtgtaccgtcgccagataacgcctctgaccagtttgttggattatgctttttatgtttctttctttccccagttggtggcgggtcctattgtacgtgcccgtgatttcattccgcaaatccgccgcccgctgtttgtctccaatgagatgttcggacgtggaatcttcctcatcgtgagtgggctcttcaagaaagcggttatatcggactatatcagcgttaactttgtagagcgtatttttgataatcctactctttattcgggggtggagaatctgataggtgtttatggctatgccttgcagatttattgcgacttctccggttacagtgatatggctatcggcattgccttgttgctgggcttccatttcaatatcaatttcgattccccttataagtccgcttccattacggaattttggaggcggtggcatatttcgctttccagctggttgcgcgattacctttatatttctttgggaggcaaccggaaggggaaaatccgccaatatgccaatctcatcattaccatgttcctgggcggcttgtggcatggcgcttcgtggaattttgtactttggggaatgatgcatggcgttgcgcttgcagcccataagttctggatgacgcttaccgggcgtaagaaggggacggagagccatggcatccaccgcttcttcggagtgcttgtcactttccattttgtttgtttctgctggatattcttccgtaatgcggagttctccacatcaatggatatgctgaagcagatattcactactttccgtccgcaactcttcccgcagctggtagagggttattgggaagtgtttgcactgatggcattgggctatctgctgcattttgtgcccgacagttgggaacgtgcttgcacaaaaacagtaatccgcctccccttgttgggaaaggcggtactgatgcttgctgtaatctatctggtcattcagatgaaaagttcggagatacagccgtttatctatttccagttctgattacttcttctcggtcgctgtggagtctgcctgctgtcggaagggttcccggtagttgagcccgtctctccggtagaggccgatgagtccggccagtcgggtagtgaagtttgtataatctttcttttccagttgtgtccattgtacttcggcaagggcggccatacgggggagaaccatatactctacctgttcgctggtcgggatgtattctgtccaaaggttggcttgtgtgccgagtatgtgcttggcttgttcttcggtcagtgaggcggtaggattcagactgtatactttctccaatgggacaaagcctccgatggcaaatggttcgtgccgggtatcctcactttggtaataatcaaagtagcaatagtcattgggtgtcattatcacgtcgtgtcccagttgggccgccttgattcctcctgccgagccacgccatgacataacagttgcgttgggggcgacgtcgccttccagaatctcatcccagccgataatctggcgtcctttactattgaggagcttttcgatacgtgtcatacaatagctctgcagacggtcttcggcagtatggttcttgtcggctttcaatttttcggttctgatacgtgcctggcatttgggacacttttcccaacgggtgcggggagcttcgtcaccgccgatgtggatgtatttggaagggaatatgtcaatgatttcggccatgacatcttcgaggaactgcatggacttttcgttgccgatgcacagcacatcttcgaatacgccccaacgtgggcacacttcatacggtccaccggtacatcccatttcgggataggcggccagtgcggcaagcatgtgtccgggcaggtctacttcggggatgaccgtgatatagcgctccccggcatattttacgatttctttggcttgctcctgcgtatagaaaccgccataccgggtgttgtcatactcttcggtgttccggccgataacggtacggtcgcgccaggcgccaatttccgtcagcttgggatacttctttatttctattctccagccttggtcttcggtgaggtgccagtggaaggtattcatattgtgaagtgccagcaagtctatgtatttttttacgaactcaatgggaaagaagtggcggcccacatcgaggtgcatgccccggtagctgaagcggggttcatcctggatgctgccggcaggcaataggatagaggtggctttggtttcggcggggattgatttacgcagggtttgtataccgtagaacaccccgttctcggtctgtccgtttagggtcacccggtcggctttgacggtcagcacatagccttcccggttgccgatggccggatccagtcccaatgtgatggcgcctttgggcgcttcgctccccggggcaagggcttctgtctggagggtgtggccggtggactggctgatgtattcggccaaaaactcggcattgcgtttcaaaagttcattgtgttcggggtaggcgatgatggtaccgtcattcaggttgaagggggattcctgactcaaggcaacctcctggggcaggggaatgacttgatagttggctgttgtttctactccgcatgaagagcaggccaggatgagagtgcctgcaaggagcatgtgtgtaagttttctcatggtattgaactgattaaattagtgtctgacaaatatactaaaaaaatactaaagaggcagaggagaaggggataaatgcatgctcatacctcagttcttctttgctctgtactccttgggtgacattcccgtgtgtttcttgaaatatcgtccgaagaaagactggtcgggaaaacgatatttgtcggcaatctctttcagtgacatgccggtggattgcagtgccattttcagttccaatatcaggttttcgtcaatgatttctttggcagaatcttctgccacttgtttggtgatggcagataggtagcgggtcgaaatgcagagttggtcagcataaaaagcgacatcccgctgggtagtacagtacgtatgtaccagatttatgaactttttgaacaattcttctttccggttactgccattgatttgctcttccgtaaagtaacgttgaaccttgtcgtaggtgtcgagaaagaaaatttgcagcaggttttgtgcaatggcttcgcgatacagattttcagaatcgcggtagatggcattgcttgccgtgatgagtcctgtgatagcacgaaccggttcgtcttcggtatgcgtatagcatgcattctcctttataaaatgtatgaagggcggctctaaacggaagcatgccgtcttgaacattgtctcggaataggcaaagaagtccaccaggaaatctttactcgcacttgtcagtgaaataatggaacttggaagcagcgtaatgtgcgtattgggtacaatatgatattttcttaaatctattgtgataattgcttctccacgggtgcagaacatcagtgctccattgttcattttcagaagacgttcccggaagaattccaggttgtctgttccggctctgaacgtttcttgtttggtagtcagtaatgggttcatattttagattgtttatgatttgcggtcacaaaggtacgagttctttttggattgttaaatagcatgttccgaaaatgaacagtcgtgtacctccaatgaaacaaaaggttgttcaaaaacggcatacctttgctgccggcttaaaaaataaaagataaagccggcgtattattttttttaagataaagagtatgataacaaaaaagagtatgatgaaacagatgatgaccgtcatctgtagtgcaacactggcagcctgcggcagcgcgcctgccgtgcaaccccagtcggaatatcaggtgatgactatttcgactaccgacagagaactgcagacaatctattccgcagccatccgcggacggcaggacatcgacatctatccgcaggtgtctggtacactcaccaaactttgtgtggaggaaggacagaccgtgcgtcgggggcaagtcttgtttattatcgaccaggtgccctatctggcagccttgcgcacagcagaagccaatgtggaagctgcccgtgccggcgtggccacttcgcaactgacatatgacagcaagaaggagctttatgcccagaaggtgatttccgagtttgacttaaagacttcctacaacagcctgctgacagcgaaagcccagttggcccaagccgaggcgcagcaggtgaatgccgccaataacctctcttatacagaagtgaagagtccggcagatggaatggtaggtacgctcccttatagggtggggacgttggtcagcgccagtttgcccaaaccactgacgaccgtatccgataattctaatatgtatgtctatttctccatgacagagaatcagttgcttgacctcacccgccgctacggctccaaggataaggcgctggcagagatggactctatcgaattacagctcaatgaccgttctgtctatccgcaagaaggtaagatagaaactatcagtggtgtaattgatacctctacgggtacagtcagtctgcgtgccgtgttccccaataaagagggattgctgaccagtggcggttcgggcaacgtcatcatcccggtacggaaagagaactgcatcgttgttccccagagtgccacttacgaagtacaggacaaggtctatgtatataaggtagttgacggcaaggcgcaatcagttcccgtgcaagtgacccgtgtgaacggaggtcaggaatatatcgtagagagcggcttgaaagtgggggacacaattgtggccgaaggtgtgggtttgctgcgtgaaggtacctccgtccaacccaaaacgaatgaatgataatttttaaccgatagaatatgaatcttagaacttttatagaacgccccgttttttcggcagtcatctccattacgattgtcattctgggcatcatcggattgttcaccttgcccgttgagcaatatcccgacattgcgccgcccaccatcatggtgagcaccacttactatggtgccagtgcggaaacccttcagaaaagtgttatcgctccgttggaagaggccatcaacggtgtggaggacatgacttacatgacttctactgccagcaatgcagggtcggtttccattactgtttacttcaagcagggtacagacccggacatggcggcggtcaatgtgcagaaccgtgtgtccaaagccacggggcagcttcctgccgaagtaacccaggtgggtgtcaccaccagcaagcggcagaccagtatcttgcagatgttctctttatatagccctgatgacagctatgacgaaaactttcttgccaactatatcagtatcaacctgaagccgcagattctacgtatctccggtgtgggcgatatgatgattatgggtggtgactacagtatgcgtatctggatgaaaccggatgtcatggcgcagtacaagctgataccttcggatgtgacggctgtgctggcagagcagaatatcgaatcggccaccgggtcgtttggtgagaactcggatgagacgtatcaatataccatgaaatatacgggacgcctcattactcctgaggagttcggcgacatcgtcatccgttctaccgaagacggcgaggtgctgaaactgaaggacatcgccgatatagagctgggtaaggacagttatgcctacaaaggtaccatggatggacatcccggtatctcctgcatggtgttccagaccgcggggtccaatgccacggaagtgaaccggcagattgaccggctccttgaagaagcacgcaaggacttgccgaaaggcgtggagcttacccagatgatgtccagcaacgatttcctcttcgcctctatccacgaagtggtgaaaacgctgattgaggctattatcctggttatcctggtggtttatgtctttttgcaagacatccgctctacgctgattccgctggtaggtatcgttgtttcactgattggtacgtttgctttcatgtccgttgccggattcagtatcaacctgattacgctgtttgcgctggtattggtgattggtacggtggtggatgacgccattgtcgtggtggaggcggtgcaggcacggtttgatgtgggctataagtcctcctatatggcaagtatcgatgcgatgaagggcatcagcaacgcggttatcacttcttcactggtgtttatggcggtgtttattccggtatcgttcatgggagggacttccggtacgttctatacccagtttgggttgacgatggcggtggccgttggtatttcggcgattaatgcgctgacactcagtcccgcactttgtgccttgctgctgaaaccttatatcaatgaggatgggacggagaagaataattttgcttcgcgcttccgcaaggcattcaacacggctttcgaggcggtggtcgagaagtataagaagatagtgttgctgttcatcaagcgccgctggctgggatggtcgttgctggcactttcggtggtgctgctggtattcctgatgaataccaccaagaccggactggtgcccgacgaggaccaaggaacgttgtttgtcaacgttagcaccgctccgggtagctcgctcaagacgacaaatgacattatagaccgcgtggagaagcgtctggaagaccttcctcagaaattgcacttgcagaaagttgccggttatggtctgctgtccgggcagggaaattctttcggtatgattatcgtgaagctgaaaccttgggacgagcgtacggcaaaggaagaccaggtgcaggcagtcgtcaaccagatatacgctcgcacggcggatattaaggatgctacagtctttgccattgctccgggtatgattccgggctatggtatgggtaatgcgctggacttgaatgtgcaggacaagcagggaggggatatgaacaccttcttccagaccacccagcagtatctggcggcactgaaccagcgtccggaaatttcgatggcatactccacgttcgatgtacgctatccgcagtggaccgtcgaggtggatgcttccaagtgcaaacgtgccgggattactcccgaccaggtgttgtccacactgtcgggctattatggcgggcaatatgtctccaacttcaaccgtttctccaaagtttacaaggtaatgattcaggccgacccgaagttccgtttggatgaggcttcactgaacaatgcctttgtgcgcatgtccaacggtgagatggctccgttgagccagttcgttacgctgacccgttcctacggtgccgagtccttgagccgcttcaacatgttcaactccattgccgtgaatgccatgcctgctgagggatacagtaccggtgacgccatccgtgccgtacaagaaacggcggagatagccttgccgaagggatatggctatgactttggtggcatcacccgcgaggaaagccagcagagtggtactacagtcatcatcttcggtatctgtatcttgatgatttacttgattctgagtgcgctttacgagagttttctgattccgtttgccgttatcctggccgttcctgcgggcctgatggggtcgttcctttttgccaggatagccgggttggagaataatatctatttgcagacgggacttatcatgctgataggtctgttggcaaagactgctattctgttgacggagtatgccgccgagcgccgtaaagcgggaatggggctgattgcttctgccgtcagtgcggcaaaggcgcgtttccgtcccatcctgatgacggtactgacgatgattttcggccttttccccttggtggttgccacgggtgtcggagccaacggtaaccgttcattgggtacgggtgttgtcggtggtatgttcatcggcacattggcgctgctgttcattgttcctgtcttgttcatcagtttccagtggttgcaggagcggcttcgtcctgcccaatccgtcccgacgagcgactggcagattgaggaagagatgaaagtaagccggaaggagatagaagaatcacattagtacattatcgcgtaactaacataaaaaaataatgaagaaacaattcatattattagctgtcgccggcttggtactgaccagttgcggcatctataccaaataccagcgcccggaggacatcacgaccgatggactttatggacacgatttggatgggcaaagtctggatagcctgagtctgtttgcggcatcggacactacctccatcgcttccctttcctggcgcgagctttttacggacccgcaattacagtcgctcatcgaacaagccttgcaaggcaacactgacctgctttccgcccaacaacgtatcaaggaggcagaagccacgctgatgtcggccaaactttcgtacctgccttcgtttatgctcactccgcagggtggcgtcagcagtttcgacaattcaaaaggctcgtggacctattccggcattgcctcggcaagttgggaagtcgatatttttggtaagttgaccaatgccaaacgccgttccaaagcgctctaccttcaaagcttggagtacgaacaagccgtcagcacttcgctgatagctaatgtggccaatctgtactacaccttgctgatgctcgacgagcaataccgcatttccgaagaaacagccgccagttggcgcgaaagtgtacgcaccatgcgagccatgatggctgcaggcatgacgaacgaggcgagtgtctcgcaatccgaagccaactgtcgtcaggtggaagcttcgctgctcgacctccggcagcaggtaaaggaagtggagaacagtctctccattctgttgggcgatgttccgggcaccattgagcgtggccggttggcggggcaggagttcccgcaggaacttgcggtgggcgtacctctgcaattgctttcccgccgtcccgatgtgaaaagtgccgaactctcgctggcatccgctttctacagcaccaatgccgcccgttctgctttctacccctccatcaccttgagcggtacagctggctggaccaactcggcaggaagcatgattgtcaatccaggaaaactactcttctccgccatcggttcgctgacacaacccttgttcaacaaagggctgaacgtggcacagctcaagatagccaaagcacagcaggaagaagccaggctcgcttttcagcaagctttgctcaatgccggtagcgaagtgaacaatgctctgacccaagtgcaggtagcccgtggaaagacggagctccgcgcaaggcagataacttcactggaaactaccgtccgcagcacccggttactgatgcaacacggcacttccacctatttggaagtactcactgcccagcaggggctactctctgcccaactgacacaggtagccgaccgctttgatgaaatacaaggtatcatcaacctctatcaagccctcggtggagggcgggagtaaaatatactctttctcatcttcattctctcgcccctctatcaatccggcatttccttttttttgtgggaatccgatggtagaggggctttcatataagcgggctatggcaaaaaaactacggtttcttgccgtcaaaccgggacaaactttataactttgcggcatacgacataaaaatctatctattatgaactacaaatccttgttttttctggttgttttttccctgacccttatatcaggggtgtttgctcaaaagaaagtttctattcttggcgattcctattccactttttacggtcatgtctctcctgccgccaatctctgctggtatggagttcccggcgaaaagaaagagaatgatgtgacaaaggtggaggaaacctggtggtaccgtttcatccatgagcacggctttcagttggaacgcaacaattcctattccggctccaccgtctgtcataccggttacgagaaagccgattactccgaccgttcttttatcacccgtattcacaacctcggcacccccgacataatccttgtttttggcggtaccaatgacagttgggcaggtgctcccattggcgcataccaatatgatggctggacgaaagccgatttgtatagcttccgtcctgccttttgctatctgcttgcatctctcaagcagctctatcctgcggccaggatttataatattaccaattctgaattatccgaagaggtaactgattccatggatgaaatttgccggcactatggcatcgagaatattcgtttgcacgacattgataaacaatgggggcatccttctgtgcaaggaatgcagagtatcgatgctcaggtttgggagtctgtctccccgatattggaggcttctgtttctttgcctgccaagaactaaggacagtgtcttatcctgatataggtagacacatttacaaactaataaatgtgttactattatgacttcaaaacgaa

SEQ ID NO: 4397 - DNA, 167373 bp, Unknown
  gut microbiota DNA sequence
ttcccattccgaacagagaagttaagcccggtcacgccgatggtactgcgtaacagtgggagagtaggtagttgccgttttcagaagaagcctccgtgtctgataaggatacggaggctttgttcgttttatatctttacatatacttagatgccggcatggattgttcttgtgttttaggccatgagttttctgctgatttgtagtgatatcagggtgaaatgaacataaaaaaatgaatattttactctaaatactacataatgaggataattattcgtatctttgttgcccgaataaacaaaagaagctttgggaaagtttgataaatacaaaatagacctgaaaggtatgcaagcagattcatgcaaatatgagtttgtgctagacaaccttttctttgccaatattgatggaccggaagtgcagaagggtaaagtcaatgtggtgttagttgtaaagaaaacatctcgtgctttcgaattgaacttccagacagacggaatggtgtgggtgccatgtgaccgttgtttggacgatatggaacagcttgtcagctcgacagataagctgctggttaagttcggtcatgaatatgccgaagaaggtgacaatctcattgtaattcccgaagaggaaggtgagattaatgtagcatggtttatgtacgagtttgtagctttggccatccccatgaagcatgtgcatgctccgggtaagtgtaacaaggcaatgaccagcaaattgagtaagcatatgcgcactactccggatgatgatatggctgaggacacatttgctccggaagaagaggtggagctgatgaatgaagaagaaacgcaggtagacccgcgttgggacgaattaaagaaaatattagataacaattaaagattaaagaaaatggcacatcctaagagaagacagtcaaaaacaagaactgcgaagagaagaactcatgataaagcagtagctcctacactggctatttgcccgaattgtggtgagtggcatgtatatcacactgtatgtggtgcatgtggttactatagaggtaagcttgcagttgaaaaggaagctgccgtataattacggtcagtttgactaaaacttatacttgaatatcgggcgtctaaaaagatttgtaatttaataagcaaacctttttagactaccgttgtttcagtagttctataagtaaacaagattttaatggaaaaaataaatgcagtaattacaggagtcggcggttatgtacctgattacgtcttgacaaacgacgaaatctcaagaatggtggataccaatgacgaatggattatgactcgtatcggagtaaaggaaagacgtatcctgaatgaagaagggttaggtagttcctatatggcgcgtaaagctgccaaacagctgatgcaacgtactggcgcggatccggatgatatagatctggtgattgtagctacttccactccggattatcatttcccttctacagcttctattttatgtgataagctaaggctgaaaaatgcatatgcttttgacttgcaggcagcctgcagcggatttctctatctgatggagacggcggccaatttcatccgttctggaagatataagaaggttatcattgtgggagccgacaagatgtcgtcaatggttgattatacagaccgtgctacttgtcctatctttggagacggcgctgcagctttcatgctcgagccgacaacagaagatgtaggtattatggatgctattctgagaaccgacggcaaaggtttgcctttcctgcatatgaaagcgggtgggtcggtttgtcctccctcttattttactgtagacaaccacatgcattacatttatcaggaaggacgtactgtgtttaagtatgccgtatccaatatgtcggatgttagcgcggccattgccgagaaaaacggtctgacaaaggatagcattgactgggtgattccgcaccaggccaatcttcgtatcatcgatgctgtggcacatcgtctggaagttcctcgtgagaaagtactgattaatatcgaacgttacggcaataccagtgctgctacgttgcctctttgtatctgggactttgaagataagctgaagaaaggcgacaatcttattttcactgcattcggcgcaggatttacctggggagccgtgtatgtgaagtggggatacgacggaaagaagcagtaacatactattgctaaatataatatgataaaacgcatcctatttcgattcgatgcgtttttttgtctcaattcaaatactgaagtcatgcacaaagcaggttttgtaaatatcgtgggaaatccgaatgtgggcaaatccacattgatgaacgttttggtaggtgagcgtatttctatcgccactttcaaggcgcagaccacccgtcatcggattatgggcatctataatacggatgacatgcaaattgtgttttcggacactccgggtgtattgaagccaaactataagttacaggagtccatgcttaatttctccacttcggcattggcggatgcagatgtgttgctgtatgtgacagatgtggttgagactcccgacaagcataatgattttgtggagaaagtaggacacttggacgttccggtattgctgcttatcaataagattgatttaagcaaccaggaaaagctggtggaactggtggaagcatggaaggaattgctgccgaaggcggaaattattcctatctctgctacttcgaaatttaatgtggattatgtcatgaagcgggtgaaggagctgttgcccgactcacctccttatttcgacaaggaccagtggacggacaagccggcgcgtttcttcgtgaccgaaataatccgtgagaaaattctgttgtactacgataaggaaatcccttattcggtggaggtgatggtagaacagtttaaggaggaggcaaagaagattcatatcagtgccgtaatctatgtggagcgtgattcgcaaaaaggtattatcataggcaagcaggggaaggctttgaagaaagtggctactgaagcgcgccgtgatttggagaggtttttcgggaaaacgatattcctggagacgtttgtgaaagttgataaggattggcggagttcggacaaggaactgcgtaattttggttatcagctggattaagagttattcatacgactgtgacagtcgcaaaaaacaaagagtgtgaactatgggaaatttagttgcaatcgtaggacgtcccaatgtgggaaagtctacattatttaaccgtctgaccaagacacgtcaggcaattgtgaatgaggaagcgggaaccacccgtgaccgccaatatggaaagaccgaatggttgggacgtgagttctccgtggtagataccggcggttgggtagtgaactctgatgatattttcgaagaagagattcgtaagcaggtattgatggcggtggacgaagccgacgtgatactgttcgtggtggatgtgatgaacggggttacggacctcgacgagcaggtagctgccatcttgcgtcgtgccaagaagcctgtgttgctggttgccaataagactgataatcatgaactgcaatacaatgctcctgagttttacagtttgggtttgggtgacccttattgtatttctgctgtaacgggtagcggtacgggcgatatgatggaccttatcgtcagcaagttcaagaaggaatctgatgaaattctggacgaggatattccccgctttgcagtagtgggacgccctaatgccggaaagtcttccatagtcaatgcctttattggagaagaccgcaacatcgtgacggagattgccggtaccacgcgcgattctatctatacccgctacaataaattcggttttgatttctacctggtagatacggcgggtatccgtaagaagaacaaggtgaatgaggatttggagtactactctgtaatccgttccattcgttccattgagaatgcagatgtatgtattttgatggtagacgctacgcgtggcatcgaaagccaggatttgaatatcttctccttgatacagaagaatgccaaggggctggtggttgtggtgaacaagtgggacttggtgaaggacaagactgtgaaggtgatgaagactttcgaagatgctatccgcaaccgtttcgctccgtttgtggattttcctatcatctttgcttcggcactgaccaaacagcgtattctgaaggtattggaagaggcgcgtgatgtgtacgaaaatcgtatgacgcgtattccgacagctcgtttgaacgaggaaatgctgccgcttatcgaggcgtatccacccccttcaattaagggtaagtatatcaagataaagtatattacgcagttgcccaatacccaggtgccgtcatttgtttattttgcaaatcttccacaatatgtgaaagagccttacagacgattcctggaaaataagatgcgtgagaaatggaagttgaccggaactccgataaatatctatatccggcagaagtaaaatatatcgtgatgatatagtcgattctattaactggttttatgaagagaaagcgtccggaacatagcttccggacgctttcttatgtaataggttagaaaatgaggtgtggttttatccttcaaggttctgtatctccacttctttgactttccggaataggtcagatgcaaatatgaaactgttcaaccgctcgttggtggaagtgaagatatcgtctttattgccttcccattctttgtgtccttcgtaaatatagatgattttttctccgatacccattacagagttcatgtcatgagtgttgatgagagtagtcatattgtattctcgggttatatcttgtatcagttcgtcgatgacaagcgaggtcttggggtcaagtcctgaattcggctcgtcacaaaacaagtattgcgggtttagggcaatggcacgggcaatggctacgcgtttctgcataccgccgctgatttctccgggaaatttgtctttggcttcaatcaggtttacacgctccaagcagaacatggcacgacgagtccgatcgcgcagggtatcgttgctgaacatgttcagtggaaacatcacattgtccagtaccgtcatggaatcgaacagcgcggcactttggaaaatcattcccatttcccggcggagcgctttcttttccttctttcccatggcgaggaagttgcggtggtcatacaacagttctcctttgtccggtgtcagcagacccacgatacatttcatgagtacggtttttcccgaaccgctctgccctataatcaggttggtctttccattctcgaaagtggcattgatatctttcagtacctctttttcttcaaatgatttgcaaagtcctttcagttcaatcatcccattaaaagttgagttaatattaggtcggcgaataagataagtacgctgctgcatactacggagtcggtggacgccttgcccacttcgatggaaccgccttcgacggtgtaaccgaagaatgccgatacgctggcaatgataaaggcaaagaacagtgacttgatgatgccgcaccaaataaaccattcgacaaacatgtactgcaagccgtattccaaatctaccgccgacatgatgccgccgaaccagcaagtacagaaggcacctatgatgccggcgaatatactgaacgtcaccatcagtggaatggttgtcaccatagcggcaattttcggtaggatgagatagttggcagaattgacacccataatttcaagggcgtctatctgctgggtgactcgcatggtgcccagctccgaggcgatgtttgacccgacctttcctgccagaatcagacacatgatggaggaggagaattccagcagcatgatttctcgggttacatatcccactgtccatcgaggcatgaaaggactctcgatgttcaactttatctgtatggtgattacagctccgatgaagaacgatatcagcaatacgatgccgatagagttcacgccgagctgttccaactcgttgacatattggcggaaaaacatacgcatacgttcgggacgggcaaatacgcgtcccatcagtatgatatatcgtcccactgtcttaagtgctttaaacataacatataagtatttgaatgcaaatgtacactatttcggcttatttttgctacatttgcggcgaaaacctttagagtatggaagaagaaaaaggcataaaggacaatgtagaggaagttaaggaaaatctgcaggccggaccaagcttgactgccggggcagagccacgggaggaaggtagcatggtgctgcgtacggaggatttggtgaaaaagtacggaaagcgtacggtagtgagccatgtgtccattgatgtgaagcaaggggagattgtcggtttgctggggccgaatggcgccggtaagacaacttcgttttatatgaccgtagggctgattactcccaatgagggacgtatcttcttgaatgatttggatataacgaaatatccggtatacaagcgtgcgcagacgggtatcggttatttggcgcaggaggcttccgtgttccgtcaaatgagtgtggaagacaatattgcatctgtactggaaatgaccgacaagcctttggagtatcagaaagacaagctggagagtctgattgcagagttccgcttgcagaaggtaaggaagaacaagggtaaccagttgtcaggtggcgagcggcgccgtacagaaattgcccgttgtctggccattgaccccaaatttattatgttggacgagccttttgccggtgtagacccgattgcagtggaggatattcagcagattgtgtggaagttgaaagataggaatatcggcattttgattactgaccacaatgtgcaggagacgctgagcattaccgatcgtgcttatctgctgtttgaaggaaaaattctgttccagggtacgccggaagagttggccgagaataagattgtacgtgaaaagtatctgagtaatagcttcgtacttcgtcgcaaggattttatgaagtaatcccggatactgtcgattgatagaaataaaaaaagaccactcattcagtggcctttttttatttctccttaaatctctatgattaatattttggaggtcttgcttctttcactaccatttggcggccgaagaattcagcaccgtctagttcggcaatagctttagctgcagcagcgtcatcttccatttctacaaaagcgatgcctctgaaacgtccggtggtgcggtcattgataaattttacagaagatactgtgccgtaatcttccattgccttctgcaggtcactctccttaacgcggtagttaaggtttccaacataaatgttcataatgaaattgataaaataaatataatgaataaaactctcttggaaggaaggctgaataataaatggattacaacgacagagagtttacaaaagcgttcttgaaaacggaagtaaaaaccatgtaatggaaatcgaaaaactaatgcgccatcattccgcgacaaagaaacgcataaaattcggataaacaatgtttttccttaattatttttgtagattgtcgtgccttcgggcatctcccatttctcttcatagaaactggacggttcggtttatcatcgtcttttccctgagtatctttcccgtaaacgtcctccgttgtcagcccgatggttgggctcttctaccgctctatccaagaattaaactgaaataaatcggcaatgttcttttgataattgaaagaataacgctaattttgcacgcccatttgagatatggaacaaagtataaatcaaataaataattgtcagaatgaacgtttcattacaaaacattgacaaagtaagcgcactgcttactgtaaagcttgagaaagcagattatcaggaaaaagtagacaaatcattgaagagcttccgtcagaaggcacagattcccggtttccgtaagggaatggttcctatgagcttagttaagaaaatgtatggtaagtctgcattggctgaagaggtgaacaagctgctttcagaaacagtatataagtatatccaggacaataaggtaaatatattgggcgagcctttgcccaacgaagacaagcagcaggaaattgatttcgatactatggaagagttcgaattcttgtttgatattgctttggctccggaatttaaagctgaagtcagtgcaaaagataaggtagattactatactattgaagttacagacgaaatggtggataaccaggtcaaggcttacactcaacgtaacggcaagtatgacaaggtagacgtttacgaggacaatgacatgctgaaaggtttgcttgctgaactggatgaagaaggtaataccaaagagggtggtattcaggtggaaggtgctgtaatgatgccttcgtacatgaaaaatgatgaacagaaagctatctttgccggtgcaaaagtgaacgatgtgcttgtattcaatccgaatactgcttgggacggaaatgctgccgaattgtcttctttattgaagattgacaaggaagctgctcccgaagtaaaatccaatttcagcttccaggtagaagaaatcacacgtttcgttccgggtgacttgactcaggaaattttcgaccaggtatttggcgaaggtaatgtgaaaacggaagaggaattccgtgccaaagtgaaggaagttattgccaaccagttcgtggcagacagtgactataagttcttgattgacgcacgtaagatgctgacagagaaagtaggcaagctggaattcccggatgcattactgaagcgcattatgcgtctgaacaatcctgacaaggaagaaagctttgtagaggacaactatgacaagagcatcgaagagctgacttggcacctgattaaagaacagctggtgaaagccaatgatatcaaggttgagcaggaagacatcacaaacatggctaaggaagctacccgcgcacagtttgcacaatatggtatgatgagtgtgcctgaagaaatcctggaaaactactcaaaggaaatgcttaagaagaaagagagcatagaaggcttggttaatcgtgtggttgaatctaaattggctacagcattgaagtctcaggtggaactggagcataagaacgtttctgctgaagagttcaataagatgtttgcataagagtaatgtgagcctacggctaaaatttataaagaaacacagagtttgacaaactataactctgtgtttttttgtgtctctgtgttcttttttgtttctttgtatccttataaattaaaaaatagaaagaaatggatgattttagaaaatacgctaccaagcatcttggtatgaacagtttggtgctggacgatgtgattaaatcacaagccggctatttgaatccctatatcctcgaggaacgccagctcaatgtaacgcagttggacgtgttttcccgtctgatgatggaccgcatcattttcctcggtacgcaggttgatgactatacagccaatactttgcaggctcagttgctttatctggattcggtggatccgggcaaggatatttccatctatatcaattcgccgggcggttcggtatatgccggtctgggtatttatgataccatgcagttcatcagtagtgatgtggctaccatctgtactggaatggcggcaagcatggcagccgtattgctggttgccggtgccgaaggcaaacgctccgcattgacccactcccgcgtgatgatacaccagccgatgggaggtgcccaggggcaggcctcggatattgaaatcacggcacgtgaaatccagaagttgaagaaagaactttataccattatcgccgaccactcccacactccctttgacaaggtatgggcagattctgaccgtgactactggatgacagcccaggaagccaaagaatatggtatggtagatgaggttttgattaaaaaataaatatggcagattcaagaaagaataaaaatagatgcagtttttgcggtcgcaccgaagatgaagtcggatttctcataacggggatgaatggctatatctgcgacagttgcgccacccaggcttatgagattactcaggaggctttgggggctggcaagaaggcaagtgccacgaagctgaatctgaaagaacttcctaaacccgtagaaataaagaagttcctcgatcaatatgtcattggtcaggacgatgccaagcgtttcttgtctgtgtcggtgtacaaccattacaaacgtctgctccagaaggacggcggtgatgatgtggagattgaaaaatcgaacatcatcatggtaggcagtaccggtacgggaaagacgttattggcgcgtactatcgcaaagttgctgcatgttccttttactattgtagatgcaacagttctgacagaggcaggttatgtgggtgaggacattgaaagcattttgacacgtctgctccaggtggcggattataacgtgcccgaggcagagcaaggtatcgtgtttattgatgagatagacaaaatagcgcgcaagggtgataatccttccataacccgtgatgtgagtggtgaaggcgtgcagcagggattgctgaaactactggaaggttctgtggtgaatgtgcctccccagggtgggcgcaagcatcccgaccagaaaatgattccggtcaataccaagaatattctgttcatttgcggtggggctttcgatggcattgaaaagaaaattgcccagcggctgaatacgcacgttgtcgggtatagcgctgtacgcaatacggcaaccattgataagagcaacatgatgcagtacattgctccgcaggatttgaagtcgttcggactgattcccgagattatcggccgccttccggtgctgacttatctgaatccgttggaccgtgcggcattgcgctccattcttacggaaccgaagaattccatcatcaagcaatacatcaaactgtttgagatggacaatgtgaagctgacgtttgaagatgctgtatttgaatatatcgtggataaagcggtagaatataagttgggagcccgcggcttgcgttccattgtggagacaattatgatggatgccatgttcgaaattccgtcagaacagaaggacaattttgttgtgacgttggactacgccaagcgccagcttgaaaaggcaaatatagcacgactgcaaagtgcttaagaatcagatggtaatacggggtaaaaccgactattttactttttattgaaaaatattcgatggattatgcttgaaatttaagaagttgtttataactttgttagggttctttgtgaaaacaaggcggagtaccactattaaaagttaactcaataaacaacaacctaatgaatcatggcagggaagaagattaatttgatagaccagctgaagaaatacttcgggttcgatacatttaaaggaaatcaggaagcaatcatagagaatctgttggcgggtaatgatacattcgtgttgatgcctaccggtggtggaaaatctttgtgctaccaactgccgtccttgttgatggagggcacgggtatcgtgatttctcctctgattgccttgatgaagaatcaggtcgatgcgatgcgtaacttcagcgaagaggatgggatagcccacttcatcaattcttccctaaacaagagcgcgatagaccaggtccggtccgacatactcagtggtaagacaaagctgttgtatgtagctccggaatcattgacgaaggaagagaatgtggagtttctgaaaacggtgaagatttcgttctatgccgtggacgaagcccattgtatttctgaatggggtcatgacttccgtcctgagtatcgccgcatccgtcccattatcaatgaaataggaaaagcccctctgatagcgttgactgcgacggctacaccgaaagtgcagcatgacatccagaagaatctgggtatggtggatgcgcaggtgttcaagtcatcgttcaaccgcccgaatctctattatgaggtacgccccaagactgcaaatgtagaccgggacatcatcaagttcattaagaacaatcccgaaaagtcaggcattatctattgcctgagccggaagaaagtggaggaacttgctgaaatcctgcaggcaaacggaatcaatgcccgtgcctatcatgccggaatggattcggctacacgaacacagaaccaggatgatttcctgatggaaaaaattgatgtgattgtagctaccattgcttttggtatggggattgacaaaccggatgtgcgctatgtcatccattacgatatacccaaaagtctggaaggatattaccaggagaccggacgtgccggaagagatggaggagaagggcagtgtattactttctataccaataaagacttgcagaagctcgagaagtttatgcaaggcaaacctgtagcagagcaggaaattggcaagcagcttctgctggagactgctgcgtatgccgaatcttccgtatgccgccgaaaagcattgcttcattacttcggcgaagaatatatagaagaaaattgtggtaattgtgacaattgtttaaatccgaaaaaacaagtggaagctcaagaattattgtgtaccgtgattgaagctattctcgcggtgaaagaaaattttaaagcggactatattatagacataatacaaggtaaggaaacttcagaagtgcaggcgcatctgcacgaagatcttgaagtgttcggctctggtatgggcgaagaagacaaaacgtggaatgctgtgatccgtcaggcacttattgccggttacctgagtaaggatgtcgaaaactatggcttgctgaaagtgacagatgacggtaagaagttccttaaacatcccaaatcattcaaaatagtggaagacaatgactttgaggatgtggaagaggaagcacctgcacgtggaggcggtgcgtgtgcggtagacccggcattgtactccatgttgaaggacttacgaaagaagttgtccaagaagttggaagtgcctccttatgtcattttccaagacccatctttggaagcgatggcgaccatatatccggtgactttggacgagttgcagaacataccgggtgtaggagccggaaaggcaaaacgctacggcgaggaattctgtaaactcattaagcggcactgtgaggagaatgagattgaacgtcccgaggacttgcgtgtgcgtactgtggccaataagtcaaaaatgaaggtggccatcattcaggccattgaccgtaaggtggcattggatgacattgccatgtcaaagggcattgagtttgaagagctgctggatgagatagaagctatcgtctactccggaacgaaattgaatatcgactatttcttggaggatattatggatgaagaccacttgctggatatctatgattatttcaaggaatctaccactgataagattgacgatgctctggatgagttgggcgatgactttacagaagaagaggtacgtttggtacgcatcaagtttatttcagagatggcaaactgattggttttagttgataaaaaagaaaaaaatgttgcgtgcaagtatacggaatggaataaaaaccgtatatttgcacgcaataaattttaaacgcatagccctatgtcatttattgctgataagattgtaatggatggattaacttatgacgacgtactgttaatccccgcttattctgaagtcttgcctaaaacagtcgaactctcgactaagttttcacgaaacattgagttaaaaatcccgtttgtaactgctgccatggatacggttaccgaagcgaagatggctattgccattgcccgcgaaggtggtatcggagttattcataagaatatgtccattgaggagcaggcacgtcaggtagctattgtgaagcgtgctgaaaacggtatgatttatgacccggtgactatcaagagaggttctacggtagctgatgcgctggctttgatggctgaatacaagattggtggtattccggtggtagatgatgagagatatttggtaggcattgttaccaatcgtgaccttcgttttgagaaagatatgaataagcgtatcgatgaggtaatgactaaggagaacatcattactaccaatcctacgacggatatggaggctgtttctcaaattctgcaagaacatagaatcgagaagttgccggtagtagataaagacaataaattggtaggtctgattacctataaggatattaccaaggcaaaggataaacctatggcgtgcaaggatagcaaaggtcgtctgcgcgttgctgccggagtgggagtgacgaatgacactttggagcgcatgcgggctttggtggatgcaggggcggatgccattgtcattgatacggctcacggacattccaagggggttattgaaaaattgaaagaagccaaggctaacttccctcatattgatattgttgttggtaatattgctaccggtgaagctgcgaaggcattggtcgaggctggtgctgatggagtaaaggtgggcatcggtccgggttccatctgcactacccgtgtagttgccggtgtgggtgttcctcagttgtctgcggtttatgatgtggcaaaggcactgaagggcacgggtattcctttgattgccgatggcggtttgcgttactcgggcgacgtagtgaaggcgttggctgccggtggttacagcgtgatgatcggttcgctggttgccggaacggaagagtctccgggcgatacgattattttcaacggtcgtaagttcaagtcctatcggggtatggggtcgctggaagctatggaaaatggttccaaggaccgctacttccaaagcggtaccagtgacgtgaagaaattggttccagagggcattgctgcccgcgttccttataaaggtactttgtatgaagtgatttatcagttggttggcggtctgcgtgccggtatgggctattgcggtgcagccaatatagagaaactgcacgatgccaagtttacccgcattactaatgcaggtgtactggaaagtcatccgcacgatgtatctataaccagtgaggcaccgaactatagccgtccagagtaagataataacaaaataatagtgaatgcccggagagagattgccgctttccgggcattttgtttatatttgcagccgtataaaaagaacggatggtgcttatggttagattgttttgggtgtttttcttcctcgggttcggattggctgtttcggcccaggacgatccggtactgatgcgtatcaatggaaaggaggtcctccgttctgaattcgaacgtagctataataagggcggtacctctgtcggtgcaggccggaaggcattggatgcatatgtgaataagtttatagacttcaggctgaaaatagaggctgccgaagttgcgggattggatacttcccgtgtcttccagaaggagcaggatgagtatcgccgctgtctgattaaatcatacttgacagatgaggagacggcagagcaggaggcacggcagtattatgacaagatgaaatccggccggcgtgcgggccgggtatatgtgaagcatatttttaaatatctcccccagaatatttccggtcataccttgcgtgagatggagtccaggatggattctatctacagggctcttgcaaaggaagggggagctgtgccgtctttcgatgcttgcgtcgagcaattttccgatgagaagaaagcgttttgggtgggttggctgcagatgccggtggagtttgaggatattgtattcgggttgaatgccggagagatttcccgtccgttcctcactcctcaaggcattcatatcgtgaaagtactcgaacagcaggaaatccttccttttgagaggatgaaggacaagataatccgttgtcaaacccgtcgtcatggaatggataaaggaacgcgggcttttgtggataaactgaagaaagaatatcactatatgccggataaagccggtatcgacgaactgctggccaaaggaagcacttcccgtgtattgtttacactggatggcaaggcatacggtggaaaagagtttgccggatttgccgctgtttatccggcagggacgcacagacagttggaggcttttacagtaaaaacgattctggactatgaaaactcccgtctggaattgaagcatcccgaattctgtgcgttggtgcaggggcatcgtgacagcatgttgcttgccgaaatcactgaccgtgaagtgggaaagaggagtgtggtggatgaagcgggattgaaagcatattttgaggcgcaccgttcggacttccattgggacgaaccgcgttataagggtattgtgctgcattgtactaccaagcgggtggcgaagcaagtacggaaatttctgaaacagattccggaagaggagtggatggatgccatccgtctcaccttcaatgccggcgatactcccaaggtgcaggcagagcaaggattatttgcccctggtgataatgcatatgtggatgattttgtgttcaaagggaaggatgcaaccccggttttgtcatttccctttactgctgtacaaggtcgtaagcagaagggaccggatagttggcaagaggtgcgagagccgctcataaccgcttatcggaactatttggaaatgcattgggtggcaaagttgcgtgctgccggtaaggttgaaattgaccaagaggttttaaaaaccgttaataatcactgatgcaaccgattaaaacactatcttcgtacctcaaaacgaagtaaatatcagttggtgatgcgaacaacctgctttgggcttttaattttccttctctgtgcggcgtgcagcgagcagcacgaccataaagggcggacaccgttagtggagttggacggcaatttcctttaccgggaagatttgcaatcggtacttcctgccggtttgtccaaagacgacagtctgttgtttgcagaacattatatccgtaattgggtggaagatattttgctgtacgataaagcgcagagcaatattcccaataatggtgagattgataaacttgtggagaattatcgcaaagcattgataatgcatacctatcagcaggctttaatacatcagcggctatcagaggagatttcagaacaagacttgacggagtattacgagaagaaccaggcgctcttcaaggtggaacgtccgttgatgaaaggcttgttcatcaaagttcctttgacagccccgcagctgggcaatgttcgtcgctggtacaagacggaaacccgtgaggcggtggaacatctggaaaagtacagtctgcagaatgctgtgaagtatgagtatttttatgataaatgggtgccggtatcggaagtgctggatatgctgcccttgaaggttcctgatgtggacgagtatctggacaagaatcgccatgtagagctgaaggatacggctttccattatttcctgaatgtgagcgattatcgcccggtgggagagcaggaaccctatgagtttgcccgtaggcaagtgaaggatatgctgctgaacgtgaagcaggtggaattcatgaagcaagtgaaggatgatttgtaccaacgggcggtgaaaagagacaagattaaatattatttagaataagacaccaagaatgaaacagtgtatgaactttaagtttgtaattttatttgccttgacgctattagtcggttctaccgtttatggacaagacaacgtaattgacgaggtagtgtgggtagtaggtgacgaggctatactgaagtccgaagtggaagaagcacgcatgagtgcattgtatgaaggacgcaaatttgaccgtgacccttattgcgtgataccggaggagatagccgtgcagaagctgtatcttcaccaggctgccctcgacagtatcgaagtatccgagagtgaggttatccagcgtgtggactatatgacgaacatgtacatcgccaacatcggttcgcgcgagaaaatggaggaatacttcaacaagacttccagtcagattcgtgaaacgctgcgcgagaatgcccgtgaaggattgaaggttcagaagatgcagcagaaactggtgggtgagattaagataactccggctgaggtgcgccgttacttcaaggatttgccgcaggacagcattccttatatccctacccaggtggaggtgcagattatcactcagcagcctaaggtccctttggaggaaatagaagatgtaaagaggcgtctgcgtgagtataccgaccgtgtcaataagggcgaaagcttttccatgttggctcgtctgtactccgaggaccgtggctcggccatgcgtggcggtgaaatagagttttcgggacgtggtatgctggaccccgcttatgccaatgtagctttcaacttgcaagaccccagcaaggtttccaagattgtagagtctgaatatggtttccatatcattcagttgatagagaagcgcggtgaccgtattaaaacacgccacattctgttgaaaccgcatattccggaagaagctctggctgccggttgtgcccgtttggattctattgccgatgatatccgcaataacaagttctcttttgaagaggctgcctcagtgctttcgcaggataaggatacgcgtaacaatcatggtttgttgccgaatcccaatacgaacacttcccgttttgagatgcaggaacttccccctgaaatagccaaggtggtggataagatgaaagtgggcgaaatctctgaagccttcactatgattccgcaaaagaccggaaaagaagagtgtgtgattgtgaaactgaagagccgtacgacgggacacaaggctaccattgccgatgactatcagaacttgaaagagattgtgttggagaaacgccgcgacgaagtgctagacaagtggattcgtgagaagcagaagcacacgtatgtccgtatcaaggataattggaagaataactgtacgttcaagtatccgggctggatcaaagaataatccggaaggatttacatggatttgtatgcaaaagaagaatacaaaaaatcatttcctgaacaagcatagatacctcctggtaggcattctatgcttgtttggcatctgtctgctgagtgcgcaggacaaaaagaagagtactggtgcaccggagaagaggaaagtggactcgattgaacagaaaaagacggagacgtcggaaaagaagaagacgcgcgtcgatttgttgtacgcagatgaggcgcaggcagacaaacagttgcgtcctgatgtgcaggtactcatcggttcggtgaggatgaagcatgacagtatgtacatgttctgtgatagtgcgctgatattcgaaaagataaattctgtggaggcattcggcaatgtgcgtatggagcagggtgacaccttgtttatctatggagactatctgtattatgacggcatgtcgcagctggccatgctgcgtgagaatgtacgtatgataaatcgtaatacggtgctgacaaccgacagtttgaactatgaccgtctgtacgatttgggttattacttcgaaggcggtacgctgaccgacgaggataatgtgctgacttccgagtggggagaatatagccctgccaccaagttggctgtcttcaaccacgacgtgaagctggtcaacccgaagtttgtcttgacttcggataccttgaagtatagtacagctaccaagattgctaccattctaggtccctccgacattgtgagtgatcaaaatcatatttattccgaacgtggcgtgtataatacgactactgagcaggcagaactgctcgaccgttccgtactgaccaacgacggcaagaaattgaccggtgacagccttttctacgaccgcatcttgggatacggtgaggcttttgacaatgtacagatgaatgatacggtcaaccggaacatgttgactggcgactactgtttctacaacgaactgaccggaagcgccgttgccaccaaacgtgccgtagctatcgactattcgcagggcgacagtctgtttatgcacggtgatactttgcggctgattacctaccatatgaataccgattccatgtaccgggagatgcgtgcctatcataaggtgcgtgcttatcgcacggatgtgcaggccgtatgcgattcgttggtgtataattccaaggactcttgcatgacgatgtacaccgaccctatcttgtggcacggggaacaacagttgttgggcgaggaaattaaaatttacatgaacgatagtaccatcgactgggcacatatcatcaatcaggccctgacggtagagaaaaaggacagtattcactataaccaagtttccggtaaggagatgaaagctttcttcatagatggagacatgcgtctggtggaggtaaacggcaatgtactggtggtgtattatccggtagaggagaaggacagttcgctgattatgatgaactattcggaaggtggacttttgaaaatgtacttgaaggagagaagaatggagcgcggagtctttgttggaaagactaccggtacagcctatcctttggaccagattccaccagataagagcaggctgccttcttttgtttggttcgactacatccgtccgctcaacaaggaggacatcttcgagtggagggctaaaaaagcaggtgaagtattgaagaaaagtgaccggaaacctgtaacttcgccaaggaatatgcatattaaacgaaataataagtagcgtcatgggaatgtttgcaatgcggaagcctcgtggcttcaatcatagctatatctatgtggatgagcggaaagagaagttggcgaagatggaagaaaacgccaagcgtgacctgggtatgctgccggaaaaggaattctcgcccgaggatatacggggcaaattcatagaaggaacaactcacctgaagcggcgtaaggagagcggacgtaagccgatgcatttgggcataatccttgttgtcatggctgtgttgatttatctgtggtatgccatcagtaacggaatcatttaataatgattaatcattaatccctaatcattaaacattatcatgagcgatatcattcatttgctgcccgattcggttgccaatcagattgctgccggagaggtgattcagcgtccggcatctgttgtgaaagaattggtggaaaatgcaattgatgccgaagcaggggaaatacatgtgctgattaccgatgcgggcaagacctgcattcaggtgattgatgatgggaagggtatgtccgaaacggatgcgcgcctttcttttgaacgtcatgcgacttcaaagatacgcgaggctgccgatttgtttgccctacgcaccatgggcttccgtggagaggcgttggcttctatagcagcggtagctgaagtggagttgaaaacacgtccggtcagcgaggagctggggacgcggctgctgattgccggctctaaagtcgagagccaggaagccgtttcctgccctaagggaagcaatttttccatcaagaacctattcttcaatattcctgcccggcgtaaattcctgaaagccaactctacggagttgagcaatatccttacggaattcgagcgtatagcgctggtgcatcctgaggtagccttctatctgtatagtaatgatacggaattgttcaatcttccggtaatgcctttgcggcaacgcatcatggcagttttcggaaagaaactgaatcagcagttgctgtccgtagacgtcaatacgacgatgataaagatttccggttttgttgccaagccggaaacctcgcgcaagaaaggagcgcaccaatacttttttgtgaacgggcgttatatgcgtcacccctatttccacaaagcggtgatggacgcttatgagcagctgattcctgccggtgagcaaatctcctactttatttatttcgaggtagaccctgccaatatcgatgtgaacatccatccgacgaagacggagattaagttcgagaatgagcaggctatctggcagattctgtcggctgcggtcaaggaatccttaggcaagtttagcgctatacctactatcgattttgataccgaggacatgccggatattcctgcattcgagcaggctcgtccgatagagcctccgaaggtacactataacacggatttcaatcccttcaagacgtcttccgcttcttcctatggaggcggtggcaattattcgcgccccaaagtggagtgggaggggctttattccggtttggaaaaagccagcaggatgaacgagccgatggaggaagagccttttgtagaggatacggttaccggtacggctccaagagaggaggagagggttccttatttccaggaaacggttccttccggggcaagcgcctctttctatggcaatgaggcaacggtagagaaaggagcgcaacacttccagttcaaggggcgttttattctgacttccgttaaatcgggtctgatgctgatagaccagcaccgggcgcatgtccgggtattgttcgaccgctatatgagccagattcgacagaaacaaggcgtatcccagggggtattgtttccggagattatccagttgccggcttcggaagctgccgtactggaaagtatattggaagatttgtcggcagtaggcttcgatttgagcccgctgggtggcggcagctatgccatcaacggcataccttcgggcatagaggggttgaacccggtagaattggtccggaatatggtacatactgctatggaaaaagggaatgacgttaaggaagaggtgcagacaattcttgcatcgaccttggcacgtgctgcggccatcgtctatggacaagtgctgagcaacgaggaaatgtccaatctcgtggacaatctgtttgcatgcccatccccgaattatactccggacggaaagacggtgctggcgaccattaaagaagacgacatagaaaagcttttctccaaataaggaagagtactttcttttgcatcaaggcaaaaaaagtacaaatattcagaaccttttagttctgttggcgttaattagacagtttgaatgataaagagtttaattaaccacttaactattttaaggtatatgaaaaagattctaatgttactggctttagctggtgtgtcttctgttgccatggcgcagcaaaagactgaagttgtggaagaatttggtgttatccaggttcaggataaatatcaggtaatcactaatccgttctggagtaattggtttttctctataggcggtggtgccgaagcaacttttggagataatgataaggcaggaagttttggcaagcgtatcagtccgacgctgaattttgccatcggcaaatggttcaccccgggactgggagtacgtctgcaatatagcggccttcaggcaagaggatatacgtatgatgcaggtgctgactacgtgaaaggcactcagatggatgacggctactacaaacagcgtttcgactatatgaatctgcacggagatgtgatgttcaatctgaatgcgctgtttggaggatacaaccagcaccgtgtgtatgaaatcattccttatgtaggtgctggcttcactcacaactacacaaagcctcaccgcgaagctctgtctgtaaacgcgggtatcatcaatcgcttccgtatttccaatgcgatagatattaacctggagctgagcgcaatgggcgttgaagataagttcgatggcgaagttggcggcgatcatggatatgatggcgtgctgagtgcaacggtagggttgacataccgtttccccgcccgtggattccgtcgcccgatgcctcagttgatttctcaggtagagctggctgccatgcaggcacagcttgcagagatgggagctgccaaccagcagctgcagaatgcattggtggctgcacagaaccagccggtggccgaagttacggaaaccgaagtgattgttcccgatccggatatagcaccgcgtaccgtattcttcaatatcggttctgccgaagtctctccacgtgaagcaatgaacttgtcttatctggcagaccagatgaaacagttcccgaacgccacttacactgtaaacggatatgcagactctgcaaccggtacgccggcattcaacaaagagttgagtttgaagcgtgcacaagccgtggtcgatgtattggtaaaacaatacggaattcctgctgaccgcctgaaggtggatgccggtggtggtgtcgataagttcggacagccgattctgaaccgtgtggtattggtgaaatctgccaattagaaagctacgagctacaagctacaaggagttacgagttatagaaatgagaaggggcatgcgttattatgacgcatgcccctcattttttgtaaccagtaacttgtaacaggtagctccttgtaactcgtaacttctgtaactcgtatctcctatcccttattctccgccgaatttctttacttgctctgcaatcagttccgcatcatcaaagtagtttatcttcatagccttgcgtacatcgtccaaggttgcggcagcggtttccctggcagtttcgcaacctttcttcagcatgtcgtagatggcggggatgtctttttcaaactccttgcggcggttgcggataggctccagtgtctcctgcataatttcgttgaggaacttcttcactttcatgtcgcccagaccgccacgttggtagtgggctttcagttcgtccagattcggatattcgggcagataaaggccgaagtgttccggacggcaaaaggcatccaggtaagtgaatacggtgttgccttccaattttccggggtcttgcacacgcaggtggtcggggtcggtatacatgctcttcaccttcttctgcacctcgtcggcagagtccgaaagatagatacagttgccgaggctcttgctcatcttggctttgccgtccgttcccggcaggcgcaggcaggctgcattgtcgggcaacaggatttccggttccacgagggtttcaccatatatatagttgaaacggcgtacgatttcacgagcttgttcaatcatcggctcctggtcttcgcccacgggcacggtagtggcgcggaaggcggtaatgtccgctgcctggctgatggggtaggtgaagaaacctacggggatgcttgtctcgaaattacgcatctggatttcggtctttaccgtcgggttgcgttgcaggcggctcacggtcaccaggtccatatagtagaaggtcagttcgcagagttccggtatctgggattggatgaagatggtactcttcgtcgggtccagtccgcaagccaggtagtccagtgccacctcgatgacgttctggcgcaccttttccggattctccatattgtccgtcagcgcttgtgcgtcggcgatgaagatgaaaatcttgtcgtacaagccggagttttgcagttccactcttcttctcaatgagcctacatagtgtcctatgtgcaggcgtcctgtggggcggtcgcccgtaaggatgattttttcttttgccatattatgtattttttagtttcttcattgtataaaagccattaagaccggcaaagatacctataattatcgaaacctcaagggatgacgctttctttccttttcacgtataccttatggcttccgatgccgcttgtatcgattccgctgccgggagtatgtgcccatttgcgcagttccacggtggcggtggagcggacgagtccggtcagttgccggtagatgctgacagtaaggaaggcatgcttgtccagatactgatgcgccagagccagacgttgttcgggagtgtatttcttcgatgagcgtgcgggtttccaggaggcacgttccagttcgcaccaatggttggtttctctaatcaaggccttgtctgtgcggaagttcacgccacttacgtagatgctccgcgcgtttcgcttcgtggtgctttcttggggctgttcgcgttccttgtcggggtagatggacagtgcgggggtgaatacgcccaatccttctatcttcaccgagcgtcccattcccatttcgtgggccagggcttcgcccagctcgcagataattccttcggttacgcctttcgagaatcccgaggtcatggcgatgtattccgccagttcgcgcgtgccggtctgtccggtcatcaccatcttggggtaggtgattggttcgcccgtgccttgcaaatcgggcatttctttcatttggtagcgtgtggtcattgttgcgttctcctttcttttctttccttcgttgcaaagtccttttccctgcggagcaaagttcttttggtggcggagaaatcttagaataaagcctttattccaaggaatagaaattttatttttaagaataaaggctttgtttgtagaaacagaatccttgttctatttttgtataggcacaaaggtaagtttccgtggcgagaaaagcaagttttggtggggagaatcttcatatttatccgcaaatgcctttactgagatatagtctttcttttttatatggaatcgcatttttcggaaaaagatttcggttgcgggcgacggccgctcttctattatggaggatgacgtttcttttatgcaaaaaaatatgccacaatttgctcttttcgtaaataagtcgttactttgcacaaattttaaagagactatgcaatcgcaggaaatgagaagcaaatataacctccgttcgaatgaatttcattcgggagccgtcagtttctcttttttcgagaaagatatttttagttctttggtaatgcgttaatcctttattgggtgacgcattttttttgtgaaatagctacaactcgtagtgcgtagcttgtaactcgtaacttaatagacaacaagagaatatggaaaagaatttaaagaaagtgcttgtcttgggttctggtgcgctcaagattggtcaggccggagagtttgactattccggttcgcaggcgctgaaggcgttgcgcgaagaaggtatcggttctgttttggtaaacccgaacattgctactatccagacatcggaaggtatcgccgatcaagtttatttcttgccggtaactccttatttcgtggaagaaatcatcaagaaagaacgtcccgacggcattttgctggcattcggcggacagacggcgctgaactgcggtacggaactctaccagaacggaattcttcagaaatatggcgtgcgcgtgctgggtacttccgttgaggcgattatgtacaccgaagaccgtgacctctttgtgaagaagctggacgagattccgatgaagactccgaagagccacgctgtggagagcatggaagacgcactgaaggcagcccgcgagattggctaccccgtgatggtgcgctcggcttatgctctgggtggactgggaagcggtatttgtccggacgaggaagccttcattaaattggccgaaagctctttcactttctccaagcagattctggtagaagagtctctgaagggttggaaggaaattgaattcgaggtaatccgcgatgccaacgaccactgcttcacggtggcaagcatggaaaacttcgacccgctgggcatccatacgggtgagtccatcgtagtggctcccacttgctcattgaccgacgagcaggtgaaaatgttgcaggagctttccaccaaatgtatccgccacctgggcatcgtgggcgaatgtaacatccagtatgcgttcaacgccgagacaaacgactatcgtgtcatcgaggtgaacgcccgtctgtcccgttcttccgcattggcttccaaggctaccggttatccgctggcattcgtggctgccaagattgcgttgggctatacgctcgaccaaatcggcgagatgggaactcccaattctgcatatgctgctccgcaacttgattacctgatttgcaagattccgcgttgggacttgacgaagttcgtaggtgtcagccgcgaaattggctccagcatgaagtcggtaggcgaaatcatgtctatcggacgttcctttgaagaaattatccagaagggcttgcgtatgattggtcagggaatgcacggattcgtgggcaatgagggagtggagttcgatgacttggattacgaactgtcacatcccaccgacctgcgcgtctttgccattgccgaggctctggaaaagggatatgccatcgaccgcatctttgagctgaccaagattgacccttggttcttgggcaagctgaagaacatcgtagactacaagcagaaactttcccaatataataaggtggaagacatccccgccgacgtgctgcgcgaagccaaagtgcttggcttctccgacttccagattgcccgcttcgtgctgaatccgcaaggcaatatggagaaggaaaaccttaccgtacgcgcccgtcgtaaggagctgggcatcctgcccgccgtgaagcgcatcaatacggtggcttccgaacatccggaactgacgaactacctctacatgacgtatgccgttcagggttatgatgtgaactattataagaatgaaaaatcagtggttgtgcttggttcgggcgcttaccgcatcggttcgtctgtagagttcgactggtgttcggtgaatgccatccagactgcccgcaagctgggctacaagtccatcatgattaactataaccccgaaaccgtttctacggactacgacatgtgcgaccgtctctacttcgacgagctctccttcgagcgtgtgctcgacgttatcgacctggagcagccgcgcggtgtcatcgtgtccgtgggtggacagataccgaacaacctggcaatgaagcttcaccgccagtcagttcccgtgttgggtacttcccccatctccatcgaccgtgccgaaaaccgtaacaagttctctgccatgctcgaccagctgggcatcgaccaaccggcttggcaggaactcactagcctggaagatgtgaaaggctttgtagagaaggtgggctatccggtactggtgcgtccgtcttacgtactctccggtgctgcgatgaatgtatgctacgatgaagaagaactggaaaacttcttgaagatggctgctgaggtatctaaggaatatccggtggtggtatcccagttcttgcagaacaccaaggaaatcgagttcgacgctgttgcccaaaacggtgaagtggtggaatacgccatctccgagcacgtagagtttgccggtgtacactccggtgacgctacgctggtattcccggcacagaagatttactttgcaacggcacgccgcatcaagaaaatcagccgccagattgcgaaggaactcaatatttccggtcctttcaatatccagttcctggcacgcaacaacgaggtgaaggttatcgagtgtaacctccgtgcatcgcgcagcttcccgttcgtatccaaggtgctgaagcgtaacttcatcgagactgctacccgtatcatgctggacgctccctatacacaaccggacaagtcggcattcgacatcgaccgtatcggtgtgaaggcaagccagttctccttctcccgtctgcacaaggcagacccggtattgggtgtggacatgtcgtctacgggcgaggtaggctgtattggcgacgacttctccgaagcattgctgaatgccatgattgctaccggattcagaatcccccgtcccgagaagggcgtgatgttctcctccggagccatgaagtccaaggtggatttgctggatgccagccgcatgctctttgccaaaggctataagatttatgctacggcaggtacagccgctttcctcaacgcccatggcgtgacgacggaagccgtttactggccggatgaacgcccggatgcggaaaacaacgtgatgacgatgattgccgaccatgccttcgacctgattgtcaacattccgaagaaccatacgaaacgcgagctgaccaatggctacaagattcgtcgcggtgccatcgaccacaacattccgttgattaccaatgcccgcctggcaagtgcctttatcgaggcattctgcgaaatgaagctggaagatatccagattaagagctggcaggagtacaaataaattgtttgctctataaacgattgcaggagcggaaagccgaaaggttttccgctcttttggtatactgcgtttatttccgtatttttgttcggggctgagtctctgtatgaatcaaaagaagaaataatatgaatgaagtggaaaaaatgcgtagctcccagttggcggatatgtccgttccggagatacaggtgaagttcgagcatgccaagcgcttgctggcaaaaatgcgtgtgatgagtacttacgatgaggattaccggagtttgctggaggaactggtgccaggtattcccgctacttccatcatctgcccgcccttccattgcgaccacggggatgggatccggctgggtgagcatgtctttgtcaatgccaattgcactttcctggacgggggatatatcacgattggtgcccatacgttggtcggtccatgcgtacagatatacactccccatcatccgatggattatatcgagcgtcgtacggaaaaggaatatgcctatccggtgacgataggagaggattgctggattggcggcggtgccattctgtgtccaggcgtcaccatcggcgaccgttgtatcatcggtgcgggtagtgtggtgacgaaagatattccatccgatagcatagccgttggtaatccggcaaaggtcatccggaaaaatgagacaaaaaagtgaacgtactaaatgcttgagaaacagagcgtgtcgctaaatgactaaaaaaatatcgaaaaatattatgcaaaagttttggtaatgtcaaaataagctgtacctttgcatcgcttttgaaacggaagtgtacgggcgtttagctcagctggttcagagcatctgccttacaagcagagggtcggcggttcgaatccgtcaacgcccacacaaaatccaagcactttcgttcatcaaaagggcgtttagctcagctggttcagagcatctgccttacaagcagagggtcggcggttcgaatccgtcaacgcccactggaaattttcattcgaaggtggtcttgcaagtgattgtaaggccatttttttatccgttaacttccttttcttaaaatctttatcctttatgtcttgttactcagaaaaaagcagtaattttgcagtccgataattatcatcataaatacgacgtatgaaacttgatttacttaccgcaatctctccgattgacggtcgatacagaggcaaaacggatgttttggctgcctatttttcagaatttgcactgattaaataccgtgtacaagttgaagtagaatactttatcacgctgtgtgagctgcctttgccgcagctgaaaggggtggataagggtgttttcgaaaccttgagaaacatttaccgtaacttttccgaagccgacgcgcaacgcattaaggacattgagagcgtgacgaaccatgatgtgaaggctgtggagtatttcttaaaagaagagtttgacaagttgggtggtatggacgactataaggagttcatccattttggcctgacttcacaagatatcaacaatacgtctgttcctttgtctgtaaaggaggcgttggagcaggtgtactatcctcaaatagaggaactgatagcgcagctccgtgcttatgcggaagagtgggtcgctatccccatgcttgccaagacacacggacaaccggcttcgcctacccgtttgggcaaggaggtaatggtgtttgtctaccgtctggaacgccagttggcaacgctgaaggcttgtccggtgacagcaaagttcggtggcgctacgggtaattacaatgcccatcatgtggcttatccggaatatgactggaaggcattcggcaataagttcgtttccgaaaagcttggcttggaacgcgaggagtatactacccagatatccaattacgataatctgtctgccatctttgatgccatgaagcgcatcaatacggtgatgattgatatgaaccgtgacttctggcaatatatctctatggaatatttcaagcagaagattaaagccggtgaggtgggctccagcgcgatgccgcacaaggtgaacccgattgactttgaaaatgcggaaggaaacctgggcatggcgaatgctattcttgagcacttggcggtaaaactgccggtttcccgtttgcagcgtgacttgacggactctaccgtgctccgcaatgtgggtatgccgttcgggcatatcattattgccatacaaagttctttgaagggtttgcgtaagttgctgttgaacgaaccggccatctaccgtgacctggacaattgctggagcgtggtggccgaggctatccagaccattctgcgccgcgaggcctatccgcatccttatgaagcgttgaaagcgttgacccgtaccaatcaggccattacggaagcgtctatcaaggaatttatagagggactgaatgtaagtgaagagataaagaaagaattgcgggtgattaccccccatacttatacgggaatttaagcaaccacagaagtgtaccggaggaatttcaactttttactccggcaattgttatagaaacatataaaattcaaggtataatagagacaatgaatggccgtgaggccaaggtttaattttattcgaataaaaaacaatgagtacagaaaacgaaacttggcgtgatgcttcttccgcagaggagaactcaggtgccggccgcgatggtaaccaatttaacaaggaaggtggctacagccgtccgtcttacaaccgtgataatggcgaccgtccttatcgccccagatttaacagtgaaaacggggaccgcccgcagcgtccttataacagtgaccgcccttatcgcccgcgctttaatcctggtgcggacaatggtgaccgtccgcagcgtcctcgttacaataacgataatggcgaccgtccctatcgtccgcgctataacagcgaaggcggcgaccgtccgcaacgcccttatggaaacaattcgggtgaccgtccttaccgtccgcgctataacagcgaaggtggcgaccgtccgcaacgcccttataatagtgaccgtccgcagcgcccgcgttatggcaatgagggtggtgaccgtccgcaacgtccttataacggcgaccgctcctacaacagcgaccgttcttataatacggaccgtccctatcgtccgcgctacaacagcgaagatggcgaccgtccgcagcgtcctcgctacaataatgagggtggtgaccgtccttatcgtccacgcttcaattcgggtggtggaagacctggcggatacggcaacagagacagctatagccgtccagtccgtcgttcggccgattatgaccccaatgctaagtacagcaagaagaaacagatagaatataaggagcagtttgtggacccgaacgagcctatccgcttgaacaaattcctggccaatgccggtgtttgctcccgtcgcgaggctgatgaattcatcactgccggagtcgtttctgtaaacggagaggtggtgacggaattgggaaccaagattaagcgcggtgatgaagtgaagttccacgaccagacggtcagcatagaacgtaagatttacgtcctgctgaacaagccgaaggatactgtgactacttcggatgacccccaagcacgtcgcacggtgatggatttggtgaaaggcgcttgcaacgaacgcatttatccggtaggtcgtctggaccgtaatactacaggtgtgttgctgctgacaaatgatggtgacctggcttccaagctgacgcatcccaagtatctgaagaagaagatatatcatgtgcatttggacaagaacctgacaaaagccgatatggagcagattgcagccggcattcaactggatgatggggaaatccatgcagatgccatcagctatacggatgacttcaagaaagatgatgtcggtattgaaatccactccggcaagaatcgtatcgtgcgtcgtatcttcgaatcgctgggatacaaggtgatgaaactggaccgtgtgtattttgccggtttaaccaagaaaggcctgcgccgcggcgaatggcgttacctcacggaacaagaggtgaacttcctgcgcatgggttcttttgagtaatatataataaggtataataactgttttatggaaaagattagtagaacaaagattgttgacctgctgaagcgtgaagattttggcgctatggtcaacgtgaagggctgggttcgtacccgcagaggtagtaagcaagtaaactttatcgcgctgaatgacggttctacaataaataatgtgcagattgtagtagacttgggtaacttcgatgaggagatgctgaaagagattactaccggtgcttgtttgagcgtaaacggtgtgctgacggaatctgtcggttccggtcagaaggccgaagtgcaggcccgcgaaatcgaagtgctgggaacttgcgataacacgtatccgttgcagaagaaaggtcattccatggagttcctccgtgagatagcccatctgcgtccccgtaccaatacgttcggggctgtgttccgtattcgtcataatatggcgattgccatccacaagttcttccatgacagaggattcttctattttcatactccgattatcacggcttccgactgcgaaggcgcaggccagatgttccaggtgactacgaagaacctttacgacttgaagaaagatgagaacggttccattatttacgatgatgacttcttcggaaagcaggccagcctgactgtttccggacagttggaaggcgaacttgccgctactgcattgggagccatctatacattcggtcctacgttccgtgccgagaattccaatactccccgccacttggcagagttctggatgattgagccggaagtggcgttcaatgatattacggacaatatggacctggcggaagatttcatcaaatattgtgtacagtgggctttggacaactgtgccgacgatgtgaagttcctcaatgacatgtttgataagggcttgattgaacgtctgcaaggtgtcttgaaagaaagcttcgtgcgcctgccttatacggaaggtatcaagatattggaagaggctgttgccaaagggcataagtttgaattcccggtgtactggggagttgacttggcttccgaacacgagcgctatctggtggaagaccacttcaagcgtccggttatcctgactgactatccgaaggaaatcaaagcgttctatatgaagcagaacgaagacggcaagaccgtgcgtgccatggatgtactcttcccgaagattggagaaatcattggcggttccgaacgtgaatcggattacaacaagctgatgacgcgcattgacgaacttcacatcccgatgaaggatatgtggtggtatctcgatacccgtaagttcggtacatgtccccactccgggttcggtttgggctttgagcgcttgctgctgttcgttacgggcatgacgaatatccgtgatgtcataccgtttccgcgtacgccgcgcaacgccgagttctaagtttcggaatatacaaactggataaaatcatccgcacaaacattctgttgtttgtgcggtttttttatacccaaaaatgttataatctcaaaataaatctttatatttgtgtctagcggaacgacataacgttaaccaacatcatacgaatatgaaacggaactatttctttaccatgctggcagcggtgctgcttgcggtagcgggagccaatgcgcaggagagcgcagagtttaggcctgcggaactggcaggaatttggcagttatgtcattatgtgtccgaaatcccggatgttcccgggatattgaaaccgagtaatacctttaaagtgctgagtgatgacggccgcattgtcaactttacaatgattcctggcaaggatgccatcatcacggggtatgggacttatcagcagctgacggataattcctataaggaaagtattgagaaaaacatccatctgcccatgttggaccacaaagacaatatattggagtttgaaataggggacgacggggtaatgtacctgaagtattttatagctaaggacttgaatgggaatgaactgaatacatggttccatgaaacatggaagcgggtgggcatgcccgcgaaattccccgaggaccttgtccgttgatatttctttctctttcccgtttctttctcaatgcagctttgaaggtcttctatgatggcattggccgatgaaggccgcatcataaagagttgttctagcggagattctttcgtttctccgcaggataactttgtctgttgtatatcagccaagtggctctctaaaaaaaagtggaaaacttttgccagttctaagaaaaaccgtacctttgcaagccgattattatctcaaaaggataagcatttaattcatagcgagttaatcttccattgtccgggatgactggcttgcggtgaagaaaaacattttagtagtaacattttaaaaaacaattaagagtggatactttaagttacaagaccatttctgcaaacaaagctacagtgactaaagaatgggtcattgttgacgctacagaccaggtattgggtcgtctgggcgcaaaagttgcgaaactgttgagaggaaagtataaacctaactttacccctcacgtagattgtggcgataatgtaatcattatcaacgccgacaaagtaaaattaaccggtaacaagtggaatgacaaggtatatctgtcatatacaggttatcctggcggccagagagaaatcactcctgcccgtttgcaggcaaaaccgaacggtgatgacaagttactgagaaaagtagtaaagggtatgttgcctaagaacaagttgggcgcaaaattgctgggcaatatgtatgtatatgccggcagcgagcacaaacacgatgctcagaacccgaaaatgattgatattaacgtacttaaataagagataatggaagtagtaaatgcattaggcagacgtaaaagtgcaattgcacgtattttcgtaagcgaaggtactggaaagattactattaataagagagacctcgcagagtactttccatcaagcattcttcagtatgtagttaaacagccgttgaataagctgggtgttgctgaaaagtacgacatcaaagttaatctctgcggtggcggtttcaccggccagtctcaggctttgcgtttggcaattgcccgcgcactggtgaaaatcaatgctgaggacaaggctgctctccgttctgaaggtttcatgactcgtgatcctcgttctgttgaacgtaagaaaccgggacaaccgaaagcacgtcgtagattccagttcagtaaacgttaagagttggagaacggttggggcggacaagttgcttaattctcgactttcacctctcaactctcaactgaaaaagcgtttagtatctaaactaccgggactcttcagattcagactacccggcggttggtttagaagaaacaaaaaagaaagtaaacgattaatttaaaagaaaatgtctagaacaaattttgatacattattagaagccggttgccacttcggtcacttgaaaagaaagtggaaccctgcaatggctccttacatcttcatggagcgcaatggtattcacatcattgacctcaacaagacggttgctaaaattgacgaagctgctgaagctttgaagcaaatcgctaaatcaggaaagaaagtcctgtttgttgctactaaaaaacaagctaagcaggtggttgccgataaggctgcatctgtaaatatgccttatgtaatcgagcgttggccgggtggtatgttgactaacttcccgactatccgtaaggctgtcaagaagatggctaccatcgacaagttgacaagcgacggtacctattcaaacctctccaagagagaaattcttcagatttcacgtcaacgtgcaaagttggacaagactttgggctctatcgctgacctgactcgtctgccgtctgctctgttcgttatcgacgtaatgaaggaaaacatcgcagttcgtgaagctaaccgtctggggattcccgtattcggtatcgttgatacaaactccgatcctacgaatatcgatttcgtaatcccggcaaatgatgacgctactaagtcagtagaagttattcttgatgcttgctgcgctgctatgcaggaaggtctggaagaacgtaaggccgaaaaggtagacatggaagctgccggtgaagctcctgccaacaaaggcaagaagaaagctacaaaagcaagactcgacaagtccgacgaggaagcaatcaatgccgctaaggctgctgctttcatgaaggaagaagaggcttaatcatactgttgagagttgagaattgaaagttgagagttactttacggcaattctcaattctctattctcaactctcaattactttataaggatattattaacaattaaaataaaaagatattatggctgtaagtatggctgatataaccaagctccgcaagatgaccggtgctggtatgatggattgcaaaaatgctttgactgaagctgaaggcgatttcgacaaggcaatggaaattatccgtaagaagggacaagctgttgcagctaagcgttcagaccgcgaggcttctgaaggctgtgtgctggctaagactacgggtgactttgccgttatcatcgctttgaagtgcgaaactgacttcgtggctcagaatgctgatttcgtgaaactgactcaggatattctggaccttgccgtagctaacaagtgcaagactctggacgaagtaaaagctctgccgatgggcaacggtactgtacaggatgctgtaacagaccgtagcggtatcactggcgagaagatggagctggatggttacatgactgtagaaggcgcaagcactgtggtttataaccacatgaacagaaatggcctctgcactattgttgctttcaacaaggctgttgaagaaggactggctaagcagattgccatgcagattgctgccatgaacccgattgcagtagacgaagatggcgtatctgaagaaatcaagcagaaggaaatagatgttgctatcgagaagacaaaagctgaacaggtacagaaggctgttgaggctgctttgaagaaggctggtatcaacccggctcacgtggacagcgaagaccacatggaaagcaacatggccaagggctggattactgctgaagacgtggcaaaggcaaaggaaatcattgctactgtttctgccgagaaagctgcacatctgcctgaacaaatgattcagaatattgctaagggccgtcttggcaagttcttgaaagaagtttgcttgctgaaccaggaagacatcatggacggcaagaagacagttagagaagtcttgaaagaagctgatcctgaattgaaggttgttgacttcaaacgttttactttgcgcgctgaataattccgcttagaaacgattctataaaaagaagtggccgtatatggagttgaattcctaaacggtcacttttttatgcctctacagttgcagtgagacggatgatgcgtttatcccacgggcttggtttgcgtgtatccttctgccttcaggaggtcgatgacacgttgtttgaagtcgccttgcacgatgatttctccatctttggcacttccgcctactccacatttacttttcagcaatttgcccagttctttcagattattgtcggtgcccacgaaacctgtgacaagagtgacgactttgccaccccggttcttgcggtccagctgtacacgcaggcgttgttgtgcaggggggagggtagcttgctcctcatcgtcattcatctcatagttgtagtccgggttggtggaatagactatattcaaccgttctttccaatcattattcttcatacttctttcttttaaacttcccaaaagtacgatattatgtggaattatgcaattagaaattatgttaagcttttgttgcatccgtgttactgattagaaaaaaagcactacttttgccaatcgcaatattgagaacttaaataagaaactatgagcagtccgttacagaaaaaagaaaccatgaaggtgccggaacctaccttgcgccggcttccgtggtacctttccaatgtaaagttgctgaaacaaaagggggaacgattcgtatcatccacccagatttccaaggaaatcaatattgatgcttcacaaattgccaaagacctttcgtatgtcaatatctcgggacgtacgcgtgtaggctatgaggtggacacactgatagctgtgctggaggatttcctgggatttaccaatatacacaaagcctttctgttcggtgtcggaagcttgggaggtgccttgctgcgcgactcgggtctgagccatttcggtttggagatagtagctgctttcgatgtgaagcccgaactggtgggtacgacactgagcggcatccccatctatcactcggacaagttcaagcagaagatgcaggagtacgatgtcaatataggcgtgctgacggtacctatcgaaatagcccagcagataacggattccatggtagagggcggtatcaaggccgtatggaacttcaccccgttccgtatccgtgttcccgagaacattgtcgtgcagaacacttccctttatgcccatctggccgtgatgtttaacagactgaactttaatgagatcaagtaatgaagattattgctgtaggaatgaactatgctctgcacaacaaggagctgggacatacacacgagaataaggaaccggttattttcttgaaacccgattcggctatactgaaagatggcaaacctttctttatccccgacttttccaacgaggtgcattatgagacggaagtagttgtgcgtatctgtcggctgggcaagaacattgcaccccgctttgcgcaccgctattatgatgcagtgacggtaggcattgatttcactgcgcgtgacctgcaacgtaagttccgtgaagccggtaatccgtgggaactctgcaaaggtttcgacaattcggcagccatcggcaccttcatcccgttggagcaggcgggtggagacgtgcaaaatctggacttccatctgacgattgatgataaggaggtgcaacgcggtcatacagcggacatgctgttccgggtagatgaaatcattgcttatgtcagccgcttcatgaccttgaaaatcggtgatttgctgtttacgggtacacctgtgggagtaggccctgtcagcatcggacagcacttgcagggctatcttggagaggagaaagtgctcgacttccatatccgctgattatcttcgtcttgttttttcttgttacctcgctttttttccgtactttcgtatcaacttaaagaagtaatgatatgaagatacgtgtaggtttcggctttgacgtccaccagctggtggcaggacgcgagctttggctaggcggcattcgcttgggacatgaaaagggattgttggggcattcggatgcggatgtgctcattcatactatctgtgacgcattgctgggtgcggcgaatatgcgcgacatcggctatcattttcccgatactgccggtgagttcaagaacatagacagcaagattctgctgaaaaaaacaatagaactgatagctaccaaaggttattcggtgagcaacattgatgccaccgtctgtgccgaacgtcctaagctgaaagcacatattcccgaaatgcagcgcacgcttgccactgtgatgggcatagacgaggacgacatctccatcaaggccactaccacggagaaactcggctttacgggcagagaagaaggtatatctgcctatgccactgtgctgatagtgaaagaataatactatgctgaaatgataccgactaattttaatcatccacttatatgaagaaaatctccttaaccttttgtctggcatttttatcctccttgttctgctcggcacaagtatcgcctttacagttcaacaagaatggagagtttaaaatcgtccagtttacagacatccactttaagtatggtaatccggcttcagacattgctttgaagcgtattggcgaggtgctcgatgctgagcgccccgatttagtagtctttaccggcgatgtggtctatgccgcacctgccgatacggccatgcgcaaggtgctttcctatgctacggaccgtaagattccttttgttgtaacttttggtaaccacgacaacgagcagggaaaaacacgtgccgaactttatgatgttatccgttccatgcctttcaatatccagccagaccgtggtggagtagaatctcccgactatgtcctcacattgaaatcctcggacggcaagaaggatgcagccctgctttactgcatggattctcattcctactccaaactacccgacgtaaaggggtacgactggctcactttcgaccaggtgaactggtaccgtcggcagagtgccgcttataaagcaaagaacggtggccaacctttgcctgcactggcattcttccacatccctctgccggaatataacgaagccgcttccgacgagaacgccatactgataggtacccgcatggaaaaggcttgcgctccggagctgaatacgggcatgttcactgctatgaaagaggccggtgatgtgatgggtatgtttgtcggacacgaccatgacaacgattatgccgtaatgtggaaaggcattctgctggcttacggccgtttcaccggtggcaataccgagtacaaccatttgtccaacggtgcccgtgtcattgtgatgaaggaaggtgcccgtactttcaccacctggattcgtctgaaaggtggcgaaatcattgataagacggtctaccccgacagctatatgaaggacgattggcgtaagcgtccgttggtgacggaataagggtgaacttaaaaagaacgatatggacaagataagaactggattagccgcttacggaatgtcaggacgtgttttccatgctcccttcatctccaccaaccctcattttgaattgactgccgttacggagcgcagtaaggaactctcccgggaaaagtatcccgacgcttgtattgtgcggagttttgaggaacttatcggactggaagggttggatttggttgtcatcaacacaccggacagcactcattatgagtatgcccgccgcgccctcgaagctggcaagcatgtggttgtggagaagcctttcactaccaccgtggcagaagctgaggagctggtggcacttgccgcaagccgggggctgaccttgagcgtttaccagaatcgccggtgggacggagattttctgacggtcaaggaaatactgtccaaaggcctgctgggacatctggtggagtttgaatccaccttcccccgttatcgtaattttatcaagccgaatacttggaaggaaaccggacaagatggcggtggcttgatctataacctgggcgcccacgtcatagaccaggctgtgcagctgttcggtatgcccgaagccgtctttgcagatattgccacgttgcgcaaggacagcaaggtagacgactacttcatcattcatttgctacgcccctcaaaggcacccgaagtaaagataacgctgaaatccagctatctgatgtgtgcgagcgaaccccgtttcgtcctccacggcagggaaggttcttacgtgaaatatggtttcgacccgcaggaagccgccttgaacgaaggcgtattgcccgtcactccgcactggggcgaggaggacaaatcctcttgggggatacttcatacggaaaagggcggtagaatcgtgcatgaaccttatccaagccttcccggtgattatgcagctttttacgagaatatctatcggcatatttgtcacggcgaacctttgcagagcgatgcccgcgaggtggtcggagtcatccgcttgatagaggcaggctgggaaagcagccgtatgcagcgtgtggttcgtatctgatagaaaatcttttacccggtagggatgtgcagcttcacatgtgtcaaccgggtgtatttcgtacttcctattatataggtacgcgcgatgcgtgccgatgctatctccatcagttcccctacctggtaggcatgttccacggcgggcagctggcatgatttccggcttgccgtgcgtgcattcagccggatgctgacgaagttgccgatgaagtctttcagcttcagcacctggcgcacatagaaataaggagtggtccctttgagctgcgtcttgtaggggttgtcctccagtcgcacgctgagcaccgtcagcgtcaggttctccactttttcgccttccttccccagaaaacgtccgccggtggtctggtacgtttttctccgttgtatgtcgagatggaccgaatggtaaatcttggcaatctgtacaaaacgttcctgcttggggatgcgtggttggaatttgaaagctatccacgtaagataggcagggtctatacggaggatttcgtgcaggaagtgtccgtggtatttgcctacggagataatgtcgtcccctttgctctgcattcttttggcattgtactccacaagcaacaggctgcgcggtgagtagaagcatagcgtgcttgccatccgcagcgtttcgtgaatgtcggtggaaaggtcgcaaatgtagaagatggactgtcttccgggcagtggagagtaaatccataaagtatattggagatgctccggtcggggcagtacgacaagataggcgcccacttccttataagaggctctcccttgattgtatgcattcagcttactatacaataagtcttgttcagtctgcggtatgccgggtatgattggatttgccatagctcggaataatttattccaaatatacctttttggaatgaaaaaagcaaggggaagtcaggaaatatcagaagcgtaccatcaattccaataccaccttgtcttgttccgactctttcgctatgctgtttttggcatagaagtatttctcgtagttcagccggaggtctgtgcggaatgccttgctgaggctgaaggtgatgccgcccgtcaggcgttggcgtttgtagtcggtcactgtcaatctgccggtttcctcatcggcggttttggcgtcgctctggtcggtcatcatgtcgtagcgtagcaggaaagacatcttgttgaatacttttcgtagaggcaggtcgtagttgatgaaggtgttgacggcgtgtacatctttgaaagcgttgtcggaatattgcttgtacaagtattcgccttcgatatggaaacggccggtttcgtagtaagcgccgatgtcataggactgcatgcgtacttcttccggttggatactctgcacgcttagtgtcaggttcagtcctttggtgaagagaaactgggctttggcggagtagttcacttccttgtgccattctttctggttggtcagtccggaaccgttgaaaagtcctccttccacggtgataggtacatcggtaggcagggtatatcctactgtgaatcccacgtcccgtacattgcccacttgcttggcgatgaacgagcggttgggaaagtattgctggtgcggcgagcggtgggcgtcgatggtgaaggggacgcgcatttgtccggcggtgactgtcagtccttttgtcgggaaaagccgggcgtaggcatccagcatcttgatttggccttcgtcggagaggtctatctcggctttgtaggctacgctgggcaatacgttgcccgtcacgctgacgcgggcattgcgtacttcgaaacgtcctgcacccatggtggtctgatattcgtatttggcgcggatggttccgtggacttccggcaggtagtctttggtttccatcttctccttttcaatcttttttccgtcctcgttgatggagggcgtttgggcaattgcggccaacggcagcagggcaatcagtactgtcaatgcactttttttcataatctgttgttgtcgaatgatttgtcggcgacaaagttcggacatacgtgttgtgtttttgtgtcatatatgttgcattgttgttacaaaaaactgttggagggaagaactgcgatgggtgccgttttaatctttttatggcttgatttagtttcttgtttttattaaaacgttggttgttaggattgtatgtgtactgccacaaatgtttcagtctgaaatatcaatgaaatattcttatctttgaaggaaatatcaagaacgtttgttttagaaccctgatgcttatgaaaagacagttgtttttagcaggaataagtttgatactgggcggcatgccgatgcttgctcaagatatatcttcggtgaattccgtttcttacgaatggaagagcgtaccgatagtgggaggaggctttgtggacggtatcgtttttcacccagaagctcctggtgtccgttattgccgcaccgatatgggaggagcctaccggtgggacgctgcttccaaccagtggacgcccttgctggactggataagtctggatgaaagtaatctgcagggggtggagagcattgccatcgacccgcagaatccgcagaacgtgtatattgcctgcggtacgtataccagtagctccaatggggccatactttgttcttatgatggcggcagaacctttgcccgtgtcgatgtgccctttacgatgggtggcaacgagaacgggcgtggtaatggggaacggatgatggtggacccgcagaatgggaatatcatttatatgggaacccgtttgcatggtttgtggcgcagtatggataaggggcagagctgggcacgggtggtgtctttcccggatgtctccgagaagttcaatcctgccgaccgtgctgcatgggggaatcgcggtagtggcattgtctgcatagtctacgatgtacaaggtactcaagatgggcgtggtacccgtgacatttatgtggcggcttcattgatgggaagggaaaatctgttcgtgagccacgactatggtgaaagctggcagccggttgaggggcagccggtgcagtatcgtcccacacatatggttttgaccggtgacggccaattagtattgacgtacggagatactcccggtccgagtcagatggaggacggtggagtttggaagtacgatatacgtaaagacaaatggacggacatttcgcccgtccgactgtccgatggcggaaaagcgggatttggctatgcagccgtatcagtggatgcccgtaatccgaaacatctgattgccagtacacacagcttgggaggcaaacacggttataagagtgatgagatgttccgtacgaccgacggtggcaaaagctggaaaccgattttcaagacgggatatgagtatgattattctaaagctccctatacagaggtggcgcccctgcactggatgttcgacattgagatagaccctgccgacgccgaacatgccatgtttaccactggtttcggtggttgggaaactttcaatctatcggccgtggaacgcggggaaccggtgaaatggagcatcatgtctgccggtattgaagagaccgtgcccctcgaactttatgctcccgaaaaaggcgcgcgcctgatttccggtatcggtgactatggtggctttacgcatttcgacctcaatcggcccgatccgttgggcagtcatgccaatcctcatttcggtaatacgaatggagtgacgggtgcctggttgaagcaggatttgatagtcagagtgggaactttgttcggccaccagccgggtgcacgcaccatctcctattcagaagacggaggcaggagttggaacatgtgtgctactgttcccgtagagaaggcgcgcaacgggcatattgccgtttcggccgacggctcttcctggatttggacacccgaccgttccaccgcttttctgacccgcgacaaagggaattcgtggatgtcttgtcaaggcctgccggagaatatccgtgtcatagccgacaaagtgaatcccaaacgtttttatgccgtggatgctgttgccggacttctatacagcagcgaagatggcggggcgaccttccataccgatactctgcaactggctgtaaaaacactccggcggggcaatgcctctctgacgaatcgcaggggtgacccgcgcggagggcaagaccgtatttattcgactcccggtcgtgagggagatttgtggattgccgcttacgatggcctgtaccattccactacccgtacgggatttgattttcgtgcgctggacaaagtccgtactatctatgccttcggttttggcaaggcaaagccgggcagtaactatccggccctttatctgattggcgttgtcaacggtcagtacggctttttccgctcagacgatgctgccgtttcctggatgcgtattaacgatgatgctcatcaatacgggttggttctgcatatctgtggggatatgcaggagtatggcagggtctatatagggacacatggacgggggattgtgacgggagtgccctcttccgattgacaagttctttatgtgaaggcatgctaaaaaggcatgccttttctctatcttctgctcgaaatcatgtatttttgcagactaattcattggtttctgatatgagtacacctgaaaagcgagtattggtcggtatgagcggtggtatagacagtactgccacttgcctgatgttgaaggagcagggctatgagatagtcggtctcaccatgtgggtgtggggagacgaaccggtagaagcccaccaactggcagacagcatggggattgaacatcatgtggcagatgagcgcgaagccttccgacagataatcgtacagaattttatagatgaatattgtcagggtcggactccgaacccttgtgtgatgtgtaatccgctgttcaagttccgtattcttgaggagtgggcagacaagctggggtgtgcctatattgctaccggacattacacccgtctggaggaacggaacggtaaggtttatatcatagccggggatgatgacaagaaagaccagtcctactttttgtggagactggggcaggagttgctgaagcgttgtatcttccccttaggcacctataccaagcagcaagtccgcgaatacctccgcgacaaaggttataccgtcaaggcggaagaaggcgagagcatggaggtctgcttcattaaaggtgattaccgtgatttcctgcgcgaacactctccggagatagaccgcgaggtgggaccgggatggtttgtcaattcggaaggcgttaagctgggtgaacacaaaggctttccctattacaccatcgggcagcgcaagggactcgaaatagccttgggcaaacctgcctacgtcttgaaaatcaatcctcagaagaatacggtgatgctgggagacgccgaacagctgaagacgggatatatgcttgccgaacatgagaatttggtggatgagggagagttttttgaaagcaaggagctaaccgtacgtatccgttaccgcagtaaaccgattccttgcgacgtgaagcgcctggaggacggtcgtctgctggtacacttccagacggaagcctctgccatagctccgggacagtctgccgtattctatataggccgaagggtagtgggcggttcctttatcgcttcccaaagaggcatcgggatgttcctttaatttttaatttttaatttataattgtgaaaagacttctactcctttccgcctttgtcctgcttgcggcaggagcatcggcacaacaagatacattgaagtatcgcatcagcctgaaggataaggctgccaccacgtattccttggaacacccggaagcgtttctttctgaaaaggcgattgctcgtcggcataagcagaacctgccgatagattctaccgacttgccggtgtgccgcaagtacgtggacgaaattcgccatcagggcgtaaatgttgtggttaccggtaaatgggagaacttcgtcacggtatcttgcaatgactctaccttgatagaccgtattgccgcactaccttttgtctgcgctacggaaaaagtctggatagctcccaaagatgacagtccgatgatgtctaccggacgcgattctttgattaaccagccgagtgtacatcctgacagtatctatggacttgccgttagccagatacagatgagtaatggtgataaattgcaccagggagggttcaaggggcagggcatgacgattgcagttatcgatgccggttttcataatgccgataagataaccgccatgcagaacatccgggtgttgggaaccaaagattttgtaaatcagcaggcagacatctttgcagagagcagtcatggcatgatggtactgtcctgcatcggcatgaaccagcccggcattatgaccggtacggcgcctgaggcttctttctggttgctgcgtagcgaagacgagtattccgagcatttggtcgagcaggactattggtctgcagcggtggagtttgccgatagtgtaggggtggatgtactcaatacttcattgggatattacacttttgacgacaagtcgaaagattataggttccgtgatttggacggacgccatgcactgatgtcccgtcaggcttcacacgttgcggacaaaggaatggtgctggtgtgcagtgccggcaattccggtatgggttcgtggaagaaaatcacacctccgggagatgcggagaacgtgctgaccgtgggcgctattgacaaggaagccgtactggctcctttctcatctatcgggaatacggcggaccaccggataaaaccggatgtggtggctgtcggcttgggggctgatgtcatacgtacggatggtaaccagggtaaggcaaacggtacgtcgttttcttctcctatcatgtgtggcatggtgacctgcttgtggcaggcttgccctgaacttacggctaaagaggtgatagaactggtacgccgctccggtgaccgtaaagattatcccgataatatatacggttatggtgtgcccgatatgtggaaagcatatcaggattatctgctcaaaagatagccatatggaatcgttgtctttgtatgagctcaacgcccttgtgcgccgcagtctggaacaatgccttcctgacgagtgttgggtgcaggcggagttgagtgatgtgcgtaccaatagcacggggcattgctatctggaatttgtgcagaaagaccctcgcagcaacagcctgatagctaaggcgagaggaacaatctgggcaaatgtgttccgcctgctgaagccctattttgaggaagccacggggcaggcgtttgttgcgggcatcaaagtgctggtgcaggtcaccgtcagcttccacgaactttacggctatagccttacggtgcaggacatagaccccacctataccttgggcgatatggcacgccgccgcagggagatactgaaacagctcgaggaagagggggtgctcaccctcaataaggaactcgggatgccccgtctgccgcaacgtattgccgtcatatcctcaccgacggcggcgggctatggtgacttctgtcatcagctggaaaacaactcccggggtttctacttttatacggaactgtttcctgccctgatgcagggtgaccgtgtggaggagtctgtcctctctgctcttgaccgggtaaatgcacgcttgtccgagtttgatgtggttgtcattattcgtggtggaggcgccacgtccgacttatccggtttcgatacttacctgcttgctgctgcttgtgcacagtttccgttgcctatcataacgggcatcggtcacgagcgggatgacacggtgctggattctgtggcacatacccgtgtaaagacccctacggcggctgccgaattcttaatagagtccatggacagcgctgctgatgaactggaaatgcttgcttctcgcttgcatgagggtgtcaggaatctgttgcagcaggaacagcgcagactctctggttacaagaaccggattccttctgccgcataccatcgtatatccgatgcaaaaatggctttgctgactgtgcggaaagatgtggtgcaggctgtgacttcctctttgttccgccatcgccatcgcatggaattgttgcaacaacgattggcagatgcttcaccggaaaagttgttggctcgcggttacagcattacgttgaaagatgggaaagtagtgaagaatgcagatgaactgcaggagaatgatatgataacaacccgtctgcggaatggtgaagtggtttcaatagtacatatttaactctcattcatgcagtgttttgcaaatctctgtattttatgaatattgcttaaatcatttaaaatgaacaaagatgaaaacacaaaatttgttttttatgctgatactgataagtatggcatttagttttatttcatgtacggatgaggatgataaggtcgaaattcctcaactggtaggtaagtggattgtgaaagaaccagtcctgcaggacgattttgtgacctgctatacgtttaatgcagacaagacctatgaagtttataccggaagcccgttatctaacggagtcccttttcgtggaacttatgtcataagtcttgatgaaaaattgattacgttgtatgataaagagggacattatactgaacaatatcatattttgaaactgacgtccaaggatatgaagtgggagaacgcatcgcccaaagacgggaattctgacaaacggcttgagaagtacaacgattaattaatttcaattatgccggtaaccaagaaaaaagagacctactccgaagccatggcacgtttggagaaaattgtcagccagatagacaacaacgaactggagatagatgtgcttgctgaaaaaataaaggaagcaaacggaattatagcattttgcagcgataaattgaccaaagctgacaaggaaattgaaaaattactgtcggagaagtgggaatctgaagaataaaagctatttttgttgcaaaatgtacgtaatagaagtaactaatactttgagatatgaaagaacttgattgggctaatctgccgttcggatatatgaagacagattacaatgtgagaatttactatcgtaacgaacaatggggcgaactggaagtttgcagtgaggaaaccattcctatgcacatggctgccacttgtttgcactacggtcaggaagcgtttgagggtttgaaggcttttcgtggcaaagacggtaaagtgcgtatcttccgtttggaggagaatgcaacccgcctgcaatccacttgccgtggcatcttgatgccggaactttctacggagcgtttcaaagaagctattctgaaggtggtgaagctgaacgagcgtttcattccgccttatgaatcgggtgcttctctgtatatccgtccgttgctggtgggtaccggtgcacaagtaggcgtacatcctgccagcgaatatctgtttgtggtgttcgtgaccccggtaggtccttactttaagggtggattctcaaccaatccgtatgtcattatccgcgaattcgaccgtgctgccccattgggtaccggtatttataaagtaggtggtaactatgcggccagcttgcgtgccaacaagaaagcgcacgatttgggttatgcctgtgagttctatctggatgccaaggaaaagaaatacatggacgaatgtggtgctgccaacttcttcggcatcaaggacaatacgtatatcactccgaagtccacttccatcctgccctccatcaccaacaagagcctgatgcagctggcagaggatatgggcatgaaggtggagcgccgtccggttcccgaagaagagttgctgactttcgaggaagcgggtgcctgcggtacggctgccgttatcagccccatcgaacgtattgacgacgtagagaacggcaagtcatacgttatttccaaggatggaaaaccgggaccggtatgtacgaagctctacaacaagctgcgtgccatccagtatggtgacgagccagatactcacgggtgggtgacgattgttgaataatacggtgatggtaatatctatcgtataagacttgccgggactttgttttttatacttttaggcacggattgcgcggaaagcacggatagattgaagagagaccgtgaaaatccgtgtaatccgtgcctaaaataatatgttttatgtttcaatgcttcttaaatgggaaagaacaagttagagaagtttgccgatatggcgagttatccgcatgttttcgagtatccgtattccgcggtggataatgtgccgtttgacatgaaagggaactggcacgggcggtttttcaagaacgaccatcccattgtcctggaactgggctgtggtaggggagaatatactgtcggattgggacgcatgtttcccgaaaagaacttcatcggagtggatataaagggtgcccgcatgtggacgggagccaccgagtcgctggagtcgggcatgaagaacgttgctttcttgcgtacgaatatcgaaatcatcgaccgcttttttgctacagatgaggtgagcgaaatctggctcactttctcggacccgcagatgaagaaggcgaccaaaaggcttacttccacttatttcatggagcgctaccgcaagttcctgaagaatgacggcatagtccatctgaagacggacagcaacttcatgtttacctatacccggtacatgattgaaagaaaccggctgccggtggatgtgatgacggaagacttgtaccactccggcatggctgatgagatactcagcatcaagacctattatgaacaacaatggctggatcgtggtttgaatatcaagtacatcaagttccatcttccgcaagagggcgagttgcaggagccggatgtggagatagagctggatgagtaccgcagttataaccgtagtaagcgtagtggactacaaaccagtaaatgatgcgaatcagtggttaaaaatactactgattcgcataaaaatagtaaatagtaaatcgtcaaatagtacatacaatgacattatatccaaaattaatccttgatgcattggcaacagtgcgttatcccggcaccggaaagaatcttgttgaggctgagatggtggccgataacatgcggattgacgggatgaaggtcagcttctcgttgacattcgagaaaccgactgatccgttcatgaagtcaatggtgaaggctgccgagacagctatacatacgtatgtctctcccgaggtggaggttgtgattacgactgaaagccgtcaggcggcacgtccggaagtgggtaagctattaccccaggtgaagaatgttatcggagtgtcttccggaaaaggtggggtaggtaagtccacggttgctgccaaccttgccgtgtctttggcaaagttgggttataaagtaggtctgctggatgctgatatcttcgggccttctgttccaaagatgttccaagtggaagatgcccgtccggtggcagagaacattggtggacgtgacttgattgttccgatagagaagtatggcatcaagttgctttccatcggtttctttgtagaccccgaccaggccactttgtggcggggaggtatggcaagcaatgccttgaagcagctgattggtgatgccgattggggagaactggattatttccttatcgaccttcctcccggaacgagcgacattcacttgacagtggtgcagactttggcactgacaggagctatcgttgttagcacgccgcaggctgtggcgctggcagatgcccgcaaaggcatcaatatgtttaccaatgataaggtgaatgtgcccattctcggtttggtggagaacatggcttggttcacgcctgccgaattgccggaaaacaagtattatatctttggaaaagaaggcgcaaagagactggctgagaaaatgaacgtacccttgctgggacaaattcctatcgtgcagagtatctgcgagagcggtgataaggggactccggttgctttggatgagaatacggtgaccgggcgcgctttcctgcaactggctgctgccgtagtccgtcaggtagaccgcagaaatatggaaatggcgccgacacggattgtggaagtgcataaataaacatggatattttccttatgaaaaaggagcaattgcccgtcgccaggtaactgctcctttttcatttaaacttgtttagagagaaaattagtttatttagttggagtaacagtggcattctggacagcaaggcttttctccggttcttgcaggcggaacatgatggggactgtatattttacgtttacagcttgtcctctttgcatgccgggcttccacttgggcatgatggtagtcagacggattgcttcagcgtctagcagtgggtcggcaccacggattactctggggcagatgatgttcccttctttatccactataaactgtatgaccactcttccctgaatcttagctttttgtgcggctaccggatatttgatatttttgccgatgaattccatcattgcagacatgccgccgggatattccggcatttgttctacgacttcaaaaacggttccctcctccggtaccgttgttccttccggagcataacccactaccaccatttcatctattttgctttcaatgggagcatacttaacctgtgtattgttttccgtcagacggaacatcacgggaactgtatattttacccgcacggcttctcctttttgtgtgccgggtttccatttgggcatggcactgattacgcgcacggcttctttgtccagttcggggtcaataccacgaagcactctcgcattggcgatgctgccgtctttttccaccacgaattgtacggttacccgtccttgtgtgcctttcttcatggctgcttccggatacttgatgttcttgctcaaatattccattagtaccggcatgcctccaccggggaattcgggcatatgttccactacttcgaaaataggattgtcgagagtatccttgtccactacctttcctttgtaagtcacagctttcgtgtcttgttccggttggggagctgcttgagggtcttgaacttccggtgctggttgttcggttttgggatctacggcctctatgacttccgttgcaatcttcttcgtggtacgcgccacggcttcgatgttgctgacaatcataagtaaggctgccaagggaaggaacatcagatatttggtccttcctatttcttttgttctctttttgttcatcattttgatgcgtttttttaaaggtaaaacattgaaactgttatagatagttgctgcagccttttgatgtgacaatcctagcagatggtactggtaggttttggagtcatagccgttctccaatacgcgggcatcggccatatattccagattggtgcggatttcccgtttcatgagccaggcaaagggattgcaccagcaaaaaatgcacaccagttcactgatgatgacatcaatggagtgccattgccgggcgtgtgtctgctcatgggtcaatatttcgttgaattcctcttccgtatgcgaggacggatggataaaaatccagtggaaaaaggagaaaggcccgtctgctttgggaagcagatgtatatttgtgttgcctatttgtaccttgcggcatcggcatgccaggtggatgatgcccgccagttgcatgatgaggcgtatcatcagcaatgccactattccccaataggcgatattggcatattctgaaaggatgcttttccagtcggtaggagccgcttcggtgcctattgtgagttccggtagcacaacgctagcatagaggtctgccatggccaccatcggttcctgctccgtaatccacgtttgtatgttcagcagaggtacggcggcagaaacggcaaagaaacagagcagtgcggttctgcgccagccgaaaaacgtgtctttgtagaagaacagccgatagaatgcgtaaaacagtactatcgctacattcactttcagaaaataggctaacatgtttactcctttcctttctctatcatgtctataatgtctttcaggtcattggccgaaatcttctggtctttggcgaagaacgaaaccatttccttataagaattttcaaagtagttgcgcacaaaaccgctcataaaggtacgtttgtattcgctttcgcgtataagcggggtatactggtaagtgttgcctacacgtgcggcacggatatactgcttgcgctccaggtttttcacaatagatgctacagttgtgtagggaggcgccggtttgggatatttggcaacaatgtcttttacgaagcaactgcccagttcccaaatgtacaacattgcttcttcttcttgtatcgttaacttttccatggataaagtatttaaatgaatttaatgcaaatctacgaatatttcgtaaactaacatcaaacagtgagttaattaatctaaatgctcctgctgtgtgtatattcttttgccggattgaaaagaacatggctgttgataatcttcttttggctaagattgtctatctttgcagaagaagcgaagactggcggcacctcagcataaaaaatgaacgggttcattttatcctgcattcggtttgcgctgtctttgttgcaatgaattcttttaccttaaataaagcagaatatgggaacagttaaatcgttgttgctgggaatgtgcttcgtattgggtgcatgcacaagccagacttctactgtgcaaaccacagagaagggaactcaatgggaatggcagaatggtaccattgttgtcaaaactcccgagcgtccggcaggacagaagagtgtattgggactgactactccgaagttggaggcagtccgtgtgggttttgttggtttggggatgcgtggccccggagcagtggagcgtttcacttatattccgggtacgcaggtagtggctctttgtgattatgaagaggcccgtgcagataaatgtcaggagctcttgaagaaggcatccatgcccaaagccgccgtctattccggtgacaaaggatacgaggaactctgcaaacgtgatgatatagatttggtttatgttgctgcagactggctgcatcacttccccgttgccaagtgtgcgttggagaatggaaagaatgtagcgatagaagtgccttcggccatgaatctgcaggaatgctgggatttgattaacttgagtgaatctacccgtaagcattgcttcattctggagaactgctgctatgactggttcgagatgaatacgctgaacatggcgcagcatggcgtgttcggtgaagttatccgtgcgcagggtgcttatatacataatttgagcccgttttgggaccattattggaagaatggagaaaatgacaagctgggctggcgtttggactacaacatgaagcatcgcggtgacgtgtatgccacccacggccttggtccggtggcgcaagcactggatattcaccgtggtgaccgtatggaaacgctggtagccatggataccaagtctgtggtaggcaaggagctggtagagaaaagaaccggtgaggagtgcaaggagttccgtaacggtgaccataccacgaccatgattcgtacagccaatggaaaggtgattgagattcagcacaatgtgatgacgccacagccttataaccgtttgtatcagcttacgggcaccaagggattcgccaacaaatatccggtagaagggtatgcgcttgacgctgaccagctgagtgcatcgggcgttcagcccaaagtggatgatttgaattcacacggtttcctgccggagacggagatggaggcactcgtggagaaataccagcatcccattttgaagaagtacggtgagatggcgaaggaagtaggaggtcatggtggcatggacttcgtgatggacagccgtctggtatattgcctgcagaacggtcttccgttggatatggatgtatacgatcttgccgagtggtgctgccttgcagaattgggagaactttccatggacaacggttgtgcggctgtggcattccctgatttcacccgtggtgaatggaatgtggtgaaaggctacaagcatgcgtatgcaagtccggaagaggaagcggctgctatggagaaggcaagggcatttactgctaaactgaaggagcagggagccaaggaatgggctgaaaagtaatggcggtatactgataaaacaaaaaaacagcaggtgataagcctgctgtttttttgttttatcagtttgtcatttagtcactttcagcaactcttccttcatcttctccactcccggaaagccggtttgtctgaacgtggtgtttccttcgcggtctacaatcagataagtcggtaccccttctatcttgaatgcatccgataggtatttccattgggcatctgtcagacggaaatgttcgccgtggatgtcgggaatcatattctcccaggtcttcaagggagaggtttcgccggtgatgtacagatataggatatccttgtctttcagttcctccttcatgggggccatcgtcttgtttgccatacggcatggaccgcaccaagtggcccagaaatctactaacaatacttttcctttgaatttgctgatgatggaagtgaacaaatcttcgttgctgacgttggtgtccacttggttgatggtgtagcccgtctttttcttgttggcttcgagttgtgccagcagttcgtcattggcggcagtcagcatttcacggtatgcggcgggcatggcgacaacggtggccttttgctcgtcggtgagcggggtgaagttcttgataccccggtagagggtgacattacgggctatatcgaagaagatacctttgtcggttccccaggctttggccaattctccactccgttcgacattccttgaagccatttgtacatactggttggacaagactgcctgcggcacattcaatatactcatatcttcgtcggacacgtagttggcgggtactttccgggcaagttcctgatagtagttgtttgcttcctcccgtttgatgagattggcgtgtagggcagccgatgtcaagatgctggcaacggaagacagcatggcatttgtaatcagtttgttattgatagtcaaaagttgtcgggtagaagcactataaggcaacttgtctattgcttcttgtgtttcgtcggatatttgaagtacgtatgctttggctgcatcaatatccttgccagccagtgcagctatgttttgatagagcttgtcttgcatgtcgatgccgaggtggtttccgttcaattcttgtgccacggtttccagcggtccgttgatatataccatttctccatagggtttcccttcgctgtggaatttagacttgcgccgggaagcttcgcgtagattgacgtatatttctgttgtcttgccgggttccatgaagaactggagcatatgctctctacccaaatatatggtacatggggtagtgccgggcaatgttacttctttggtgaaactgccgtcaggctggatgtcgagtggtatgtccgtgatgtctcctttgacattctcccacacggcaatactgattggcattcccatattggggcgtgaatccaggagttttcctttcagcatggcttttccgtattggatgaccggttcgggaagttcggcattagggtcggctttgtgtactacggcgttctggggaagtgccagttccggcagtttcttgcttttcagttgtattccccagatgctgaatccgttttccaccttttcgccttcggtgaagtcgaaggaggtagcattgtcggataggggaggaaagaccagctggaattccgcttcgcccgattcgggcatccaaaattctttacctggtatgatgcctataccggaacgcagttggtaggtttctccgttattgtctgtcaggtagctgtcgggtgcaatctgtatccagtacttgggacgatacttggcatagatgtggagcacggttgccgtgtcactgatgactactttactcacttcgatggaagtcgtgtttcttacgataaacggtggttggtcaatcacacggtttttggcttgcagggtacagcagatgcacagtaggaagcctgctaagagtaaatgaatgtgtctcatataaattgttttttgcgaaattacgaatgtttcgtaaagaaacaagcatgtgggagttaattgatgtaaaatacttccatttcttcgtttttcaaagaaaccttgtatctttgccatctgatacttaacacttaatatcttgtcatatgagaaccagaattcttttgatgggcttgttgttggccgctgttgccaatgcccagactatctatcatgatgcttccgccttcccccttctgggcaaagcaacagaatctacccttacccgctatgagcgtctgccggactctctgcagaacatctcccgcaagccattgtgggacttaggccgcaacagtgccggactcgccgtgcgcttccgttccaactctacaagcatttctgccaaatgggaagtaaggaacaatatgagtatgaaccacatgacaccgaccggcattaaaggcctcgacctctactgcttgcaagacggtaagtggatatttgccggtagcggacgtccgcagggcaaaatcaataaggcgactatcgtaagcaatatgttgcccgaggagcgcgaataccttttgtacctttctttatatgatggggttacctcgctttccatcggcgtggattctttatccgccattaccccgccggcagtagacttgccgaaacgtgagaagccggtggtattctatggtaccagcatcttgcagggaggctgcgcttcccgtcccggcatggcgcataccaatattctggaacgttggctcaatcgtgagtgcatcaatctgggatttagcggcaatgccttgctcgacctggagattgccgatgtcatagccggtgtggacgcttctatgtttgtcctcgactttgtgcccaatgctaccgtggagcaaatgagagagcgtgccgataaattctataccactatccgcagcaagcatcccgatacgcctgtccttttcgtggaagaccctctctttacccactctccttttgacaccaggattgccaaggaggtaaaggacaagaatgagacattgaatgcctttttccgttctttgaagcaacgtggagagaaaaacatctatttccttgcttcccgtgacatcatcggccacgacggggaggctacagtagacggcattcattttaccgatttgggctttatgaggtatgctgagatactttacccgatattggagaaacacatgcgaccgtaattaggtattacagccccgtttgtctgtttgctgccttgccgatgctgtagggcaactatttgtttcctttaacaaaacagtctgtttcctataagggaacagactgtttcaatatggcgaacaaactgtttttatatattggaacaaattgttctgatacgctgaaacaaagtgttcaaacgcatgtgaacactttgtttcgtaggcttggaacaatgtgttacgcttctatactcttatgcttcttatactcttcaatcacatgtttcctgctctgcaatatctgccagcgatataccaggcacgtggtgatgaagtagaagcccgtttgtatccatagtgcttggtactcgaaagagacttcattgagtgtggctcccatgctgttgatgcgtacgtagccgttgatgccgaaggtagaagggaagatgtacgagaagtacttccagaaagcgggcatagcagctcccggccatgaaatgccggagaggaacagcagcggcacggaggtgaacacgaacagcagcatgcacgtttcgcggttgcggatggcaatggatgctgtcatggcaaagaaaatacaagcggccaggtagggcagggtgaacagagtcaggacaccgggtatcgctatttggttgaggctgaaaagccatggaaccacacacagtatatataccgataccagtgaatataccatgaagtagctcagcccttttcccatcacaatgcgtagtgtgccgttgtagtggcggttgataggcaccaggtcgcggaagcggttctgttcgcgtgccgtcccggcagacaagccgatgccgagtagcagcgtttgctggataatcaataccaatactgccggaatcaggaaagcggcaaatccgttggttggattatagagggcgacatcctcatactctatcgggtaggcggtaatctcgtcctggcggtcggtggtattggcgcttcgctccactttgatgtctgcgttcatggcaagcgacacgttggtgttggcagtcagcaaggctttgtaatacagcagtccgctcatgtcgcagaagatgctgacctgcgtttgcttaccgcgtacaatgtcgtcgctgaaggtggaggggatgtagataataccgtatgccctgcggtccttcaacatcagtttggcttcttccatatcagcgcagtagctcacgaggctcacttcgggactggagtccactttccgcaggtattcgcggctcaacgaggagcgtgagtcatccaccacgacagtgggcacttcgtggatagtttcgttggtatagatgaaagcgtatatcaacggatagaccaacggaacgagcacgaagaagatgagcacgccctggtcgcggaaggtggtgccgaattcccgtttccatatatagaacaagtcatgaatgccttgtatcactttctgtctgaacgtcaggtctttcattagggcatgtatttatagtaaaccaacgctcctttcagcctatgggctataaggaacgggagcatcatgaaaataagcagcgctacgtagttgacccacgagtaaatcatggggtatccattcagtgcctggtccacataaatcaggaaatagtggcgcagggggaacagatttgccaatgcctgcaatacggggtgcatgcccatggcggggaatgacaatccgcacatggagaaagagagtacgccccatagggaagcgaaactgagtcccagacgcagggtaggcagggttcctatcatcaatattcccatgccttgcgatgccagcaccaggcaaagagtggcaagcagcatcggcaggatgccgctgttgcagggaaaatggaggaaaccgtagaggtatacattatataatattcccatcaggaagaagatggcggtatgcggcagcagtttgccggcaagggaaatccagatggagttgttgcccatgcgcagccattcgcgggcggtgcggtcttttatctcgactccgatggaatagacggttaccatgaagataagcagcatcaatacgcccggtgcaaaggtgttgcacagatatacggagtagttcagccacgggttattgagtggatgcgtatctatgacgatgggttggaggaaggccatcgcttgttcctcggtagctcctttggcatatagggtgctacgtgctgcggcaccggatgccaattcgctcatcatcttcatgtccttgaagaggagtgaacctgcgatgagcagggtattgtttgtatagaaagagagtttgggctgccgtccggcctgcgctttggcagaggtaccttcgggaatgtagaagaaaccgtaaatctctccgcgctgcatggcggtacgggcttcgttgatggtagggtagcgggcgacgacggctgtctgctcaaaagcgtccaagttacgtatcagctggcgtgaagtggcactcatgtcttggtccaccacacctacgggcatgtccgtaggaagcccggagtccatcagcgtggtgaagaatatgtagcagaacaacggtgctatcaccatacagaacagatagagcgggcgggaaacaagacggcggcattcgcgtcttgctacattccacaaagccgtatgtttcttatttctttccatcatcctctccaataactcataactcctttacttcttcaatacaacactcattcccggacgcagtccttccaccttctcttgcggagcggcttttacttcgaatgttttcaggtcgaactggccggtagtcttggtcgctttccaggcggcatatgtgccgaggtctttcatatagtacactttcaggcggatattcttatcgagtgcagggatgaacgcctcgaattcggtattcatacccaacccttgcagcaagtcctcgcgtacattgaaggttatccacatatcgtccagaatggcgatgttcataatgggagcacccgtgcccacgagctcgcctactttggggaatatctcggatacctcaccggcagtctgtgcaatcaggtaagtttccttgatgtacgattcaacttcggccacagctcctttggcacgttccaccaaggcagcggcagcggctttgtcctcgcgttccgcaccgttcttggccatatcatactgggctttggcggctttctccgtagcccgggctgcattgcgttgggcggtaacttcgtcaagcttttgtgtagacatcacgccttggtcgtgcaggttcttcacacgcgtgtaggatttttcggcaatctccagtccggccagtgccttttgccacatttcataggcagcttgtatctgttcccgacgggcgccttttagagctttttcgttctgggcttgggctgccgattcggcggcgcgtgcttgttccagtttggcctgcacgtccggagcctccaaaatggcaagggtgtctccggcttgtacgctttgtccctcttttacacgaaattccagaatacgtcccggcactttgctcgatactcgatactccgttacttctgcttgtccttgcacaatttccggccctttacgcaacatgaagaaacctacaagggcaacgatggcaatcactcccgtcagcgtgaggaatgccaacaacatgttactgttttgtgattttgtatccaacatattatttactatttgactgtttactatttacgattgaagaaactatcaattatcaattgtcaattcccccgttgcctttctcagatagatttccgtcagttttacgtcaatctgtgcgtctatcttttccgattgggcagaaagccatgcggtgtgcgcttcgagcacattgctggcaggtataacgccttcctcaaagccaagtgtggcgtatctcaggttctcgttggctttttccaggttcttttcggccatggtcagtttcttggcagcttcgttcacttggaaagccgactggttgacctgcagctctatcttttctttggcgtcatccaactggtattgggcgatgcgtgcttccgatttggctgcttttactttatagatgccttcgccccagtgccagatgggtaccgacaccatgacacccacattccacatccccttgaactttttctcgaaactgttgaagacggaagggttggttgccatatagctgcccattagtgctatggaaggaagatattccgaacgggtgacatttactttctgcttataaatctgcgtggcaagttccaggctacgcacttcgggacgggtagcataaacattgttgatgtcgatggcaccgttttccggagtagtgggagccaggtcttccttctgttcgtctgtgagcatgacgggagtggaaaggtcgagaccacacaattggcacagcagcatccgggcaaggctcaggccatcggttactttggtcagggtcatttcggcctcattcacttttactttgatggagagtccgtctgctttggtggcaacgccttcggcaatcattttgtcaacgtcgctgtcgagcttctgcagtagtttcagataaccttctgccagcttctttttatgggcaagggacactacctgccaatatgcctggtctgtactcaggattacttcctgcataccggtgttgtgctgctggcgggccagctcttcggcgtatttggtaattttgttgtaggcacgtatcttgccgcccatatataggggttgggtcaaggtcagtgcgcccgcatacatgttgcgggtgtctgtacgaaaggcgtcaaccaaggattggcctgcaccgtcgagggcacctaccaggctttgtcctaaagccggcaattggcctgccagttctggatgaagctgtgcgatgacttgggcagcctgctgtaacggtccgctgagacttgtacccaatccggacaaggctcctttctgagcgtcgctgaggatggacaactctttttgactgcgcatatatccgccgctggccgaaatgttgggaaggtaattagtaaatgccgctttcctttgatagtgggcagcgttgattttttcctggcttatcagcagttctttgttgttggagattgccaatgcacggcaactatccaagcttaatgcttcctgggccttcatggggaaggataggtatgccaaacagatgaaacagaagaactttttcattgggctatacattaattaaggtgatgaatctgttgtttatacagcaacaataattgcataaacaacgatgcaaatgtataggctttcaatgatattgcaaaataatttagatttttttgtattaattcaagctgaatgattgcgaaccgataagggtaccgtcagcaaaaatgtctacgcggtaggtgcctgcatagaggtattcttctacatcccaatatacggtgacggcttgctcttctccgttgtattctatatacttcttgatggaatataccagttcccggttctcgtatgggaaggtgttcgaggaacttttggtcagcacgtcattgtccggtttggtgatgcggatgtagagggtacgttcgccggtctctgcagtgatgtttttcacgatggagaagtttattttgaacttcacgatgtctttcaccttcttggcagtcttgccgcgtttgtttgtgggctgcacagagatgttggtggcgtccagttgggcggcaagtgtcacggtcttggtcaggttcttcttctcttcggacaagttgctgatttgccgggaagcggcgttgtacttcttggtgacatcggctatgatttccttctgttgagcagtcaggcggtttagcgagtcaatctggttgatatagcctatcatgactttgcggagagaggccagttccttcttcagacggcgtatctcggtggcattgctgctcttcacggtgcggagttcttccaataaacgttgggtcttcaattgttcctgctccaagagtacggagagggagtcgttggagactgtcaacttcagttcgtcatattgtctggcgaagtctgtgtattgattttcaaggtcttctttatccagattgaattccatcaccagttccttgttggtttgcttttcggaaatcagcagaatggtaactcctattaataataagataaggaggctgcctgccacgatgagaagtgtattcttcttaactgccatttttgataatgattaatggttaagtgattaatggttggtggctgattattcgtcctacattcattaatcgtccgcaaaattaatcattaatcattaatcatcgtccactaatcattggctaaatgtgtatttaactaaaattattacggaaatatttctctaattacgaagttcgctgtacttttgcgtcatctttaaagaacacttataaacaaaaaactttagaaattatgtcaaaagtaaccgtagtaggtgcaggtaacgtaggtgctacatgcgctaatgtgttagcctttaatgaagtggctgacgaagtggtaatgctggacgtgaaagaaggcgtttcagaaggtaaggcaatggatatgatgcagactgctcaactgctgggcttcgacaccactgttgtaggttgtaccaacgattatgagaagactgccaactccgacgttgtagtgattacttccggtattccccgtaaaccgggtatgactcgtgaagaattgatcggtgttaatgcaggtatcgttaagtcggttgcacagaacatcttgaaatattctccgaatgctatccttgtggttatctccaacccgatggataccatgacttatctgtcattgaagtctctgggcttgccgaagaaccgtatcatcggtatgggtggtgctttggatagctctcgtttcaaatatttcttgtctcaggctttgggctgcaacgccaacgaagtggaaggcatggttatcggtggtcacggtgatactaccatgattccgttggctcgtctggctacttacaaaggacagccggtaagcacactgctgagcgaagaaaaactgaacgaagtggtagcttctactatggtaggtggtgctacactgactaagttgctgggtacttctgcatggtatgctccgggtgcggcaggcgcttatgtcgttgagtctatcatccacaaccagaagaagatgattccttgttcagtatatctggaaggagaatacggtgaatcagacatctgtatcggtgttcccgtaatccttggcaagaacggtatcgagaaaatcgttgaactggaactgactgctgacgaaaaagctaaatttgctgccagcgctgctgccgttcacaagacaaatgccgctttgaaggaagtaggtgctctctaattgagggtaacttaaaatgataagcaaacctcacggtctttttccgaaaggaaaagtcgtgagttttttttattctccaaaaacaagaatcattatgaaaaaactactattaggtattgctgccgcttgcctggctggttttacttttgcgcaggatgctccgctgtggatgcgtcatagtgtcatctctcccgatgggaccaccattgcttttacgtataaaggagacatctatacggtgccggttgccggtggacgtgccatgcagataactaccaatcccgcatatgatacggctccggtatggagtccggacagtaagcggattgcttttgcttcggaccgtatgggaagcctggacgtctacattgtggccaaagacggaggcgaaccacgacggctgactacccactcgggaagcgaaacgccgcttgcttttacagatgccggacatgtcttgttttctgcgggcatcatgccgtctgccgaggctgttgtctttccctctaacgggcagttcaaccaggtctatcgagtatcagtggagggagggcgcccgacgatgatttcgtccatgcctatggagtgcatctccatcaataaggagggagcgatgttgtatcaagataagaaaggttacgaggactactggcgtaaacatcacgtatcgcccattgcccgtgacatctggatgtatactccgggaaaagaaccgcagtaccgccagctgaccactttcggaggagaagaccgtgaaccggtttgggctcctgatggaaaaacattctactatctgagtgaggaaaacggctctttcaatatctaccgacgtactcccggagatgcgaaggccgtgcagttgacgcactataccaaaaatccggtacgctatctcagtgccgctacggacggaaggttgtgctatggatttgatggtgagatttacaccctgcttcccggtggagaagcgcaaaaggtgaacatcagcattgtttccgacagaaacgacaaggatattatccgccagattaagagtagcggtgccacggaaatggcagtgtctccggatggtaaggaagtggctttcgttttgcgcggcgatgtctacgtcacttcagtggaatataagactacgaagcagataacgaatacttcttgtcaggaacgtaccgtagactttgcccccgatgggcggacactggtttatgcttccgagcgtggcgggctttggcaactttacacttcgacgattgtgcgtaaggatgaaaagctgtttacctatgccacagcgctgaaggaagaacgcttgataaactcggatgccgcttctttccaaccccaatacagccctgacggtaaagagattgcctttctcgaaaaccgcagcaccatccgtgtcatcaatttgaagacaaaggatgtgcgtaccgttatggatggcaagtatcaatactcttattcggacggtgaccagtggtttcagtggagtccggacagcaaatggattctttcggactatatcggtgtaggtggatggaacaacaaagatgttgtgctgctgaatgccgatggcaagggtgaaatggtgaacctgaccgagagcggatacaacgatggcaatgccaaatgggtattgggtggaaaagccatgatttggaccagtgaccgtgcggggtatcgcagccacggcagttggggagccgaagacgatacttatatcatgttctttgatgctgaagcatacgaccgttttttgatgaacaaggaagaaaccgctttactcgaggaagcggagaaggcggagaaggaaaaagccgggaagaaagacgaaaaggatgccaagaagaaaaaaggggatgccgacaaagataaggagaaaaaggtagagccgttaaagttcgacctcgcaaaccgctttgaccgtattgtacgcctgaccgtcaactcctcgcatatggcagatgccatgctttctgctaaaggggataaactctattatctttctgttttcgaggatgggtacgatctttgggaacacaatctgaaagagaatgttacaaaagttcttttgaagaaagtaggtgcaggcgctttgcagcctgacaaggaagggaagaatatcttcctttgtgcccgcgacggaatgaagaagatagagattgaaggcagcaagatttctccaattgaatttgaggctttcttcgattaccgcccttatggtgagcgtgaatatatcttcgaccacatctggcagcaggtaaatgataagttctatgtggcagacttgcaaggtacggactggaatggatacaaagaaacttataagcgcttcttgccgtatatcaacaataactacgattttgcggaaatgctgagtgagatgctgggtgaattgaacggttctcatacgggagcgcgttattatgcttcgggcgcagcacttcctacggctgctttgggagtgttctatgatgaagcttatgcgggcgatggactgaagattaaagaaattatagctcagagtccattgacgaagaaaaagacggatgtcaagcctggctgtattatcgagaaagtggatggtgttgccattaaggctggcgctgattatttcccgttactcgaaggtaaggcaggccgcaaggtgattctctcggtctatgatcctgttaccggaaagcggtttgaagaaaccttgaagcccatatcttacggtgcccagaatgagctgttgtataagcgctgggtggaaaactgccgcaagaaggtggatgaatattctggcggacgcattgcttatattcacatcaaaggtatggatagtccgagcttccgtaagatttactccgatttgttgagcgaaagcagtcgtaagaaagaggctgttgtggtggatacccgccataacggaggcgggtggctgcacgaacaagtagcgacgttacttagcggcaaggagtatgaacgctttgtgccgcgtggccagtacatcggcagcgatccttttgacagatggctgaaaccttcgtgtatgctggtttgcgaggataattacagcaatgcccacggtactcctttcgtatataagacgttgagaataggcaagctggtaggtgctcccgtggcaggaaccatgactgctgtctggtgggaaagccagatcgatccaagtattgtattcggtattccgcaggtaggctgcatggatatgcagggcaactatctggagaaccgcacgttgcagcctgatatcctggtctataatgaaccggaagctgttttgaagggagaagatgcacagctgaaagcggcggtggaccacttgctgaaggggttgccgcaaaagaaatagatggattggactttataaacaagaggctgaattcaagattgaattcagcctcttgtttataaagtcgatggggtgtcttatttattttacagttacttctgacagttttaaccaaccagaattagtgaaggttcccttggcagagatatccagccccttaacattgcttccattgcctttggttgtatcgactaaagctactgcccaggtataggttcctttttttaccccgtgaagtttgggagtgaactcataggaagtgggatagccttttatccagacggataaatcagtattgttgtccagataagagtagactacttgattgtcttggttcaataatgcgaaagctactttatacttttggttccattgtggtatattggttgggcaatatccccagcctaagttgttccagcgatgtactatctttattcttgaaccactcttcatttctttgggaactacaatggaatcgggatataaacgataacctccttcggagatgaaacgctcaaccaaaggataggcatcacggaaccaactcatggtttcgtctcctacacggaaatccatcatgttgacatgagcttcctgaccgtcttcaaattctccgatacgcacatctttggctgttttgtaaccgctcgggtcattgtgataagggtgcttgctcacaatccatccaccttccagtagaaccgggcgtttcataatccaaggtttcacatagtttcgctcccactggccgtaatactctctcattccgaaagcatcatgacgtaaggaaaagcctttctcgcaagcgctgtccaacaagcgtttactatcgggatcaaaattctcctcacctgcccagtctttgcctgcacccatccaacgatggtagttgataactaaaggtactttggtgaagtgtttgacgtagaggtctgtaatccaattgaacacagcttcccggttcttggggtcaatgtacttcatagtgtgtgcctcaccccatttgccaagaccgtagccgtctataaattccaccaggtcagggtcattgtatttttgggcaaatgcttctatgaactttgcatatttctcctggaagatagggtcatcaggatagggagagcgttttccattgtctgtatagtatttggctcctgcatcgaatacataggccggagtggcttcattttttcggtcgcggctgtcgacaactacacggaaagagagacgcatacctctgtcgagtgccccttgaattacttttttcaacttttcgttggtatcccagccgtagactccttcggcgggattgaaggtactccaatgcgtacggatatagagtgtgcgtgcataatcggagattttcacggttgttcctttttccggtacatagatatggtcgtatttcttccagaagtcatcgctgacattctcatttgcataaacaacccaaccacttaaagggtttccctgcatggtttttctgtctggccagatttttatataatcagcttccgtatctacagccatcttgtatatctggcatcctgctgcaagaaacgcaccgacaccgtaaacttctgtcatgtcacgcgtcactttacgggggtcggcaccgataggctgtacccagccaagtttaccgcttgcatctacagcatcggtcagtgccttccagccttttataatgactggcatgaaatcgtcttcattcaagagtcccgcatttacgccataggccaacgcatatacaaagaaaccggtggaactggtttcgggagaaggataagaagccggatccagaaggctggcatgccaataaccgtcttcgttctgcaatccggcgatacgtgtgcataaccggataaacagttcttcgtaataagcgcgttccatcaagcctttgggcaactcctgcaatacttctgccagaccggccagtacccaggcatttccacgtccccagaacacctttttgccattggcttcttttttaccgaaataatgccaatcgcggtagaaaaggttctcttccttatcgaataggtattcgtaggtagcccggtattcattgtccatgaattggaggtatttccggttgttggtttcacggtatagcttggcataaaccgggggggccataaacaaggcatcacaccaggtccagcgttctagggttttgttgtcaccatactccagtttgaatgtaccgttggatggatggttgacaatccattccgtacgtgccagggtaggagccagtatttcctcttttttatatttacggtataagtcaatgaatgattgggaaacggttatatcgtctgcatggtacaaccgctgatggggttgccagcagtttcgtcttcctattttatagagccattgatagtaggtgctgtcattgtactcctcttctgccagtttagcccaatctaccatacctacataaagtgctccattggtccaatccaggtcgtggtgttcgtgggcagtgttaggattggaaatttgccagtctgccacttgcttcattttctcttttacttcctttttgctgaatggcacttgtgccatgattgccatactgataaacagaaaggctgctgctgttaattgtctgtgtatcttcatgattgtttattgataaaattaagggaattgcctttgttctcaatggacgcggacaattccctttatgagaatcttgaaaactatctttttacctttattcgtgttttattttgtctttgtgctgttaatatccctcgttttgcgggaattctgcacccgtatttgaatcgattatgctctgaggaatcggccataatgtgtggtaatcacgcataacgggccccgattctgtattgtatttgcgggtacgctccaataatttgccggtacggcataaggtaaagcggcgtgattcttcacctaccaactcgcggatacgttcgtccagcaagaagtccatggtcatttcactgtccgtaatttcaggagcatgcgcgcgacggcgtacaacattgattgcttcgcgggcacctgaaatatcgttcaaccccaaccttgcttcgcagagtaagagataagtctcggacaaacggaacttcatgcggtcacggtaggaaccggtcaaagaaaggttttcggaacggccatagaagaattttgtcagagccggataaagacggaaggtggtaaaccatgtttcgtctgtaatcgtggcttttttaccataaaggtcgggcatgttctcgttgttgtaataccagttacgtttgatgttgtattcggaattacgaatgtcttcttcatcaaagaaaccggtatcttctccaatccaccatttcattggtaccaattgcgacaagccgcggccacccagtgagtctgccaaaacaaaaccggtaatttcgaagtatttgggttcccaggcacggcgtgtccagtcatcggaatttgtaccgccaccagtagtgttatattcaaactgcatgacccaaatgctttccatattgccggatgtgcgattttgattgttttcaacgaataggtcggagaacacatcgccgtttgcttttgccttttcaccgaagcggtcttccatcaagtggaaatatccgctgttgatgacattctctgcggcagtttcagcctttgcataatcaccctgcatcaagtaaacctcacttagtaagtgttctgccgcccatttggtcagcttgccgacttttacggcatcagggtcagtaggcaggttctcgacagcaaactgaaggtcttctaccatgtgggcaataacctcttccttcggtgtacgggtaaaatcgattctgaactgatcttgaatcttgtctacataaggaacgtctccatacagataaaccaatgtacggtatgcataggcgcggaaaaaacgtgattctgcctgatagagcgccttgtctgtgctattatcccagttcgtgtttatttccgagtatttcaacatctcattggctcctgcaatcagactataagcccagttccagtaggagcctacaataccggtatttggagttaatgtcaagaaaccgaacggttggatagaaccgtctttggtacccatggtagcaaggtcagtggcaatctgcaatgcttcgtaagggcaagcggcattgtgcatgaaggcaccgttttcaccccaagtgttgtattcagagcgtgcttcggcataaagtccggtagaacctacttcgaaaccataggaacttgtatatgtgttgtccggagctagttcacttttcagtttctcatccagaaagtcagagcaaccggtagcagacagagctactaacagagctagagttgcttttgatatataatttttcattgtatatatatttaagtaagtttagaatgataagttcagtccaagtacgtaggaacgtgcagtcgggtaagaggcaaaccaactgttgtcatagttcaatacgctgcgtatgtcacagaatgtataaggattctccacactgatattgactcccaaaccgctcagtcccaatttctttacaaaattcttttcaaaattgtatcctaaagtgatattctttatttggatgtatgtaaagtctttgtaatagctgtgtccgtcgaagttgttatatgctggagaagcatatttggaattggtgtgttccggtgtccagtaatcggcattatgcagatagttgtataagttgtaactccaacttccgatattggcttcgttcaactcacgtgtaactttgaaggttccattcagtaggaatgacaagtaaaagttcttgtaagtcaatgtattgctcatagacatgaggaagcttggattctttgaaccgatgataactttgtcattggagtcaatataaccgtttccgtctgcatctttcactttggcagaacctggtttggcacctttttggatctctttttctgtaccgtctgctgcggtataggtgaatttgtcaccttcctgccagatgccgtcgacgtcatagtcgtagtaaactcgcaagggtttgccgatgaaccatttattggtgatatcatcttttttgtcaccacgtaggtctacaatcttgtcacggttcagtgaaaagatgattccggtgctccattcgaagtccttattacgtatgttgacggtgttcaaggtaaattcaacacctttattgcgtgttttacccacattatcccaaatggttttatagccgttcatgataggaacagtacgtttcatcagcaagtcttttgtgttggcgacatacatttcaatgttaccgttgatacggccgttgaagaatgaatagtcgataccgacgttgaatgtttgggttgtttcccactttagattcggatttccgacaccgtcgttggccagataagcaccgttgacacctgctccaccgtcaccccagatatagtttgtgaggtgcagacggtccaatgtctgataggggttgatggcttggttaccgttagaaccataagatacgcggagcttcaattggtccagccagttttgtgcattttccataaaactttcggaagcaatgttccatgcagcagccactgacgggaagaatgcatacttgttgtttgcaccgaaggcagaataaccgtcggaacgtccggtcagggtcaacatatattttcctgcatatgaataattcaagcgaagcatataagacagcatcgaggtttctgataaaccagaacttacggttttattcttttcacctgcattgatgttatgataactggaatcatcgtttacaaaactttcggcacttgacttggaagtctttttctgagtttgttgtacactgaacaaacctgtagcgtcgaaacggtgcttgccaaattcacgattatatttgagcagattttcccaagtgtaatcccagtagtgttcattgttgatgctggcttttccgctggctgttctaccgtctttggtgtcacggccatagtatgtgccggtaaagtcgctacgatagttgtaaccaaaggttgtacgggctgaaagaccttttaccggcaacagaatgtcagcataggtgttgatgaagaagttacgtcttgtttgatcttggtcggcattgacattggccatcgggttaataatcagggattggtccataggttcttcataatacttgccgttttcatctttgtagataccataaggactttgctttacagcatgttcaatattcggggttataccaccgccatctctttgaataaattgggtctgtataccaatagtcagccatttgtttaatacttgtgtgacattcaaattgatattgtaacgtttcatagcagaattgtagactacaccttcttgatccagataggaaactgcccccatataagtggtgctttcagtacctccggaaatgcctacttgatgttccatggtaaatgcattgcggaaaatatagtcctgccagtcgtttgtaacgcctttcttgtaatttataagttcgctggcactcagaatattctcaggagccaattggtctccgctccatccatctttcaggcgtgcaatgtcttgtttaaatgtgatgtattcgtctggagtcatcacatcaatagtctgttggggttgcgacattctgaactgccctttgtatgtaacttggggtgcacctttcttgcctttctttgattgaatcaagataacaccattggaaccgcgtgagccgtagatagctgctgcggaagcatctttcaagacactaaggctttcgatgatgtttgggtcaatatcactcaaagaaccattgtaaggaataccgtccaatacaataagcggtgcattgtcagcacttaatgagttttcaccacgtacacggagggtttggtctgcccccggtttcgcatcaccagtagttacgcttaagcccggaatttgtcctgcgagacggtccatcaagttactgctatttatcatgttcagtttcttctggtctactgataccagacctccagtcaggtcggacttacgctgtgtaccatagccgattaccacgacttctgccagtgttttactgtcttccactaactttacggtactgtttctaccagcttttacagtctgtgtcacataaccgatataggagattttgagattactccctgccggtgcgttgattgtgtattttccgtcaagatctgtaatgacaccagtactggttccttccaccatgacatttgctccgataatcggttcaccactttcgtcaattactgtaccagagatgttctgtggttgtccggatattgccttgttattctttccggtatataaaataatgtgtgttgcgtcgatttcaaatttaacattggtccctttcaataaggctgctattgtcttattaatagtttcattcttaacattcaagctgactttctgtttgatgtctatttgctgcgattcatagaagaaagtgtatccactttgcttttccacttttggcatagcctctgataatgggatatttgtgaacttcagtgtgatcagtttctctttcttttgtgcagaaaccggggcacatagaagtaccagtataagaatgatgagttgttttcttatatccataattgtcttaaatttaaagattaatgtaggtgtttacttttcgttaattattaaataatgtgcatttctcatttgtttgtttggcataagtttttaattttgttactgtttcattttactttttgttttgtgtctgcaaacgaaattgtcaactcattctcttcgttaaaggtatatttcataggttggatgcgtgccatgatgcggagtatttcgtccagcggttcgctacgcaacgtaaacgtatagaaatatttattggataatgtaggatccacgtctatctttacccgataccatttagaaagcagtttgcaaatgtctcccaatgaacggtttctgaatacgagttgtgtatttgcccacgaagaggcaaaatgtacatcatctttttctaccttaagtgtaagggttttccgattaaaagtagctgtttcgcccggtttgaggaaacggttctctgtctcggtttccaaagagacggacccttctaccaaactcaccaatgtattttccgaaccggggaatgcatcgacattgaatttggttccgtgaactacgatacgcataccttctgtctgcacaataaaaggtttgtcagcatcgtgtgctacatcgaagtaagcttcaccagttacatttacgatacgctcatccttattcatttgtgatccgtattgcaaagaggtctctgtatgcatccatacttcgcttccgtcaggaaggagaaccttagacttacccgacaaattagagtataactgcggcatggcttcaggctgtccgttaaggaatcctatgtagaatgagcaaccgatggcaacagctatacatgcagctactgcgtagcggtatatctgtttcagttcgaagcgtttctttgcaggtttttcagtctgcttaggctcgctggcgtgcatacggttgacaagttcattccaataatattcggtattgggcgtgtagttttctacatttgcctgaattttttcccataacagttgcaattccttgaataacgcttcgttgttactgctgcgtaaccaagtctccaattgccgctcttcgtctgcggaaatttcctgtttcaacttaggaatgattaaattccaaggaacactttttttcatgatcatgatgtttttataggccttcacttatatgacacatcacttgggtttaacccttattccaattccaattatttttttaataaatttcgaggaacaaataatattagtatctttgccgctcaagaagcccttatctaatataacttcgatatgcctgcagaagatgatatcctattgttacagttaatcaaacaagatgacgagaaggctttcaagcaccttttcgatacttattttgtttcactctgccgcttcatgtccctttatctgagagacaagcaggagatagaagaactggccctttccatctttatgaatttgtgggagggtagggccgacttgactcttaaaatctcattcaaggcttatcttttccagtctgcacgcaatcgttgcctgaatgctttacgcgatgaaaaggatacggttcccatcgagggaggagaagaatatggatatgctcttgcggctgatacttcggtggagatggaagaactgaaccgattgattgaagaagctgtttgttcccttccggacaaatgtgggcaggtttatcgcaaaagtagggaggaagggaagactaatcaagaaattgccggggaaatggggatttctgtcaagacggtggaggcccaaataaccaaagccttgaagcatatcaagaaatttttaggagaacagtatacttatttgttctaaaatagaaattgcaggccatctgtcttttagaatgatgaaaggaggatggcctgcaatataaaaagaagattaatctataaccgtgaattttactttctggtctttcactattacataatattctccattttcaaggaaatgttcaccattggcatttacaaaagcaagatcacgcatcgggtctatttcaaagcggaatatatgtgtttcacctgctttaattagttgcttttcgaagtgcttcaattctttgcatggacgggtaatcgtgctaaatgggtctgagataaaccaatgcaccacttctgcaccgtcacgtttgcctacattggtgactgggatttccattaccaacttttcaccgcgtctgatggtttctttgggcaagttgatattaccataattaaaggtggtataactcaagccgtatccgaattcatacagtggggaagaggagatgtcttgatatttgccactttgtggacgggctgttttgcgctgattgtaatagattggaatctgtccggtggaacgtggaaaagtaatggaaagcttgcccgaaggatttacccggccggacaagacacctgccaatggtttaccgccaggtactcccggttgccacatttcaacgatggcgtcacagagaggttccactttagagagtcccaaaggacgtccgttagccagtaccagaacaatcggtttgcctgctttcttcatttcagcaatgaattcctcttgaatggcaggcagttctatgatggaacgcgatgcgttttcgccactccactttttcttttcacccatgcagagtagaatgacatctgctttccgggctacagccagtgcctcactgaatttggaagtgtcgttaccgtcgaaaccacaaccctcggtataaatcagttcagccttgcctgcaaattctgcatccagcgcctttttgatggggaggacatcttctgcatgtccatgtccataccatgaccccaggagctcggcacagttttctaccagaggccccatgacggcgatagttggcttgttcccgtttgccagagggagtaccttgttttcattcttcagtagaacaatggtctcctctgccagtttctctgcaatagccaggctttgtggaaggaggaagcgctctttttctgtagatgtcggggtgtagggattgtcaaaaagtccaaggcggaatttgatacggagcacgcgtttcactgcatcgtccaccagttgcatgcttattttaccttcttccaccagctttgccatatgcttgtcatagcaatgccccatcatgtccatttccaggccggcgttgaaagccagacgggcagcttctttgcggtcggcagcatggccctggtcaataagttgcggtactgcagaccagtctgaaacaacaaagccgtcgtgtttccaacggttcttcagaatttctgtcatcgtgtaatggttggcgcttccgggagtgccgctgatgtcattgaatgaactcattaaagtagcggcaccggcttttacgccagcttcatagggaggaatataggtgtcccacagagtctgattggagatttccgtataaacatagtcacgtcctgcttcagaagcgccgtatccgatataatgtttaaggcaggcggctactcgcttgctgtcggacatgtcttcaccttggtatcctttgatagatgcgacaccgaatacagcattggtataagggtcttcgccatagccctctgcaacgcgtccccagcgtccgtctcttgccacgtcaatcataggggaaaaagtccagtctaccccggacatgcgtgcttcctgggcggcaacggcacatgcttgttctaccaattggggattccaagaacatgcttgtcccaaagagatgggataaatggtacggaacccgtggatgacgtcgtatccgaaaaggatggggatacccagacgtgattcttccattgcttttctctgagcctcgttacgcagattggcatcttcatcaaaataaatgagggagcctaatgtggcaggaattttttttacttcctcaccacgattgttctcgttgttattccgccccaaagtgtactggttgagttgttgtaccttttcttccagtgtcattctgctgaccaggtcattcacacgctcctcaatgggagctttggcatctttgtagatgggttgctttttgtttgcagccattgctccggccaggcaaccacttaaaaggaggcaactgataaatgttagtttcttcatgatatatataattatgctattctcattaaataagacacgtttttcggaatctgctcctacacaaaggtcgtttttttaaggaatataaacaagtacatgcaagggcttatttgaaaataggcttatcggttagtgtcatggaagcttgttcgttattttttagttcaaataccactatttcattattacctgctatcagagcaccagcaggtatctccagggtcctttctgtattttcttcccagtaggcacccaagtattgcccgtttatccagacttctcccattccccagccagacacgtcaagaaaggtctcttgtgccggattgcttactgtgacaccacctttacggaagcaagggatggaggaggtaccttctttgaaagttattccggccacatcgcattccttaatttccaatggggtcatcttccagccttctaaatctgtctttcccaatgttatgctgccgtagataccttttgaattgtccagaatttcaggaccataggtaatacgtccgatattttcagtatagatactaagtttgtgtatacctatcggtagattggttttcaagcttttactgctatcttttaaatatccttgcagtttgccgtctgcatagaccacagcataatcccgtacgttttcaatagttagtgtgggattctcctcttccacatcaacggttgtctcatagagggcatagccaaaatccatatccagctcattcatgggcagtaaggcatcatcttctacagtttctccataaacttgttccaatggagctgtttgtgacatttttatctcttgtgctgctgccggtccgaccggcagcaacaaaagagcccaaagcaagaataatttcatcatatttcctttatttatttctttaagaatgattcaatgtaggactcgtcaacggtaatttgtggagcgaatttgtcactctttacgtagcggtcaatgctttccagcaattgctgggtggcaggacgttcgttgatgtttttctgggtatctacggccagtaccagtagactgcctttcttcacttttgcttcgaaaccaataccgagcttttcattattgtcgtaatggtctattacttgtatgaaaggccgcagtgctgccggagcatctttcatctcaataaccttggcattttccagaatgtcccaccactgccagtcagtatggtaggaagttatgaaatgctcgaatataggctggtcgtcatgaatcagacagccaatggtcataggaggccatttgaacattatcggattccaaaagtgattgtggaacacggatttacgaccttttactttggaaggtttggggcagagtaccactttcttgccatcggcaaggtgttgttttgctttttcatcgaatactgtggtgtagagcacttcactagtggactgcattaagttgctatgacggggatatacccagatatcccagctgttttttacgtgtgcaacagaaagatggaccgtcagcttctgtggttcagtgatattgttcaatgcataactgaaactgccaagtggaaataccccgttctttccgacagtttgtgttttcagttttccgctcttaagggttttaccgttgctgtcggtgatactccaattgatttttgcgtttttcaatagggtaggtccataattgtatatttccgcttttccttcaaatacctcatcattgtaaagtgcgcgtttgtcgaaacggagcaatgcaacagtcggtgcacagaactcgcgccacttttccggtgtgatgagccctttggtattccagaaaggatcgagaatgcctaccggtgcatatccttgtccggtaaaatcattcagagacagtaattggaaaccgcctttcagataagtgcgcaactgggcttctatgacatccttgtactctatggcggtcaaggctccagaagcacggaagaagtcatgtgcttggtcgagcatgtggtttttgtccagcagttcacggaatatctcgaaattacgcgcttgtacggggccggtgaagttctttatttcctcgaaattgggatagatgcaccgctgtccggattcatgcgagatgatgggcaggcctactcccagttccttgtttttgtcccagtttgtataaggacgtccttcgtagatggccatgtgtcctttggtagtctgatgggtaatgtagaactggtctgatttgacacgtgtgcgggctgtggaaccgctgtatagacggcggttatccaactggcgggccgtggcggtaagctcttctatgaaactgaaatcgccggtaatttcgtttccgttacagtagagaatgaaggaagggtgattcccatattctttcaagataccccgcagctcgcgacggaagaaattccagcgcttctcatcgggttgggcatctttaccccacatcggcatttccacctccagatagacacccagcttgtctgccatacggaacgcagcggcaggaggacaccaggagtggaagcgcatatggttcataccatattcttttaggatacggagtacacgttcccaagaggcatcgtccacgggagcatagccggtcttggggaacactgcgttttcaacggtaccgcgcaggtgtatgggttcgccattaaggatgatatggtcctcaccagcctctacttcgcgcataccgaaagttgtgcttttctcatgcgcataggattggccctctacactggaagtcaacttacagtccaacgtataaagattgggatggaactcattccacaaatggatatccttacccaaaaacatttcttcctcgatataagtaatggaatcggtcactgttactggtacttccttttgtagtctatagtcctttcctgtcacgtggaaggatattttgccgctggcggtatgttctgtacagttgcggacagtcattttgactttgatgcttttgttcttgatgtccggatagacctgcatgtcatctacatagactgggtctacagctaccagcttaatttcgcccaatactccgttccagtttatttgggtaaattcggagtgggcatggtcccatttatgggtatcgtactggtagcggttgtctatacagaaagttatcagttcttttttgcctggatgtagccattgggtcagttcgtggttgtggggaatactgatgtagtctattttactcacttcttctttgcctacatataccgaactgagccagtgtgtacgttcaaaatagaggaaaatgcgtttgcctttccatgccacaggaatttctatttctcgctggtaccatgcggggcccatatattcgtagacacgggtcagcctatccaggtggcggtaaggagatttgtagcctattttatagtcatctgtaattcccggcagaacgatgctttcctgcaggcgatggcagtaacgtacgtccagtgaacctctccggaagtccatgacatctgtctggaatgcccattcaccagacaagtccatttcattcttttcttgggcatgcccgctccagaccatagaggtcaggaggagggcagccatgtagtgttttattttgtgcttcattgttctgttttcttttggttatagtaatcacgcatgatgtaccatgcttttttgcgttgtccctggtcggaaaccagtcctttacggttccattcccctccctggtgtggatggaaacggaagggagaacggaaatcaaaaagaatccacggcgatgttccgcgcaggttggggatatgcttgaacatttccagattgtccttgtagagttgtgcctgataatcctcactccaagaactcttgacttccgcgtcgccatgtttgccatagagcgcttcgcctccgaactcggaaatgaaaagaggtttgccgggagctacattccagacagcctggtccggagccagtggccagtcatgataccatcccatatatttgttgatggctaccatgtccaggatgttgataatggagtcattcatctcaaagttccggctttcgcggttgaagcgtaccaaatcgaaggcggccgtaatcagacgggttgagtcgatgtccaggcaacattgtttcatgtgtttcagaaattcattgcgcggggcggaagtggctgtttcattggcaatcccccaaaaggcaacggaacaacggtttttgtcgcgcatcaccatctctttaatcattctgcctgctttctcacgggtagcggtatttttgaagtcaatcccttgccagataggtatctcttcccataaaagaaatcccattctttctgctaggcggacagtatattcattttgtggataatgtgccagacgaatcatgttggcacccagctctttggcttcggccaacagcattgttgcgtccgcttcagagaaggcacgcccgcggcgttgcggaatttcctcgtggaagctgatactgcgcaggaagatgggctggtcgttcagatagatatcttcgccttttacataaaggttacggaaaccaatttgctcgttgagccggtcactttccgaagtgatggttacatcatacagctttggagcatccggtgaccaacgttgcagttttttggttttgatagtggcctgggcaattccgttggcatcggtagtcatgttctgtctgatgcccaattcggggatggcgacttgtacgttgatgccaggctttgcttcggataaggttactttggcacgaatcaggttggattgtaccttgtccaactggatgaaatggtctttgatgtagctttgtggaacgcttaccaacattacatcgcgtgtgatgccgccgtaattccaccagtcaaaggacatggcagggatggcatccgtggtgcgggtattgttgactttcaccaccaggaagttgtccttttgctttaccttatctgtgatttccacctggaagggagtgaatccgccttcatgactggctattttctccccgttcagatatattttgctacggtaacttaccgcaccgaaatagagaaacaaacgtttgccgtcagtctttggggtatcgaaagagcgtccgtaccatactgttccttcataaaatttcaactcgggcatttgtgaattgaaatcggcaggtacattcaggaccaaacctccgtcgaaagagtattcataaaattgcttgttgtcttgaggttttctgtttttgtacacctgcatcctttctccttggtcataaaggtctacaatggctccccacttcccattcagtagctggtaatcgcgtccgtaaacattggacaataagtcttgtgcttgtgacttgcctcccagtacagacactgcgagcaaacaagtaatcattaatcttttaattttcataaatcgtatgtatcagttaacgtttaaaaagcctatgaattattctttgtatattttcaatgcgcatccgcctccttgtgccattttgacggtcagtttacgggatgcaggaatgtctgtgacggtcttttggtagtcggaagccaggcggttggcattcactccgtcatgaaacatttccgctttccatctgcctgcaccgaggaaagaaaggtccagtgtcagagtacgtgcatcccaattggttagggagccgacataccagacatctcctttcctgcgcgccattgtaatgtattttccaatttctccgttcatggctattgtttgttcccaaacggtagggatggtagcgatgaattccgtgcattcttcttcacggtcgtaattggtgggactgtcgcacaacatgttcaatggtgattcaaatactacatattcagctaattggcggcaacgggttccctggctcattggggtatccattgaggagtggtaacaccgtttgttggcattgtgcatggcgccttgtgtatagtctaccggtccggccagcatacggataaatggcatggtgacatcgtaggttacctggtcggtatggatgtcactccacttcatctgttccagcccgtgaacggcttcatagttgatgacattgggataagtgcggttcagcccggtaggtttgtacgtgccgtgaaagtctaccatcaacttatatttagcggcagtttcggcagcccggtagtggaagtctaccatttcctggtcatccctatccataaagtcaatcttgaatcctttgatgcccatttcggaatagtgcttgcatacatgttccatgtcgcgggcaaaggcatggtaacctgcccaaaggatgagtcctacattcttttgcctggcataggccgtgagcttttttaaatcaatttccggtacaatttggaaaaggtcagccttgaggttgacagcccagccttcatccagaatcacatactcgatgccatgccgggaggcgaagtcgatatagtgcatgtatgtttcattgtttattccagcttcgaaatccacgcctttgattccccaatggttccaccattcccaggccactttgcccggacgtatccatgagatgtctttcatgcgtgatggagcagccagcttataaaccatatcgttatctgccagctccttgtcatttcttgccacaacaatgatgcgccagggtagtttggctttcggctggcaggaagcaatgtagttttcacgctctgtgactaatatttgcagttggttatgcccgccttgtttttttgttttggggacggcggcaaaagcggaagtgagtgctgttcccccgtttctgttgatgaggaacatgcccggatagctctccacgtcggattcggcaatacaaagtttacggccgttttcctgctctattactacgggggtaaacatcagtctttgggggttcagtccggatagctctatatgtgtataggtgttttcaaaagagttggagaactgggcttctatcggttgtttatcgccatcttttacataaggaacaatcgatttgtagtccttgttgaagttgaaggcggcttcttcgtttgtaactttgaacggtctgtttccggtcgctgcgaaccggtatgccattccttcattgtacattctgaaaatgaggttgaaatgttcccggaaacttaacgtcatttcattatagacatcctttacttcactgcgtttgtagaaaggagagggaatcacctcatttgcctggcgatgactgactctcttaagatgggagccgttaccccagactgtcccattatccagatgtactgataagggagagggggctaccaatgtatgcccttcttccgtcagctcgtaagtaatccggtcacctatatataaggtaacctctaacttgccgtccggtgagtttaggcgatattctttttgtccgaacatgttcgggatgatgaaaagcaatgttgtgagtaagaaaagtgttctcatgtcgttatttattttagcgtttgtttttaatttcatacttgtagacaacatagtcattgattgatggcagagagatttccagccttcctttctttccggttactgctgtcatagctttgccgtgtcccatcagtgggatacatcttactgtgacaccttctggcagccaggtatcgacttctgtagtcccttctggatgattttcacggtacacaatcaagtatcctctatctttctttagagactggaagccggtccaagagcgtcccgatggttcatctcctatgggtaggatagtgccggaatgcatgtcatgctgaaatttcttgtaggcttctgtatgttctcgtaatgtaaatgcttcctcgggtagattggtaccttccatccaggcaagcggctgtcctgctaaagtcgtagcaaacagatattcaaatgaatagttttccggagcgaagacttctcctttatatttatccgtatttctccatttgttcaggaactctatttgcagcttttctgccggaacatatttggaaagcatccagaggttacgcaaagtccagtaaggatagtagttctgccagtcggtataacggttttccagaaagatatttccatattcattgaacatgtggtagcctccgcggcggctggctgtcgcatcaaggttgaaaatcacttcctcgtccgtctcttccagcactttgttgaataagcggtgcaggtttgtttcggcttctttactgggaatggtgagcccgtctatcttgaatattttgatgccgtattcgcgatagaggctgatgagtgcttgcgcatctttctgccaatcggcaaaatcattttgtatgctgggattgaaccaaagaccgatttcaatacctaattccttgccacgctttacgatgggatgcaaaccacgtggatacttttgcggatcgggtttccagtagtctttattgtcccaaatgttcttgaatgaaccgcgggctacaactgaattaggacttttacctatttgccagccatcatcaatctggaaatgggtgattcccagacgggcggcgcgttccagttctttcaaacagaaggattcgtttacttttgagtcctggctacggtctccccaggtgttcatcataatcatctcgtcgcggtcggcccggtaagtacgtatattcttctgatatgaacgaagcgcttgtaggcggctcagttcatcttctccgtatattcccaatacacatccgtatgttttggtccaacggtcgggagtcacgtctttctcggtaatgcccagaccggttactgtaaactttccgaaatcagtcagaaaatcctttccttgataggctaattgtaccgaagagcagggagcctcttttaaaaagaagatgccacagttgtcctcgccattaaaggcaaacagcagattgccgcgatatcccagtttgcggtaggaaataatctctttctcgaaaaccaggttgttgtgccagtcggtcacatcggaaaattccacgctgcgagcgtgccaatgttgtccttggaaatggaactggtctagtacagcggttacttctttagatttcatgtcttcggcgaattcaatattcttccggtcggctgcactaacttctctgcctccgaaaatactgtttactgttcctcttaaataggtgtcgcaggctatggctggacaatcatcataaatacgatatacccgttttatatctagcttctccaggctgaaagaaacttctactttcagataagcgggaaatattttagtctcttttacgggaactactttgagtgaaccgtttgatggttgcggcaaatttttcgttactctgaaatctggagtaaggctgtggttcttccatgattttccattactcttgtcggtcaggcggtaagttatgatatttcccccgttccacaaaaaggtacgttcgaccaaattgtttccgatggttaaagtgtcatttctcagaaggccgtagcaggtatcttgtgcgtgtaacgaatatcctccgaaaaggacaaataataatgttagaatatttttcatgatatgcgtgttttattaatacttaaattgtagtatcaacgtgtttcttacttcttgtttttttcaatgacaaatatacgaggcttttttaataatttttgttcattgaacttctgattatcgggaatcccttctttttttcctactccctctttcatcagtgctttcaattccggtaggtgtttctgatatactcctctcggagtggtgttgtactttttacataaggaagctgccatcccgacaacttcgcccatcattccggtggtacgcattacgcggacagtgcccagtgccacatgggtaacactgatattgcggcccgccataaaaagattctcgatatttctggaatataggcagcgatagggcactgcataaggatatatatggatgtgtttggttgctgctttgaaaggcgcatcaggaaagtgtgatgcattgagcgaatccgggaaatgcaggtcgatgctccaggttgtgacgaaggaggcatcttcgtgatagacatttttatctatatcatcttgctttagaatataatcgcccaacaatcggcgtgactcgcgttttccggcaatataggctacccagtccaatgcgcggttcttatatttcttgttgtcctttaattcatttttcagaaaactccaattagaatagatgaccattaagccataatcacgtatacgttcgaagtcgtcgatttgattgaagttcatgccggtttcccatttccattcacccatcgtcactttttcgcaatttttttcattgaattgcagaccgtacgagaaaatagggaaacgggtaggtttacctttgtctgcagagtaccattgtacggatgaacccattgtcattttgtccggttgaatcggtgccagctcttctccgtattcggcacgggattcgcgtcccatgttgtagtctgcaccggccagatacccgatggtgccgtctccggtacagtcggagaacaatggtgctttcagttccacttcttttccattctctatatgcttgatgatgacagattctattctgttgccatcgggctttacagatatggcccggtagttggcataaagggtgatattcttttcattggcgataaaaagctccttcttttcatcttcatagtttgcggcaggtttggcatttccttctttagaatgtccgaattctcttatcatacgtcccagtccggaattggggcctactccgatattgccccctaagtgaaccctgacttcagagctattattgccgccaagtactgggcggtcgttgattaatgccactttgcatcccaatctggaagcggttgcggctgcacacataccggctataccgccaccagttacaatcacatcataggagtattgctccggttcggctggaatatccagcatctttttacggaaatctgtcagttgtgtggcctgagcgggagggagctgccctttttccgtagtaaaataaatggcatcgcaacggccattaaaaccggtcaaatcttttaatgtcagactagagcttcctgcttttacagagactgttccggcaggttgccacatccattgtttgccctcgtcccctaaaaccactggcaactttttattgtcgacggctaaagtgaattttcccggtcctttaccatcataccagggagaagtccagttgtaggtgcgtacaaatacataatatgtaccgtcttcaggaaaagaaatggtagtggaggcatcctcaaccgggactcccattccatgagccatcagataaggtgaacccatgaggtccatgaattgctggtctactacccatcccccctttctgtcaaagctttctgcttccaccaataacttgctgggtacttgtttcctattgcctgagggcttgttggcttgttgaaatagtagaacctgcttgttgggttttatttcgaaagtaattttggtccctttgaacaattcctttagggtggcttcaagtggggcattggataccagcaaatcttttcgggtatcaagattgggcagtttgtcggtatagaatacattgtagccgctagtcttttcaatttgaggtataatctgcttgatagtctgctggtttatagataaactgatttgggcaaagctatttccccagaagaacagcactcccagtaatattgaaaatcgcgtaattattttattttgtctcatgtcttatcatatcaggttaattacttttttactttaaggaaggtacgacaaaggctaaccctaattaagctattagagtatattaaaactatatttctcgaatgtttaaattttattgtcgctgccagaagtaggtcattgtgtctgaggtaaaaatcctataaaatctattccatatactttttgttttagttaatataaagggctattttacactactaatatattataatcgtattgtcagattctatcttgtaattaatgccgccagcttggctgatgtattccaatacattgtttaaactgccgtttttaatgatgccatgataagtatattgtttggctttctcgtttttgaatataaatttgcaattatacattcgtgtaagcatggtacaaatttcttcaaaagattcaccgtagaacgctagttcattgcttctccatagcaaataacttgcattaggatgaagctcgcttttttcgaactgtccattggtcaggttgcaaacgagcctttcgtttggcttcatatatgcctcgtgtctgccgtcgtctactttaacctttccacttatcaggcttacagctactgatttatcgtctttatgtgcacgtatattgaagcttgtacctaacgcttgtacattgatgccatttgctttcacgatgaaaggcttttccttgtcctttgcaacttcaaaataggcctctccttccagggagaccatacgtgttttcttgttgtaagtgttgtcatatacaattcttgaatcagaattgatgtagacctttgtgccgtcagccaaaatgatgtcggccttctgcccgttggatacggacatggtgacttctgtattggcgtcatcggccggtcgtttgactcctgcataataggctccgcttcccactgccaatatgatgcaggcaactgcagcatagcgcccaatctgacgcaggaaacggttccttgttttcaggaccttcgtttccgtggtggaacttgcgtctatctggcttaaaagttcggtgaacatttcattttgtacggctttgtccatcgtgtccggagccagtgcccagcattgctgatagtatgcggaaaatttctgttgaaaatccggtcgcttaatccatgatttcaactgtacatcttcttcagggctggtcagtcctcgaaagaaacgatccaaaagttcaatatgactgtcttttttatccatgttctgtagtatatatctgtatgcctgccaaaacactcacggattttcgtgctttaacaattatttagaaagtagaaggagaggaaaagcatgatgaatttgcgtaattcttctttcagtagtttcatagtacggtagaaatgagcctctacggcacgttccgtcaaatctagctgtgaggcgatttccttgttggacagttttcctgctcttttcagctgaaagacttcccgtgaaacttctggcaggctttgcagaagttgctctatctgtttttcaatgatggagacgtccatatccatcgtatcttcctcgatagcctctgcttctgttttcagcttgttttctacaaatttgttgtgtaataatcttcgttcggtttctttgtataccatgttgcgtgcgatggtgcatagatatgccggaaaacttttctcggtatccagattactgcgtttttcccatatcgtcatgaagctgctttgggtgatgtctttggctaatgatttgtcatatacgagaaggacgatggtgttgtacagcctggcactgtatttttcgtacaatgcttcaaaggcaaatttattgccttctctcaacttggctaccaataaagtatcattttctttctgcatattgattcatcttacatttacgcattctgaatggtagtgtctttgtatagtaaagtactattccacatagactctgaaagaatgaactacaaaggtggtgtttttattatttatttaaaagttttttgctgaaaatatactttgtgtgattattattcaattctatattccacgatgaaggaggatggcagaaatagtcatttgcagtataagaagtggtaaactgatggatgggtttaggggcttattgtcaatactgtcttatcctgctggagtgaatgaagtgatataggcttatctgatgtccgccccccacattagtttattgcgaagggtatcaaagaaaatatggttgaaccgtttcactacctttatgctatagtcggcacgtgagatgtgcaactgggtcgtttctttgcaggactcgctacggccgtcgatggcaaccaagaagttgtggctgcggctttccacatcaagtgtaatttcccagtcgtcacaaatgacgatgggacggacgttgaggctgtgtggagccaccggggtgatggcaatggttttactgtggggcacaatgaccggaccgccgacgctgagtgagtaggcggtggaaccggtaggtgtggagataactaggccgtcagcttgataagtggtcaacggagcgccattgatggcggcgtggatactgatcatggacgaactgtcccgcttcaatacggctatctcattgagggcgtaaggggattgcatcaagcgttcatcgtcgcacctcagttgcagtacactacgctcttccaccttatagtggttgttgtagatttcatcgaaggtctcttccatctcttccggtgagatgtcggcaaggaaacccagccggccggtattgatgcccaatatggggatattcttctttcctacacggctggctgctttcaggaaagtgccgtcgccaccgatgctgataaccatgtcggcacagaaatcatctccgtcaaacaattcggcgtcaggtatgtttaaatgtaaatcggtagtcaggaagtgatggaattcccggcagatgcagagctgtgcattatgctgtccgagcaaccggaagaggttttctgcatgcgaggatttctttgcttggtaggtatttccgaatatggcaaatttcataatcaattctgttggattgaagtgcaaagatgctatttttttctcagaatgctgccaatatataactattatttgtacttttgtcccaaactataaaccgaattatgactagattaagcgttaatataaataaggtggcaacgctgcgcaatgcccgtggaggtgatgtcccgaatgttgtgaaggtagcgctggattgtgaagactttggtgctgatggcattacggtgcatccccgtcctgacgagaggcatatccgccgtaaggatgtatatgatttgcggccgttgctgcggacagagttcaatatcgagggttatcctgcacccgaatttatggatttggtcttgaaggtgaaaccgcatcaggtaactttggtgcccgacagccctacacagctgacttcaaacgcaggctgggataccaagacccattttgacttcttgaacgaagtgttggatgagttcaacaatgctggtatccgtacttccgtatttgtttccaccgatgccgaaatgatagaatatgctgccaaagccggtgccgaccgcgtggagctatatacggaaccttatgctacggcttatcccaaaggacgggaagcggctgtagctccttttgtcgaggctgccaaggtggcccgcagcttaggcctggggctgaatgccggacatgacctgagcctggtgaatctgaattatttttatcaaaacattccgtggctggacgaggtgtccatcgggcatgcgctgattagtgacgcgctgtatctgggattggagcgtacggtcaaggaatataaaaactgtcttcgctgatgaatgtaatgttgttattggcccaagtggctccggcactgactgactctattgcaggtgccaatccggtactgacacaagtaaacgcttccgacgaaatgaatttatggagcatggccgtcaagggcggctggattatggttgtcctgggcttgatgtccggactttgcttttacatcttgttcgaacgcaactatgttatccggaaggcggggaaagaagacccccagttcatggataagataaaggattatatcctgggcggggaactgaaagccgccattgcttattgtcgcagtgtggatactccctcggcccgtatgattgaaaaaggcatcagccgtctgggacgtccggtgaacgatgtgcaggctgccatcgagaatgtcggcaattttgaggttgccaagctggagaaaggcatgacgattatggctaccatctccggcggtgcgcctatgcttgggttcctcggtacggtgaccggtatggtgcgcgcgttctggcagatggcgaatgccggaaacaatattgacataacgatgctttccggaggtatctacgaggcaatgattaccacggtgggcggcttgatagtcggcatcatagccatgtttgcctataactatctggtgacgctgatagacggcgtggtcaacaagatggaagccaagacaatggcattcatggacttgctgaacgaaccggcgaaatgattgattaaagaattaggaattaaaaaataaaggcgtgttaaaacgtagagttaaaatatcacccaacttcagcatggcgtccatgacggacctgattttcctgctgctgattttctttatgataacatctaccatggtatcgcccaacgctatcaaggtattgttgccgcagggaaaacaacagacttccgcaaagcctttgacgagagtcatcatagataagaatctgaattattatgctgctttcggaaatgacaaggaacagacgttgacgcttgaagagctgactcctttcctgcaatcgtgtgcagcgaaagagcctgaaatgtatatagctttgtatgctgacgaaacagtgccttaccgggaaatcgtgaaggtgctgaacattgcaaacgagaataaattcaagatggtgctggctacacgaccaccggaaaactaaatcgtacattgtacatggctaaattgtaaatgcaatggtgaatcagaagaagaaaggaaaatatataggtatggcaggtgcacttgtggtgcatgttgccattattgcccttctgatactggtaggattcacactgccggaaccctcggaagaaggcggtgtacccgttatgctgggagaggtgcccgatgcactgggcgctgccgacccttctttagtaaaggtggatgtcatgccggaggaaaccgctcctcaggtgcaggaaacggtggagcaggacatcattacgcaggaaactgaagaaaccgttgccataaagcccaaagccgaacccaagaaaaaggaggaggtgaagaaaccggaaaagacggaagccgaaaaagcggaagaggcccgcaaactggcagcggcaaaagccgaacgggaacgtaaggaagccgaggaagctgcccgtaaacgggtagctggcgcttttggcaaaggtgcccaaatgggtagtaaaggcgatacggaaggcgaaggtattcaaggaagtcctacgggaaatgctccgtccggagccacttcgggtacgggaggctacggctcgtttaatttgggcggacgttctcttggtgagggcggattgccgcggccggtatataatgtgcaggatgaaggtagggttgtggtgaccatcacagtgaaccctgccggacatgtgatagcaaccagcatcaaccgccagaccaataccgtcaatcccgcattgcggaaagcggcagaggatgctgccaagaaagcccgtttcaatgcggtaagcggcttgaacaatcagacgggaacaataacgtattattttaatctaaaataagaggaggaacaattatgggtacagtttatgttttttttgccgacggatttgaagaaatagaagcttttacttctgtggatgtgatgagacgcgccggactgaacgtagaaatggtgacggtaacccctgatgaaatagtgacgggagcacacgatgttccggtcttgtgcgataagaatgtagtgaactgcgacttctttgatgcagagcttgtattattgcctggcggtatgccgggtgcgtccactttggagaagtgtggagaactgcgtaatctggtactgcgttttgcccaagagcagaaaccgattgctgctatttgtgcggctcctatggtattgggtaagctgggattgctgaaaggcaagaaggctacttgctatcccggctttgaacagtatttggaaggtgccgaatgtacgggtgctccggtagaaagagacggcaatatcatcactggtaaaggaccgggcgctgccatggagtttgcattggccgtagtggagctgttgcaaggcaaagagaaggtgcaggaactgaaagaagctatgtgcgtaacggatttatgatttaaaatcataaatcataaatcataaatcataaatggttcagtatgctctgattgttgccggtggcaagggcttgcgcatggggaccgaactccccaaacagtttctcccgataggggggaaacctgttttgatgcgcactctggaggcgttttatgactacaatgctgagatacggataatattggtgcttccccacagccagcaggattactggaggcagctgtgcagggagtactgtttttcattgccgcatgccattgcagatggaggggagacgcggttccactccgtaaagaacggtttggctttggtcaagacacctgctttggtcggtgtgcacgatggggtgcgtccgttcgtggcccgggaagtgattgcacgctgttatgacttggcagccgagaaaaaggccgtaattccggtaatcggtgtggtggagaccgttcgccgtatggaaggggaaagcagtgtgactgtcggcagggatgattatagattggtgcagactccccaggtttttgatgcggaactgctgaaagcggcatacgagcagccctatacaccccattttaccgatgatgcttctgtggtggaggcattgggtgtatctgtctttttgacgccgggaaatcgggaaaacattaaaataaccactccttttgatttaaaaatagccacagctctgataggttcatgttcgatttagccacgcgtgacataaaatatttgtcgggcgtcgggtcgcagcgtgcttcggtgctcaataaggaattgggcatttactccttgcacgatttgctatattactttccatataaatatgtagaccgcagtcggatttattatattcaggagatcgatgggacgatgccctatattcagctgaaaggtgaaatactaagttttgagacggctggagaagggcgccagcgcaggttgattgctcatttctcggacggtacgggggtggtggacctggtttggttccagggcatcaaatatttggtagggaagtataaagtgcatcaggaatatattgtgttcggaaaaccgaccttcttcaatggtagaataaatatggctcatccggatatagactctgcttcggatttgaaattgtcgtccatggggttacaaccttattataatacgactgaaaagatgaaacggagttctctcaattcgcatgccatcgagaagatgatgaatacggtggtgcagcagttgcgtgagccgttgcccgagaccctttctcccgctatacttgccgagcatcatctgatgccgttgacggaagctttggtcaatatacactttcccgctaatccggatttattgcgtaaggcacagtatcgcctgaagtttgaggagctcttttacgtacagttgaatatcctgaggtatgcaaaagaccgtcagcggaaatatcgcggttatatttttgaaagggtgggcgaagtgttcaataccttctactcccgtaatcttccttttgaactgaccaatgcacagaagcgggtattgaaggaaatccgtaaggatgtaggctcaggaaagcagatgaaccgcttgctgcaaggggatgtgggaagtggaaagacgcttgtcgcactgatgagtatgttgatggcgctcgataatggttttcaggcatgcatgatggcacctaccgagattttggcaaaccagcactatgaaaccatccgtgagctgctgtatggaatggaggtacgtgtggaactgttgaccggttctgttaagggcaagcggcgcgaagctatccttgtcggtttgttgacgggagacatacatatactgataggtacccatgccgtcattgaagatacggtgaattttgcttcgctcggtttggttgtgattgacgagcagcatcgtttcggtgtggcccaacgggcacggttgtggacaaagaatgtgcagcctccccatgtattggtgatgacggcaaccccgattccccgtacattggcaatgacgctttatggcgatttggatgtgtctgtcatcgatgaattgcctcccggacgtaaaccgattgtcactcttcatcagtttgatagccgtcggataagcttgtatcagtccatgcacaagcagattgccgaaggccggcaggtctatattgtctacccgctgattaaggaaagcgaaaagattgacttaaagaaccttgaagaagggtatctgcatgtttgtgaagagtttcccgagtgtagggtttgcaaggtacatggaaagatgaaacctgctgaaaaggatgctcagatgcaattgttcgtatccggcgaggcacagataatggtggctaccaccgtgattgaggtaggtgtaaatgtgcccaatgcttcggtgatggtgattgagaacgccgagcgtttcgggctgtcccagcttcatcagcttcggggacgtgtaggacgtggagctgaccagtcctattgtatcctggttaccggctacaagttggcggaggatacaaggaagcgtttggagataatggtgcggactaatgacggctttgaaatagcggaagcagacttgaaactacgtggtcctggagatttggaagggacacagcagagcggcattgctttcgatctgaagattgccgatatagcccgtgacggacaactgctgcaatatgttcgtgaagtagcgcaaacggtggtggatgcagatccacatggcatgttgcctgagaacgaggtcttgtggcgacaactgaaagcgttgagaaaaacgaacgttaattgggctgccattagctgaaaaaacggttaaacatgtacttttattgcattttatgttgtaaaacatgtttgcttgtaaatctcctatctataggggattaagacatctttgcgagctttacagtttcctcctcttcgaaaaaatagttaatgactgatgtcgtttttcagagagaaatgttacctttgggagaatttttgaaaatcaatctggatattcgcgtagaacaagtggtgtttgatttgccgagatgcttgcaacggatatcaaaatgaatgacgaaacggatgaattttaattggataaaaactgctttattggctgcgacggcaatggttagcttgaattctttctcgcaagacctgattgcccgccaggcccccatcgacagaaaacttaagagtgtagattcactggctttgcaaaaacagatacgtgcggaacaatcattgtatccgggtttggatttgtatcccaactggaataacgaattcgtacaagcctatggcaatgcgattgtgcctgagagctatacatttgatttgaccggtttctgtatgcctactcccaatacccgtatcacagatgtattcggttaccgtccccggagaagaagagctcattatggtttggatatcaaggtgtatgtaggcgatacaatccgtgcggcttttgatggaaaagtacgcgttgtcaagaatcaaggtcgtcgtggatacggcaaatacgtcgttattcgtcacgacaatggcttggaaacagtttacggacacttgtctaaacaattagttgatacaaaccagttggtaaaagccggcgaaccgattgcattgggaggaaataccggacgttctaccggttcacaccttcactttgaaacccgtttcttgggtattcccatcaatcctgcgcttatgtttgattttgaaaagcaggatatcgtagctgattcctatactttccataagacaaaaggctcttccggtacggcgcgtagcatggcatcgggtgaaggtctgttctataaggtaaagaagggagacacattgggacggattgcagcacgtcagggaacctccatcgacaagctttgcaaactgaacagaattacgcgtaaaacaatcctgagaccgggacaagtattgcgctgctcataaaaacgtaaacaatctctatagaagagggtactttaatagattttagagtgccctctttttctttttctttaattattcctatctttgcagcgcactgtgaaaaaaggaaatgaaagataccaagcaacaatttgaacatgtcattgcggtttgccgtgacttgttctctaaaaaacttcatgattacggtccggcgtggcgcattcttcgtccgtcttccgtaacagatcagatattcatcaaagccaaccgtatcagaagtattgaaacgaaaggggtgactttggtagacgaaggcatccgttctgaattcatagctattgtcaactatggaattgtagggctgatacagttggaacttggttatgccgaagctgccgatatgaccaatgaagaggcattggtgctgtatgacaaatatgccaaaacctctttggagttgatgcttgccaaaaatcatgattatgatgaggcttggcgtagtatgcgtatcagttcgtatacggatttaatattgatgaagatttaccggacaaagcagattgaaagcttgtccggggagactttggtttcggaaggtattgatgccaattatatggatatgattaactattccgtattcggcttaattaagattgaatttggagattgacaagaaacatattgtcgggaaagtttgggtgaacctctgccgttttctgctgggggctttgttcatattttccggatttgtgaaagctgttgatccgttgggtttcttctataaaattcaggattacctgacggctttcggcatgatttcctggtttccttcttatgcgcccttgctggtagggatagtgttgtctgccatagagttcagtgtaggtgttttcttgtttttgggtatacgccggaaggtggcatctgcattggcattattgctgatggttgtaatgactccgctgacactttatctggctttggcgaatccggtatccgactgcggatgcttcggtgatgcgtggatattgaccaattggcagactttcggcaagaacgtagtattgttggtggcggcagtatctgtattcaagtggcaggatttactggtacgtttcattactccgaagatggagtggatgatttccatgtatacgtttctatttgtgtttgcgttgtccttctattgcctggagaatttgccgatacttgatttccgaccttacagaattggagcgaatatcaaggcgggcatggaaattccggaaggtgctaaaccaagcgtgtttgaaagccggttcattttggaaaaaggaggaaagcgtcaggaatttacattggataactatccggacagtacatggacgtttgtagaatcgcgtacgatactgaaggaaaaaggttatgaacctcccattcacgatttttccatgatgagtctggatacatgggaagatataacggacagcgtactgtcggataaaggatatacgtttctgctggttgcccatcggatagaaggagcggacgacagtaacatcgaccttatcaatgaaatatacgattacagtgtggagcatggttatggcttttatgccttgacttcatctccggaagacgagatagaattgtggcgtgacaagactggagcagaataccctttctgccagacagatgatattacgctgaagaccattatccgttcaaatcccggtttgctgttggtaaaggacggaactattttgaataagtggagtgacaaccggctgcctgatgaatatgtgctgaccgatagcctggacaagttggaattgggcaagcagaagcaggaaagtgacttacaaacaataggctatgtgttgctgtggttcatccttcctctgatgatggtgctttgtgtcgatattttagtcgtaaggcgccgagagaaacaacgcctcagacaacaatagtatcaaatagtaaatagtaaattgtcaaatagtaaatacattaacccttttaataataaaacaaaatgagaaaaaacattgttgcaggaaactggaaaatgaacaaaaccctccaagagggtattgctcttgcaaaagaactgaatgaaacattggctaacgaaaagcctaactgtgatgtaatcatctgtactccgtttatccacctggcatctgttactcctttggtagacgctgccaagattggtgtaggtgcagaaaactgtgcagacaaggagtcaggcgcatataccggcgaagtatcagctgctatggttgcttctactggtgcaaaatatgtcattctgggtcactctgaacgtcgtgcttactatggtgaaacagttgctattctggaagaaaaagtaaaattggctttggctaacggtctgactccgattttctgtatcggtgaggtattggaagaacgtgaagcaaacaagcagaatgaagtggtagccgctcagctggcttctgtattctctttgtctgccgaagatttctctaagattattttggcttacgagccggtttgggctatcggtaccggtaagactgctactgcagaacaagcacaggaaatccacgctttcatccgttccttgattgctgaaaagtatggtaaggaaattgctgacaactgctctatcctttatggtggcagctgtaagccttctaatgcaaaggaactgtttgccaacccggatgttgacggcggtctgattggtggtgctgccttgaaggtttctgacttcaagggtatcatcgatgcctttaattaaatagttgaaagctgaaagttgaaaatggattgcatgtcgtatctgcataactgttttccattttcagctttccattttccgttatataaagatattgactcatgaaaaagcttggtttacttttagttgcatgtttcgcttttgcaacgatttctgtagcgcagaataatattgtgaaaagcctggaacgtaatgtgccgggacaaggcaaggtgactatccatcaagatgcacgcattgcggcattgataggttcggagtatgttcctgccggttcggatgagcagaaagtgattaaaagttcgggttaccgcatacaagtttatgcagggaataatacccgtcaggccaagaacgaagcttatgcggtagctacccgcatcaaggaacattttcccgaacttacagtttatacctctttcaatcccccccgttggctgtgccgtgcaggagatttccgcagtatcgaagaagcggatgccatgatgcgtcagttgcgggctactggtgtattcaaggaagtctctatcgtgaaagagcagataaacatccccttataaagaattatcatgttaggaaaagaagaaattgtatctccttcattagatgaattgaaggaacattatcaccgcatccttactctgttgggtgaagatgccggacgtgaaggtttgcagaagacacctgaacgggtggcgaaggccatgttgtcgttgacgaaagggtatcatatggaccctcacgaggtactccgttcagccaagtttcaagaagaatacagtcagatggtgattgtgaaagacattgatttcttctcgctttgcgaacatcacatgcttcccttctacggaaaggcacatgtggcatatattcctaacggctacattaccggactgagcaagatagcccgcgtagtggatattttctctcaccgcctgcaagtgcaggaacgtatgactctccaaataaaagagtgtattcaggagacgctgaatccgctgggggttatggttgttgtggaagccaaacacatgtgcatgcagatgcgcggagtagagaaacagaactccattaccactacatccgattttaccggagcattcaaccaagcgaagacccgcgaggaatttatgaatttaatcaggcataattcttgacggagaactccccgaattgaatttaaaaattcaggatgactctgtctcccagccgctttgccatgatgctttttactttgttcaattcgttgtagcgctccatgatgctgttacactgggtttcatcattggctatggcagggttctgtaacgcaaatagggtatgcttcaattcttcgcagacgatggcatatttgaagtttatcattaaccgtggaattagctcatagaggcgttcttcgtccgtcaccatttgttctatctgtgatttccttaactgatagcggttgctgataagttccacactcagcttgctgatgacggggtcgggatgcgccacaaaataccgttcggcggtaaaaccctcattgtggatacgttcggtagcctctgtcaggatttgccggtgaagcggattgtggaaggcaagctcgtcctcttttaaatcattgactatatattcagttacagtgataggggtttcctgcccctcttcattggtgacattgcacatcacccgctcaccatagagcactaccatcttcagaataagtcgttcgtatttatagaactcctggccctccttgccctcctgtgggatgaaggatacatattcttcctcgggtggaaaaggtggaggtgtttcggaagggagaccggcaggcagtgattcggacggatagccagcttgttgtgcgtcggggctggtagctgtagctgcagtatgactgccattgacacctgcttctgcattggctcttgcggcattggccgaccgacgctcgcgttctgctcgctcagcttgttgctcggcttgcttttcgcgacgcttggcaacctcagaaaccagcagtttatcttctacgtgcaataattgggcgcactccttgatatagacatcacgcacaatggcttcgggaatgatggaaatgctctgcacaaggtttccgataagctcggcacgcttgatggggtcttttcctgcatcttccagcaacagattggttttgaagcggataaagtccgtttcattctcttgtatgaaggcctggaactccgtcgcattgtgtttgcgtgcaaaggagtccgggtcgtcaccgtcgggcaggaggcagactttgacgttcatgccttcttccagcaacatatcaatacctcggatagaggcctttataccggcagcgtcaccgtcgtagagcactgtcatattgttggtgaaacgatgaatcatccggatttgtccgggtgtcaatgccgtgcccgaagaggcaaccacattctctatgcccgattggtgcatggaaatgacatccgtataaccttcgaccagaaagcaacggtcttgtttcacaatggcttgtttggcaaaatatatgccatacagttcattgcttttatgataaatttccgattcaggcgagttgacgtacttcaccttgacgcctttggtggcgccggcaagcacacgtcccccgaaagccaccaccttgccggagagagtgtgtaccggaaagatgacccgcccccagaagcggtcgcgcagtcggtggtcgtccgtctcgtagcagaggccggtcttgacaagataatcctttttatagccttttttcaaagcttcctgggcaagggcatcgtggctctcggtacaatagcccaactggaacttctcgatgatgtcatcccggaagccgcggctgcggaaataggccatgccgatactctgtccgtctacgtggttctttaggatattctggaagtagtcacgggcaaagttgttcacaatgaagaggctttcccgttcgctctgtgctatcttctcctcgctggatagttcgcgttctttgatttcaatgccgtatttttttgcgagatatttcagcgcctcaggataagacatctgttcgtgctccatgatgaaatgcactgcatttcctccttttccgcaggcaaagcacttgcagagccctttggcgggggatacatagaaagaaggggttttgtcatcgtggaagggacacagtcctacataattcacgccgcgtttgcgcagggtaacgaagtccgatacgacatcgtatatttgtgcggcatcgagaattctgtctatagtgggttggtctatcatgaaagcggttctattaacagtgcaaagataaaaaaaatccctcgttgaggacgagggaacctgatgttttcacaatggacatcttttctatttaatcttttctctgattttggtcagatacttcttcatgccttccgcatccttgttgttgatgatttccagcagattcttcagttccaggcggatgttctccacttgtgagggagtgcgcgggttgaagagaatttcttggagcaagtagtcatcttcactcagcagtcctttggcaatagccatgtgcttcttgaatgtagtgcctggagcttcctggtgtttcattaccgctgcaaacacgaaggtggatacaaacggaatggacagcgaataggctacagtctcatcatgctcgtcgaatgtatattcgaagatgttcagtttcattgtctggtagaggtccttgaagaagatttttcccaagtggtcaccttcgctgatgatgatggcattctctgtattcagattgctgagactggcaaaagtagggccgaacatgggatgtgtcgatacatatcggaaaccgctttcttcgtaaaatttcttcaatccggtctttaccgaagcaatgtcactgatgatgcagtccttaggcagtactggcagcacttggcggaaggcgtccagtgtgtatttcaccgtagcggcattgatgaccagttccggctcgaactccttgatttcctccaatgtagtgaagcggtaggtgttgtagacaaaacgcagttggtgcgggttgacatcgaacacagccgtctcgtgctggaaactcaatatatctgtaaagaaagagcccatttttccggccccaagtataagtattctcatgatgtttaatgtgctaatgtgctaatgtgcttattgccatgcggcatcactgcgcagccaataagcacattggcacattaaataattacttatttataatttccatttgttgcctcacactttcttcgtgtatcgcctcaaatacctttttgatgaattcagcatccatgccacacaatgcgccttgcgagccgcgtttctcgaggatttcgttgtagcgtccggtttgcaggatggtcatgtcatgctcttttttgtatgtaccgatttcacgtgccacacgcatccgtttggccagctcctgaataagattgttgtcgcattcgtctatctgcttgcgcaattcgctgaggttctcggtgctttgtgtttccttgcggatgaccagcaggttgaggatgtaatccagcacatccggggtgacttgctgggctgcatcgctccaggcacagtccgggttgcagtggctctcgataatcagtccgttgaagcccaaatccatagcttgctggcagagtggagcaaccagttcgcgctttccacctatgtggctggggtcacagataataggaaggttgggaattcggcggcgcagctcaatggggatatgccattggggcaagttacggtagagctttttgtcatagctgctgaatccgcgatggatggcacccagacgtttcaagcctgcattgttgatacgttccaaagctccaatccacagctccaggtcaggatttaccggattcttcaccagtaccgggatatctacgcctttcagtgcatcggcaatttcctgtacggcgaaaggattggcggtggtacgtgcacctacccaaagaaggtcaattccagccttcaggcattcgtatacatgtttggcggtagctacttctgttgaaacgtacatgccggtttctttctttacctccttcagccatgcaaggccgtctacgcctactccttcgaagccgcccggtttggtgcgcggtttccagatgccggcacggaatagcttgaggcctttgtctgccaattgtttggcggtgctcattacttgttcttcggtttcggcactgcaggggccggctattaccatagggcgtttgtcttcaacaccaggtaatgtgataggttctaattcgagttccatattctttatttgtttaataatattctttaattatgctttttcttccttgtgacgtttcctccttttcagaagactttctgagcaaggtcccggagatttagtaaaacgtcggagaagatttactaaatcgttcctcccgttttagtaaatctccggtggagttttagtaaacgggattccggctttagggtgttcatctcttacttgtaagcatttatttcatgtccttgatacgcttcaatgcttctgccagtttattgtccttacagcagagggagatgcggatataccgtttcccgttacttccgaagataaacccgggagtaatgaacactctggctttatgcagcacgtgttcagtcagttcttccacgtctgtacagctgtcggggattttgccccagaggaacatgcctacctggttttcgtcgtaggtgcaacccaaggtatgcatgatttctcctgccaactgacggcggttgcggtaattcgcgttgttgccgtcataccagtcttgctctgcttccagggcagtggcggctgccagttgcatggcacggaacataccgctgtcgatgttgctttttactttcaatatccattgcacgaagtcggcattcgaggcaagcatgccgatacgccagcccggcatgttgtggcttttgctcatggaattgaattctatgcagcactctttggcacccggaatgctgaggatgctgataggatgttcgttcaggatgaaactgtaggggttgtcgtttacgatgacgatgtccttgcggcgtgcgaagtccaccagtttccggtacagttccggtgttgcgttcgccccggtgggcatattgggatagttggtccacatcagttttacacggctcatgtccatccgttccagttcgtcgaagtcgggcatccagccgttttcttctttcaagttatagttcacgacctcggcacccagaatcttgcttaatgaagtataggtgggatagccgggattgggaaccaatacttgttcaccggggttgacaaaggccagcgtcacgtgcaggatgccttctttggagccgatgagcggttgtatctctgtgttgggattcaatgctacaccgtaccatttttggtaccagtccgcaaaaccgcggcgcagttcggggatacctacgtagggcatgtaaccatgtccgtccggattgcaggcagcttcgcaaagtgtccggattgtcttttcggaaggcggcatgtcggggcttccgattcccaggctgatgacatccattccttcggcattcatttgtgccacttctttcagcttcttcgagaagtaatattcgcttacgcttgccaggcggtcggcaggctttattctacacgtttgattttccatcttcatattctcctaatattttcagctctttggtcagcggtgtgatggccgcaatggattgtttatatctcagtacattgtcgaagacgacatctacgtaaaactggtattcccattcacgcccgatgatgggcagtgattgtatcttggtcaggttgatgcggtagaaagacaaaatagacaatacttgggaaaggcttccttcagtatggggaagtgtgaataccatgcttgccttgttgacgtccttgctgcgatgccggttcagttcatctacttgccaagggtcggctacgaccaggaaacgggtgaagttatgtttgttggtttcgataccttcctgcaggaccttcatgccataacgctctgcagcagctttggagcagatagctgcatggcctttcagatgttcctgttggatgatttcggcactgcgggcggtatcttcgccttccaccactttgattccggggtgttgtcccaggaattcacggcattgcatcagggcgatagggtgggagttgacttcggtaatatcatcccagtcttcatcgggcaggcagacaaaactatgggaaatacgcagcttgtactcgccgacaatctgtgcgccactttggcgtaatagctcattgttatgcagcaaactacctgcaatggtgttttctatcgccagcattcctatggtctgactgtcttttttgatggcaccgaacacgtcttcaaagttggcgcaacagattaactctatttcttctccttcgaagtacttgtgtgcggcgatgtcgtgatacgagcctaatgttccttgaatggctacctttttcattatttttattttcttggttatgctataaaaaaaatcccgcttccatacgatggagcgggattctgtatatttacttgtttctctattcagtccttaagcatcactgtcacttgatacatacaaactcccgctctactttctggctaaagtaaaagtaaaaaaagaagtaatatgcataagtaaatgacttcatacttgtattctctgtttttgaattacgtgacaaaagtaatgcttttcttttatatacaaacaaaaaacaatgttttttttagggatagtagcaatttaacttatttccctttaacttgtacaatgacttgaaccggacgatggtcggatgaaatggtgtcttctatgactttccggtattgtacgtcaaaccgatacccattcttggaatagccgtagatgtagtctatacatcggttgggacggtctgccgggaaagtataagaggttgtgtcattgagggtggcaaaatgttttgccaattccagctggggaacgcttgctggtgcagagttcatgtcgcctgccataaagatgggcttatcgacgttttgcaaggctttttctatcaatggtacggcaaggagctggtcttctggagtgagggactggtgtgtggcacaaaatacataatctttaaattctgcaataatgagggtacgtttttcttcccgtccgggcattggaatgattttgtattttatgggtatctctctggagaggattccgatgccgtagcttccaccctgaaaaggaatggctgctgcataagtcccgtgcattccggtcagtttttctagttctccgagagcatggattcctttgttgcgcaccgttacactgtcaagttcctgcagggcgactatgtccggagaagtttgactgataacattggcaatgcgccggtaattgtactccttgtccatacctatgcaattatgtacgttataggacaatatgttcacttgctgtgcatgggcaggtgcgaacatcagtacaaaaagtactgatagaaataaatttcgtttcattggcggcaataattgaatttgtcataatcccaggatattaccggtacttccccccggttggttaccatattgtccgttaaagttctgtatctctttaggattgagttccagtcctttcttcatgtcttctgcagaaccttccttgtcgccgttcagcaacttggcacgtccgcgctcatgataggcctctgcgaaattagggttcagttctgtggcttccgtaaagagctcgatggcttctgccagtttgttttgggtgatgtaaagctgtcctaagtagaggaaggcttgttcgttgaagggattcaactccgtcactttctgatagctgctttctgctttttctttgtctcccgtagcttcttctatctttccgcggagcaagatggcactttcgtcttccgggtcttgtgccagaatggtgtctatgtcttccatcgcttccttgtattgctgcatttggaccagggcttcggcacggagcagacgtgcttcgatgaaatcatctttcagtacgatggctttcgtaagatgggcgatgcacatgatgccgtccccttgcccattgtctgctttgccgagcaggtaatgtgccatggcgttgccctcttctatttcgatagccttctttgccgctcctgccatggcgggatagtcttcctgcatgtagcatacgttggcaagactgaggtaggtggagatatgttccggctctatttcggtcatgcgttccagtagtttgtgcgcctcgtccagttcgctggtctgggtgtagacttgggcgagatatcccatggtctcgaagtcttcctgaatggcaagggcttcagtgaagcatttgatggcgtagtctgtacggcccatgcgttgtgcgcgcataccgtcatacttgaatatctcaaaattcttctgttcgtttttttgtttctcatttgccggactgtctgacttgccggagaaaaaagatttaaagaatcccataggtgattaaaattaaagaattaaaaattaaaaaggaaaaggaggggcatggctgataggagatgttcctctcagcggcaggacattcttttccaacggcaaaagtaatgaattattttttgatttgaagcattccgttgacagcaattaccttgccttcgtccaacaatccatgtaacacatcgatgagcatgtttttagcgtctgctatctgttctgccaaagtggctggagtttgtcgtttatcagatagggcttgaagaatcttttcagaaagttccttttccgaaaggtggccggaaggtttcttgttcttcaaattgatgcaagtgtcgcactgcccgcagttatgctcgttcttctctccgaagtagtgtagcagcatccggctacggcacacggtatcgctgctcacgtaatccagcatggcacttatgcgtttctcatatcgctctttgcgttcctcgtacacggtggaagggatttgcaggtggcgcatttcaaccctctctcgcgtgtatattatatatggtgtctttttgcgggggatgtaactgacgatatgtagcttggctaggtggatgagctgttcatacacttgccggcgtgtgagtccagtgcgtatggccagtgaatcttcattgatgaaagcatggtctgtgaaaaccccggtataggagcggagaatggtttggatgagtttgtccatatcttcgccgagctctctcagtttataaagttcatctcgacggatagtgaacagtagccgggatgcattgtcttgttcgtctgtatattccaggtatcccgcttgtgtcagaatcttcaaggcactgtccacgggaacggggaagtacttgaactttcgacaaaagtcttctatattgaactcgcgtacacagccttgtccgtctcccattgccatctggtaatagtattgaagatgctcatatacttcctttatatactctttttcaggaaaggtgtcgggaatgcgtttgtgcagtgttgccttatccgacttggcgtaaaggacgaccgcgtaggctttttgtccgtcccttccggcacgtcctgcttcctggaagtaggcttctatggaatcgggcaggtccatgtggatgacaatccgtacatccggtttgtcgatacccataccgaatgcattggtggcgaccatgacacggctttctcctgtttgccagcgttgttggcggatgtctttggtggcgtcatccagtccggcatggtagaaatctgcggtgatgccttcgttgtgcagcagttcggtaatttccttggtgcggcggcggttgcgcacatagatgatggcgcttccgggcatacggcgcaggatgtgcaacagctctcccgtcttgttttccgttttacggacgatataggcgagatttttgcgctcgaaactcatgcagaacacattttcctcacggaaatgcagacgggcctggatatctttcactacttccggagtggcagtggctgtcagtgccagcacgggtacaccgggtagcagtgtgcgtatctcggctatcttcagataggcaggacggaagtcgtagccccattgcgatatgcagtggctttcgtctaccgtaatcatactgattttcatcttctgcagtttggtgcggaagatttcagtatcgagcctttcgggggagatatagaggaacttgaaattgccgaatatacagttctccagtgtgacgatgatttcctgcctgctcatgcctgagtagatggcaagcgccttgattccccgctttttcaggttttgtacctggtctttcatgagggcaatcaacggagtgatgaccaggcaaagtccttctttagcaagtgccggaacttggaaagtgatggattttcctcctcccgtgggcattagtcccaaagtgtcccgtccctcggtaatgctgttgatgatatcttcctggattccccggaaggtatcgtatccccagtattgcttcagaagcctcacccccaatccctcccccatagggaggggagttttgaagttactactgctgctcatggtcttattgaactttcttgctacttcttatcgttgaattgatattctttccttctctatgctaatagtagtgattactaatcttatagcatcaaccaattttcatcatttccttaatataaggagactattcttattcccctccctgtgggggaggggttaggggagaggctttcagttcggctttatgtcttcaatctgcaactgcacttcacccctcttatgggtattctcttcaatggaatagcagatgtcgaaggaacgtttggtcttgatgaagcgtacgtgggaactttgcccgaaagcgatgccgttcattacattgttcgatttattatccaccagttctagcttgatatgttcctggtcgcggcctacgactttgctggtaccataatcatagacattgtgcgtacagaaaatgggtttggcattgtccggtccgaatggattgaatttcttcaagtcgctgaagaatttcggagtgatgtctctgaaatcaatctcggcattgatgtcgatgacggcgcatgtctgttccggcaggatattttgtgatacgaactcttcgaagcgttcgataaaggccggtacattttccaccttcatggaaagaccggcggcgtaggtatgacctccgaagttttccagaaggtcgcggcagtattcaatggctttgtagacatcgaatccggagacggaacgggcagatccggttgccatgtcatccgtacgtgtcagtactactgccggccggtaatagatttccgtcagccgggaggctacgatgccgatgacgcctttatgccagtcttcattgtacaatacgatggaacgtcggtcggcaagtccgtccaggtcagctacaatcttgttggcctcctcggtcatggtcttgtccaagtccttgcgtgtctcgttgtattggttgatttgtccggctttctccagggcaagagagaaatctttttcagtaagcaagtcaacagcttctttcccgttctggatacgtccggaggcgttgatgcggggacctattttgaatacaatgtcactgacggtgatgtccttgtccgtcagtccgcagacatcaatgattgctttcaggcctacgctgggattactgttcaactgcttcaaaccgtggtaggcgagaatgcggttttcacccataatggggacaatatccgatgcgatactgacggcgcagaggtccagtaaagggataaggtgatggaactcgataccgttgttgagggcaaatgcctgcatgaacttaaagcctacaccgcatccggacagatgttcataaggataggtgttgtcttcccgtttggcattcagaatggctacagcagggggcagtacatcatcggggacatgatggtcgcagatgatgaaatcaatgcctttctccttggcgtatgtgatttcttcgacggctttgataccgcagtccaatacaataatcaaacctacaccactctctgcggcatagtctactccttggattgaaactccatacccctcattgtaacggtcggggatatagtagtcgatgttcgaatagaactgttgaataaacttgtagaccaatgccacagccgtggtaccgtctacgtcataatctccataaacaagaatgcgctctttctttcccattgccttgttcaggcgctctacggctatatccatatccttcatcaggaatgggtcgtataagtccggtagttgggggcggaaaaacttccgggcatccgctgccgttgttattccccgctccaccagcaattttcccaatattgggctaattcccaattcttgggccagttgttggcttgcttctgcctgttcgggtgtaatgggttgataattccatttgtgagtcattttatatattattttttctttttctatctcaagatgttgggggagtagaggggggcaatacgtgcacttttctccaacaaggtgtaaaggtatgaaaaactcttgaaacggaggtgaattctgcggaaaaactttataagtatatgtattctccactaaaaaactttatttttgtatccattaaaaaatatcgctatgcttgtttttatctcttgtgcaaagaccatggcagcgcgctgctctgttgtcgtgcccgaagtcacagtcccgaaattcgaaacggaggctgtgcggaatgcgttggaaatgtcgcagtattcagtatccgaattggaaaggcttcttcgggtgaataccaaaattgctgccgagaaccgtttgcgttttcatgatttctgttcggaggagaatcgttcgatgccagccgtttgcgcctacacgggagctgtttttaaacgcattcttccgaaagatttttcagcggaggattttcgttatgcgcaagaacatctacgtatcacttcttttctttatgggttgcttcgcccgctggacggtatcaaaccctatcgtttggaaggagatgtccgtttgcccgaaaaaggtggaatatccatgtttgattattggaagcctttgttgacggattacttcatagaggaaattaaaaactgtggcggtgttctcattaatttggcaagtgctgaaatgaaagatttgttcgactggaagcgggtggagcaagaggtgcgtgttattacgcccgagtttcaagtttggaaggccggacagccgaagactgtcgttatctatgccaagatgtgtcgcggagagatgacgcgttttattgtcaagaaccgtctggagtgtcctgaggagttgaaatccttttcttgggagggcttcgtctgggatgagatacgcagtacggagaatgtatggcatttttcgttaggtacatttatgtaatgaaaaggtacattacgtttggctcagatgttactatatgttgctttcgatgtttgcgcaaaatgaagaactaaatacgcaatttaggatgagggaaaagaatgaactctctacatttgcatgcagtaaacttaaaagcaatatactatgaagagaaacggattaagaacagttgttgtattagctttgaccatatttctattgaatgctccggtttgtgctacagcttccagattgcaggatacttgtgcggaggcgcgggatgaggttgcactgcggcctgagtggatgaggattctccatgatacgcttcctatatgtaagatttctattcctggttcacacgatagcggtagtatcaaaggagggcatatgttgaaaacacaagcaacagatattcctgctcaattacggcaaggcatccgtgctttcgatatccgtttggaaaagaagggtaataaactgggggtgtttcacagtcatgcctttcaggatatatattgggaagatgatgttttacctgcttttatacactttctgcaaacatatccttctgagactttgattgtttccttgaaaaaggaagggggagaattgcgggattatgcttctctgctgtccgtttctttaagcagccctgagtatcaaagttatttcgtgatggactttcgccctgaactgacgctgaaagattgccgtggaaagattcttttcctgcatagggatcatgctatggataattatcctggagcagcatgtgtaggttgggaggatgacagtacttgcctgctcactcttcgcaataaagatggtaaggaaggagtggctttgctcgaagataaatatcaatatgaatcgggtgaggaggccgggaagaaggtaggggtttgtgtccgtaatattgaagggatgtctgctgagccggtttcctcacgtcggtggggaattacttttgtaagtgcgacggggctgcccttgggaacccctaaagtctttgctgataaggtaaacaagcctattgctgactatttaaaacaaaagaatagccggaattgcggtattgtttttatcgattttgtcagtgaacctggaggaaaagatttggtggaatatttgattgacagtaatgtttgcgcaaaatgaagatttatatgcgcaattgggaatactgaaaaaaaagcattttcttaattttgcacatgttgaacaccttaatgttatatactatgaaactgtcaatagatttaggaggaaccaatattcgaatagcccaagtggaaaaagggaactgcttgaataaagtgtcggttccatgtttagctcagcaagatgcttctactgtgctaaaccagctttcccagcttattcggaatatgatgaatgagcaggtagatggtatcggtatcggtgtcccttcaattgttgatccggagaaaggaattgtatataatgtagcaaatatatcttcttggaaagaaatacacttgaaggagattttggagaacgaattcaaggtggcagttgccattaataatgattccaactgtttcactttgggggagagcctatacggcgaaggaaaatcttataccaacatggtaggcgttactattgggaccggaattggagctggcgttgtcattggccgtcgtttgtatggtgggcaatatatgggagccggtgagataggctcatttccttatttggactctgattttgaacactattgcagtagtttcttgtttaaacgttatggcactaccggtgcggtagtagctgaaaaagcccagcaaggagaacaagctgcattggagatttggaaagagtttgggaggcatttgggtaatcttataaaggcaattctttttgcctatgctccccaggctattgttttaggaggcggtattgtatcggcttttcctttctttaaaaatgctatggaacaaacaatgcaaagttttccctacaagattatatcggataatgtgagtgtggtggcttcgcatcaaaaggattccagtttattgggtgctgccgctcttcttgagtaataatccctatacggtttgattgaaaataataaatattttgcagttatattattttacgcataaataaggactgttagagaattgttccttttgtaataactatgtaattctgctttctgacctttgtggcggaattataattttctatattataaactttaaattttgaatgcatgaaacaagtaaatcttagaatctatcgaacgattctgaccctattgttgggactgttcttgtcggcaggtgcttatgcacagcagatttctgtgaaaggaacagtaaaggatcagactggcgaacctgtgattggtgccaatgtgttagtaaaggggacgactaatggagtgattacggacgttgacggaaactttaatgtttcggccgataaaaacggcgtattggtaatcagttttgtcggctatgtgactcaggaagtaccagtggcagaaaaacaaatggtaattgtgcttaaagaggatacagaacttctggatgaggttgttgtattagggtatggtgcgaatacacgtaagcaggacttgtctgcttcagtgggtgtagtaagtaatactgaagaattggctgctcgcccggtaacttctaccgaaggcatgctgcagggacagctggcaggtgttaccattacggccgatggtggcgacccaacttcttctcctaacattgtgattcgtggtcaaggctcacaagatggagacaatgtactttgggttgtggacggtgttcccggtgcacctatctcatccatgaatgatattgaaagtatcgttgttttgaaggatgctgcttctgctgctatctatggcgcacagtctggtgcaggtggtgttgtgttggtaactaccaaaaaagcgaaacaaggtgctccttcgttgacttatgacggcacttttggtattcgtcaggctaccaatttgatagaaccactgaatgcggagcagcagattgagatgcgtaagatatctcatcaaaatgcaggactttcgcttccagtcggttgggatgttaccaaaaatccatggataggtacgactcgtactgattggatggatgagattttccgcactgccttctaccaacgtcataacgtagcgttgaatgtaggttctgataatttttcaaatcgtatatcttttgcttacgataatgatgaaggtgttttgattaatactttcaagaagaatcttacattacgttataatggtaaaatgcagctgaacaagtgggtgagcgtcagtgaggattttgtatggcagaacactacccaacgttccaaagctacggataacgatgcttatacaggacctatcctttcggctatctacatgccggcaagtgccactgtctataatccgttggacggaagttatggtggtgtgactacggaagatcctgcctatattgaaaaatatggttcgaatttctctgatatccacggggatgctgtaaatccggtacgtctattggaagcagagaatttgtatgacaagataagtgacatatggagcactaccagcttggagatagctaatgtacttcctggattgaagtttacgagtcgttttacttataatatgaagactaatcattacaagaagttcaatcctattcgtgatgaagtaggtaaaccggctttgtcgaataatcttcaagaaactacttaccgtagagatgcttggaagacggaaaataccctgacttatgataagacattcggtgaacatacggttggtgccttgttctcgactacggcagatcattctgaaacgcgtggactggaagtgacgggtaaggattttgcggatgaatcggaatttttacaatacatggcgtatgcaggatcagtgacagcatctgactatttgactggacctgatgccaatgtgtcgttgattgcccgtttggcttattcttataatgaccgttattttgctactgcatcttggcgtcgtgattatgctggacgtttgcctaaggaaaataactatggtgatttccctgcagtgacccttggatggaaaatatctaatgaaaaattctttaagaagagtgattttatcagtttgctgaaattgcgtgcttcttgggggcgtgtaggtaatttgagctctatagggcttaattataagtctgctttgttgaagaaaagctcgtggacagaacaagcacaatatggtcctgaggcaaataatatctggaatactttgatttacaacggctctgcgttaaatcctgatttgacctgggaaacttcagaacagactgacttgggcttggatgttgagatgtttaaaaaccgtttgtcggtatcattagactattttgataaacgtactttcaatttgattcagacacaatcaatggggtggccttctactatgggactcgatgccatgttaatcaatcaaggtgaagtgcgtaaccgtggctttgagattcaagctaattggagcgataagattaacaaaaacctttcttatttcgtatcgggtaacttctcgtatttaaagaactgggtatcagatataggtgtgaaggatgcggatggcaatccgggtttgtggcctaatgataaaaggttccgtagcatcccttatatgatgcagagtacggaaggggaacctctgaattccttctacttgattaagacagatggtttgttccaaagtgatgcagaagttgccgagtggaatgctaaacatggaacatatgtgaccaatgataatggtgaaaaagagtgggtaggtattcagccgaatgccaaggctggtgacttgaagtttgtggatcataatggcgatggtaaaattacggatgcagaccgtcagtatatgggtagtgcgactccgaagacgacttttgcctttacattgggaatgacgtggaaaaaactttctttcagtgccatgttccagggagtaggtggagcaaaagctttatatgtaggaaagtacatgctgttgagtgatgtagaaggaaactttaaccgttccagcgagatattgaatgcttggagtcctacaaataccggttctgatattcctcgtttgtcaaagaatgacccgaatggaaactttacgactgcatctgattggtatttggagaatgcttcttatctgcgtttgaagaatgtaaccctttcttatgatttaagcgatgtattccgcaagtggtctcatttgaatgaccgtaacagccgtttgtctgtgtacttcagtggtgaaaatcttgctactatcactggatattctggtatggatcctgaatgtggtggctgggatgctttgaaatatccggtatctcgcgtattatctgttggtgtaaaattgacttactaataattaatagagaagaatgattatgaaaaaaaatatattattttttgcgatgtctgccacattgcttatgagttcttgcagtgacttccttgatgtgcaaccagagggagatgctactacaacgacttattttaccaatgacctgcaggctattgatgctgtagatgcattgtatgaaagatttcatcaggaagctgtatatggacgcgaactgttttgggaacaaggtgccgcgtgcgacgttgtgtggggaaagacccgtgattttccaacacttgctacattgaaatatacaggagacgaatcccctttgcgtactatttttgatactatgtacaaagtgatggcacgttccaactgggtaatacaagagttgcttaagaaagggaaaagcaccactttgagtgatattgaaaagagaagtctcggtgaagcttacttcactcgtggatgggctcatttcttgattgcttatcgttacggtcttgatacacaaggggtaccttttgtccgttatgaagattttgaaggtggctatgacaattctattcctcctcagcaagcttcggtcatcgataattataaattgattatctcggatatggacaaggcaatagagtatttgccccgttttgaagagtatggagataatgatagaggacgcgcgcacgatgcggctgcagtagcttttaaagctaaagtttatgcttattgggcaacttgggatgctacacaatggggaaatgtaatcagtatggtcaatgaactggaaactgcttacggacgtgatttagccggtacttatgaagagttgttctcttctgatttctctaaatggtggaataaagagtatatttggactattcctggaaatggtggctctcaaggtggcggttcggagtttccgggagttgtccttgagaacaaaggctggggacaatataatggctggggacagaacaagccgtcttatgatatttacgaagagatgttgaaagacggagctggtaatgaccgtttggttcgtacggttttagagtatggtcaggaatttcaattcttgggtgaatcccgtgctttttattcaagctcggatattgaatccggttttatgattaataaatacatggatccctttaagtatgaagatgcagccaataaggggtatatcaatacaaacggagactggccgacggtacgtattaatttcccggttatccgttttgcagaaatgttacttttccgtgcggaagcttatttgatgactaataaagcggacttggctacggctgatttgaatcgcattcgtaaacgtgccaatgttgcattattgacgggcactgctactatggctgacctatatcatgaacgccgttgtgaattggcatttgagtttacagaccatttatatgatttgaaacgctggtatcgctcaggcaatactgaaataaaggctttggctgctgccgaattgaatgcccgtccgcgcgtacgtcattatgccaaccgccaggaccctgcttccacattcgttgtaggtgagtatgaggattatacggataagattgcttatcaggattacatgatcgtattcccttatccttcggttcagattaccaaatctgatggtaagttaaaacagaatcctcattatgattgatattttctctgaaagagataaaatataaaaaaagacctcattgccattggtctaatctgcaggggttggtattttcgggtattgatccttgcagatatttcttctttttctttcatttgcaaaggctattcataaaatcattttaatatacggagagacggcattcccgacagtctgcagcgctcttcaaatatacagtctgatgaaattaaaaactcttatatgtgcaactactgccttttgggcttgctgctcttgtacatccggtgaactatctcccgtagactatgtagacccttttataggtaccggctttcatgggcatacttatccgggggcaaccgttccgttcggggcggtacagttaagtcctgacacgcgtgccggaaactgggatgcttgttcggggtatcattataatgatacgactctaaaaggtttttcacacacacatttaagtgggaccggatgcattgatcttggggatatactgtttcgtcctactacgctgaaaccggatttgactacggaaagcatttaccagccagcggctttttcccataaagacgaagatgcttctgccggatattattcggttgttctgaaagaagaaggaataaaagctgaattgacggtaacggcacacgccggtatgcaccgctatacgtttccttccggcaaagaagcatctattattatagatttgactcatttgcttgataacgaatatatttatgaggctgaacttgaacagactgccgccaacgaaataacaggtatgcgcagaaccaggggatggacggacaatcagtacgtttattttgtagcccagttctcgaaaccttttcagaccatagactttatacagaataaaaagatggtttctgcaggagttaagttgaacggtaccgatttgcaggcttgcttgtccttcgataatagtaatggagagccggttatagccaaagttggattatccattgtcagtgaaaagaatgcacgtgagaatttggaaaccgaggtgataggtttcgattttgatgccgtgcgtagtgctgcccgttccgcttgggaacaagctctctctgctattacggtaaaaggcggcaatacggacgacttgaagaatttctatacagccatgtatcattctatggttgtacccaatgtcgtgagtgatgtcaatggtgagtaccgccgtcataatatggaaattgggcaattgccaaaaggcaaagtgcaatattctacattttcgctttgggatactttccgtgcatggaatccgttgatgactttgattgatacaactttggtcaataatatgataaattcctttctggacatttacgaatcttcgggtgaacttcctatctggccgctttctgccggagagacgggaactatgattggttatcatgcagtgtccgttatagcagatgcttatatgaagggtattagaggatttgacgcggaaaaggcgttggaagctatggtagtttcttctgaaaagaacaaaaagggagctgattactatattcagaatggctttattccttctaatataaagaaagagtccatctcttgtttgctggagtttgcctatgatgactggtgtattgcacgtatggctcaggaaatgagtaaggatgatatttatcaaaagtatattcaacgttcccagaactatatcaatgtttttgatggtaatacaaaattcttccgccccaagcggatggatgggaactgggaaactcccttcaatcctattgaggtaggtcgtgcctatacggaagccacagcctggcagtatcgcttctttgtacctcacgatgtaagcggtatggcacaactgtttggtggtaagaaagagtttattaccgcactcgattctatctttacagtagagtcggatgtacatggcgatttagtggatattaccggactgataggtcaatatgttcatggcaatgagccgagccatcatatcgcctatctgtacgattacgtcggacagccttggaagacgcaggaaatgacacgccgtctgctccatgaaatgtacgctcctacgcctgaaggaatcattggtaatgaagattgtggacagatgtccggttggtatatattatccagcttgggtatttattcagtttgtccgggaagcaatgaatttgcactgactactcctctatttgagaaagcggttgtcaacctggcaaatagaaagactttgaccatccttgccaacaatccgaagaagaatgtctatatcacaaaagtagaattgaacggacaaccgatagatgtaaattttattacttatgcacagttgatggaaggtggagaacttcgttttactttgtccgataagccgaatatggagagaggtgtttcctctgaagcatccccttattcctatactaaagatgaagtcgtttccattccctatgtggataaggatttgaacttgtttatggataaggtaacggttgcattggccacaacaaccaaggatgccgaaatcagatatacattggatggcagcgagcccacagagcagtcggcattgtacgagcagccttttgaactggacaagaccactttaataaaagccaaaggattcaaggaaggtctccgctcaagcagaacattatccatatcggcaacgaaagctgaattgaaggctgctctttctgtaaatcctactcagaatggtacatcttataagtactttgaaggcacttaccagaaagtggctgatgtagaaaagtcaccgttgctggagtctggtgtcatgcccgaaccttctattaagggtgctaagcaggaggatcatttcggttatatcttttctggattgataaatgttcccgaagatggggtctatactttccagacccgttcggacgatggcagtgtcttgtacattcacgatgagcaggtagtcaataatgatgcttcccatgctgcaattcctgctaccggaatggtcgcgctgaagaaaggttttcatccttacaagctctattactttgaagattatgaaggtgagtatttgagctgggcttggaaactgccttctgccgagaagttggcacccatccctgcatcggctttatttgtgaaataatagtttaatatatatgctatgagaaagttatttttgttatttttacctttgttcgctgcatcatgcggacaggtgaagcagcaggcacctgcaccagagcccgttaatgtcatgagtttcaatattcgctatgacaatccggaagatagcttggacaactggcaataccgtaaagaccgcgcggcaaatgccatccgtttttatgatgtggatatattgggtacgcaagaagtacttcataatcagttggaagaccttaaacaacgattgccggaatacggagtcatcggtgtaggtcgtgaagatggaaaggaaaagggtgaatatagtgcactctggtataagaaagatcgtttcaacttgctggattctggctatttctggttgagcgagactcctgaagttgccggttccaagggctgggatggagcttgtgagcgtatcgcttcatgggcaaaactgcaagataaagtaagtggcaaggagttcttcgcattgaatacccacttggatcatgtaggtgttgctgcacgtcgtgaaggtataagccttatgctggataaagtaaatgagttgagtggtaacttacccgtagtagtaacgggcgactttaatgctagtccggaatcggatgtcatcaaacacgtgactgacccttccaatccggaacacttgacagatgcacgccaggcatcggcaattgtttatggtccggcatggagtttccatgatttcggaaagattccttacgataaacgtccgctgattgattacgtttttgtacgtaatggactgaaagttttgaggtatggtgtattggctgaaacagagaataatgctttcctctccgaccatgcccctattttagtaacagttgaataataaaacaataattatgactaagatattaagaatatgtatcgttatgctcttggcagtcttgctactgccggtagagttatcggcacaaagccgccgtgataaagaacagacctatgttttggaccaaccttatgaggtgacaaagattacccctccccagggcaagaagataaagaatgtcatcttgatgattggtgatggcatgagtcttatgcacgtatattctgcctggacagccaatcgaggcaagttgtttttggataactgccaggtagtgggtttgtctaaaacctattgtgccaacaagctgattacagactcgggagcgggtggaacagccatagctacggggcagaagacaaactatcattctgtgggtgtagataccgaaggacgtcctttgaaatcattggtagacctggctgctgctaaaggtaaatcgaccggtatagcggtgacttgccgtctgtgggatgccactcctgctgatttttgttgccataacaaggatagggatgcggaagctgaaatcgtagcagattacgttaattgcagtgccgattatgtattcggtggaggtgccaagcttttcgaaaaccgtgaagatggacgtgacttgtttaaggaactacgcgataaaggatttcagactcctcgcagttgggatgaattggctggcataaagagtggtaaggtatttgccgtaccttatcccgtcgatactcctcttcctgctgaacgtggcgaccttttggcacgtgcttcattgaaaggtatcgaattgctggaccaaaataaaaacggtttctttatgatgatagaaggttcgcagctggatgactacggacacttcaatgacattgatttgctgatgcaggaaacacatgactttgaccgtaccgttggtgctatttatgagtgggctgccaaggatggagagacattagttgtagttaccgcagaccatgaaaccggtggacttacgctggtggacggtgacctggcagaaggcaaaatcgtatgtaaattttcaacaggaggtcatagcggtgtaatggtgccggtatatgctttcggtcccggtgcagaggagtttaccggaatctttgagaatactgctatctttgataagataaagaaattgcttaatttgtaaatctataaatacctatttcccatgttgaaacacattttattggtaggcttgctttctttctccgccctccctttactgaaagctcaaagctgtggcaatgatgagaagtatcatctgccttacaagaatacatatgtaaaggaaccattggtcaccgaaaatgagtatcgtgtggcaaagcctgagacgattgtgccgaagagcttcgaagaagcccggcaaattcttcccaaccccatttggggtggacatgacaaggaacttgaaatgtattggaaggcatgggaaatagctatcggcaatattcgtgctcctcaagcaggctcgggttttgtctcaagctatttggatacagcttataatggtaatatctttatgtgggattcctctttcattctgatgtttgcccgttatggtactcgtttctttcctttccagaatacgctgaacaacttttacgccaagcagcatcccgacggtttcatttgccgtgaaataaaggcggatggtgccgattgctttgaacgctatgatccggtgagtaccggaccgaatttgatgccttggtgtgagatggtctatttccatcagtttggtgatacggaacgcctgcacaagatatttccggtactttgtgcttattataagtggttgaaattgaaccatacttggagaaatggaacctactggtcaagcggatgggggaccggcatggataatatgccccgtgttccgtcggaatacagccctatctacagtcacgggcatatgatttggttagatacaaacctacagcaattatttactgccaatttactacttgagatgggcttttatctggaacgttggcaagagatagaagagtttgaagacgaagccaaaatgctgggaaaatatatccatgacaatctttgggatgaaaagaccggtttcctttatgaccagtatgctgacggtacgctctgtacaaccaagggaataggtgcctattgggctctgtttactgatgtattggattctgtacagttggaccgcatggtgaaggaattggataatcctgccacattcaaccggaaacaccgtattccttctttgtctgccgataatcccaagtacaaggagaatggccgttattggcagggtggcgtatggccgggaactaattacatggtgatgcagggccttgtgcagaaaggttatggtaaactggcacgggagatttgtttgaatcattatgcccaggtgtttgaggtctataagaagactggaactttttgggaatattatgctccggaaagtgctgagccgggatttatggcaagggataattttgtgggttgggcaggacttcctcctattgctgaattgatagaatttattatcggtattcggggagattatgccaaaaagcagattatctgggatatgaatttgacggagattaacggcatagaacgctatccttttggtcccgaagggcttatctccttaaaagctgaagcacgccgttctgcaagtgatgaaccccgtatcacagtagattctaatattgattttgaactgtgtgtactctatggtggaaaagagaaaaagataaatgtgacatccggtaagcatacctattaaagaagaaatcaatcatgaaaaacaatatgtcaagacgccaatttctgaagactggcgggcttgccttggctgcaatgacctttcagcccgcttccgtattatcttcatccgggactttcaaccagagatatgtttcgttgcgtccttctgcaagcaaaaggagcttcatttcgaaggcagtagatgctgctattgaagaagcaaagcctaaaataaaggacgagaagttgcgttggatgttcgagaactgttttcccaatacgcttgacactactgtcagatatagagtgaagaatggcagaccagatactttcgtcattacaggtgatatagatgccatgtggctgcgcgactcttcagcgcaagtatggccctatctgccgttgatgaagaaagataaggacttgcagttgatggtggcaggacttgtcaacagacagactgaatgtatcttgatagacccgtatgccaatgccttcaacgacgggccgttgggcagctattgggaaaccgaccatacacaacatatggttaaggaactgcatgaacgcaaatgggagatagattctttgtgctatcccattcgtctggcttatcattattggcaatacacggaagacacgtctgtgttcgatgaaaattggcataaagctatgctgctggtggtcaagacctttaaagagcaacagaggaaacaaggcttaggaccttatagctttacgcgcgattgcgaccgccctacagattcgcagattaacaacggatggggagcaccggtaaagccggtcggcttaatcgtttcttctttccgtccgtcagatgatgctacacaatacggttttctgattcctgctaatatgtttgcggttgtgtcattgcgccaattggctgagatagaggataaagtttatggaaacaaggacttctccggagaatgtataacattggcagatgaagtggatgcagctatccgtaggtatggtactttcaatcatccggtttgtggacgtatttatgcctttgaggtcgacggttttggtaacgcgctttgtatggacgatgccaatgtacccagtttgctggctgcgccttatctgggttattgttcttttaaagatgcgatttatcagaatacccgtaaaatgatatggagcggcaataatccttatttctttaaaggaaaagccggtgaaggggtaggaggccctcatgtgggattgaattatatctggccgatgagcatcattatgaaggcttttacaacggatgattccgaagaaatacgtgcttgtctgaagcaacttcgtgatacggatggagggacgggctttatgcatgagtctttccattcggaggatgccgcggactttactcgttcctggtttgcctggacaaatactttgttcggtgaactgatactgaatacaatcaaggaatatcccaacttattatcccaaatactatgaagataagatattggttactggctatgtcattcatttttctctcttgtgggagagtggctgatgatgtagcggcaaactatggtattatacccatgccgaatgaacttgctccaatgcagggagtgtatgtcctgcaaggggaaaaaacagtggctgtcccttccggggaagccgcgatgaaagtttttcattatttggaggatgcgttgaaaaacacttctgtaacgctgaagggtatttcggaaacgggaaaggccgatatttgcttatctatagataattccttgcccgatgaggcctatacattggaggtttcttccgataggataaatatatcttccaatgaaactgccgccggatttttttatggtgtccagtctttgctgcagctcatgccggcagccatttatgatggtgaccggaaatacgaaggaaagattaggattcctgctgtcagcattacggatgctccccgtttccctcatcgtggggctatgatggatgtaggacgtaattttctgcccaaagaggaagtgctgaagtttcttgatttgatggcattctataaattgaataaattccattttcatctgacagatgaccaaggatggagaatagaaataaagaaatacccgaaactgactgaaataggttcttatcgtaaacagactcagataggacactctgattattattttccacggcgttacgatggaaaagaaaagagaggctattatacgcaggaagaaataaaggaaattgtgaagtacgcatccgaccgtttcattacggtcattcccgaaattgaaatgccgggacatgcatccgcagcactggcttcctatccggaactttcttgcggactgggaaagacttatgtggtgcgtgattattttgatgtttttgatgaggtctattgtcccaaagagcatacatttgaattcttacaaaatgtgctgaccgaagttatggaactcttccccagccattatatccacattggtggagatgagtgtcccaagaaagcatggaagaagtgtgcccattgccagcatttgatgaagtgggaaggtctgcccaacgaagaagctctgcaaagttggtttatccatcggattgagcaatttgtgaacagtaaagggcgtgacatcatcgggtgggatgagattctggaaggagggcttgcccctaatgctaccgtcatgtcatggcgtggcgagaaaggaggtatcgaagcggctcgccaacggcataaagtcattatgacacccggcaaaaagtgttatttggattactaccaggaaagtccggaatttgccccgttggctatcggcggttttcttccgttggatacggtgtacaattataacccgcttcctgctgaactgactccggaagaacaagcttatataataggtgtacaagccaatatctggggagagtacatacagactcccgaatattttgaatatatggctttccctcgtttgctggctatgtcagaggtgcaatggacacagccggaacataaggacttcgagtcgtttgcccgtaggctggataaggagtttgaacgattggattattgcggagtgaatgcttgccgtaacttctatgaagtcaatcaggctggtgcgtggaacaagtcgcagcagacttatgaggtgactttgaacaccttctgtccggatgccgatatttactatgcggtaaatgattcaacggtcaacacttcatcttccctttatgagactccgataccgttggacgaggatgcaactatttattcggcagtttacagaagcggtaagccgctagggaaagtgacccgcaagagttttgctgtaaacaaggcaaccggatgtgactatacttgtaatcctaaagcaggatgggaacacttgaataaaggcttcgggctgactgatggacgacgtggctatgcccgcgacatgcgtcgctggattagcttctaccaggatactgtacagattgtagtggaactgaagaaacctcaaaaagtcaaggaagtggccttttcttctttatggcggccggtaaatgagatatggccggcaagagcgatgggtgtctctgtttcaatggatggtcagacttttattccggtgggcactaaacggctgacttatgattttagcttgacggaaggcacccgttttccggcatctctttcatttgccgaaacggaagctacatttgtccgcttggaattattgagtggtggcttgtgcccgaaaggatattttcatgaagggttgcagagtgagttggcaatagatgaaatagaaatatattaatctcaagaaattatgaagaaaatagttgttcttttagttgtactgttgggctgtatgccggtaacggcttttgcgcagaagcaattcttttttaaggatggcaggtttgtagtagcacagtttacagatttgcactggatgccgggttctgcaaagtgtgccgaaacggcagctactatccgtgctgtcctggcagccgaacatccggacattgctatactgagtggggatgtggtgaccgatgaccctgctatggatggatggaaaagtgtagtggatattttcaatgaagccaagatgccttttgtggtgatgatgggaaaccatgatgcagaatacttgacgcgcaatgaaatctatgatttcctcttgaagtctccctactatgtgggggcaaaaggccctgaagatattatgggatgtggtaattgtgtgatttctatttatagtccggagaagaaggaccaggtagaggcattgctctattgcatggattccaacgactatcagcctaataaaatctatggtgcttacgactggattcatttcgaccaaatagaatggtacagaaagcaaagtaaacactttgcagagaagaacggtggtaatcccgttcctgctttggcctttttccatattccgctgattgaatacaacgaaatcagaggtgacgggaaaacttatggcaatgacaaagaaggtggagttgcctctgctaatatcaattctggtatgtttgcttccttccttgacatgagggatgtaatgggagtatttgtaggacatgaccatgataacgattttataggaatagataaaggtattgcattgggatacggacgggtgaccggtgcggatgcgtatggagagttgacgagaggagcccgtatcattgaactgtacgaagaccaattcaaatttgacacatggatttccactccttcgggaagggaggctgcctactattacccttcaggtctgaattcggatgaggagcagagtatggcttatttgccggctacgggaacttctcccaagaagcagggcgtggcatatacctattatgaaggcaaatgtaaacgtgttgccgatattgccgcctgcaataaagtgaaggaaggggtgatgaagaacttctcgattgaagaagtagccgtccctgatcattttgcttatgatttccgtacgttggtgaaaattccagaaaggggagtataccgtttctatactttttccgatgatggttctaaactatacatagacggtaaattgattgttgataacgacggtggacacagcggacgccgtgccgaagggaaagtcgctctcgaagcagggtaccacgagttgcatctgctgtatttcgaagattacatgggccaggaattggaagtcgggtattcgggacggaatgttctggaaaccgtgttacctgataccatgttgtttgtaccggattaaatcagcgctggtaactctttgtctggtactctttccgatattcattgggagagactttcttcaaagctttgaattggcgggacaagttcttcagattgtttattccgacttgttccgccacatctgcaatcggagcatcactggccaacagcaattgggcaaagcgttccatcctaaggttgaagatgtatttgtggatggattgctgggtgacttgcttgaagcgaatctccaataaacggcgtgataatggtacttgtttcactatatccgatacagtgatatcagctgctatattctgatggatatatttcagagcggtttggatatgggcatcggtggtagaatagaagtcggtcgaaagccggttgattatattaactggttggagcactacgtcctgataagtggcctcctcatcattcaatagatgttctatgagggcagctgcctcaaatccgcctcttacaatgttttggctgatactggataggggagggtctgaaagattgcatataatctcatcattgtcgactcctaatattgctatcttgtcgggcactctgatgttgttgactttacagatttccgtaatgcggttaccttgattgtcatcgcaagccatgagtgccgtaggttgtggcaatgactttaaccagttgagcaggggcggtgcttcataaaaccataagtcatcaagggattggtcctgataagaatagaaattgtttccaaacccttgggctgctatacattcatagaaaccctcgcaacgttcttgtgaccataccgtatcgcgataaccatagaatgcgaagttctgaaagcctttactcagaaaaaactctgctgccattctgccggtcttgcggtaatcgccggtgatgtttggaatattgctgaaccttgatttataatcctgggccaatgcgataattccgttttcacggaatagctccacgttgtcatcattgtcaaatctgccgatgattgcatctgcatgccatgtctttgcccatttcaagactccttctataccatgactgtttttgtaggagggtggcatacggcatactacccatggctcatggcttttggaataggccaataccccctttagcagattgtacgaaaaggactctgtaaaatcggtcaataatatcaatcgaatcatagcagttgactaaatgtaactgattgttacttatacaaatgttagcttaattgacaaatataggattttatttctttttcttcaaatcttttccctcatatttgcagattgcttcaatccatttttcttccagtggcttggactcgtgtttggcgaggtcgaaggctaccatgacggaggtacatacgcattttacttcttgggtttccgtatcaatgacccgttgggcgaggtggaagcttttggttcctatctcagtgacggcagtttgcacggcgatatggtccgaaccataaatctgtgcgaggaagtttgcttcaatatggacgacaacgataccatccttttcccaatctacatccgggcatacggaagcgaaatattccgtttttcctaaatcataaaaagagaagtaaacagtgttgtttacatggccgaatttgtcgacgtcattgaagcgtagttgtatgggcagggtgtggttaaattgaatttcttccattgttttctcttaaactttgtttataatcgctgcaaaaatactatttttgcgtgttaatccgtgaacttatatatcaagaaatgatagaagacatcaaaaaagcctgccaggtaatgagcgagggcggggtaattctgtatccgacagatacgatttggggtataggttgtgacgctaccaatgaagaagcggtgcgccgtgtatatgaaatcaagcaacgctctgacagtaaggcgatgctggtattggtagattctccggtaaaggtggatttctatgtgcaggatgttccggaggttgcctgggatttgatagaactggctgacaagccccttaccataatttattccggagcgcgtaatctggctcctaacttgcttgccgaagatggtagtgtaggtatccgtgtcaccagtgaggcattttcaaaacggctttgtcagcagttccgcaaggcgatagtctctacttctgccaatgtcagcgggcaaccgtctcccggtaacttcagtgaaataagtgaagacatcaagtctgcggtggattatatagtaggataccgccaggaggaaacgggacgcccgaaaccgtccagtatcatcaagttgggcaagggcggagtcattaagattattcgcgaataaaaggaaaaatggcagaggacaagaggagtttgttgcagcgcttcatcatatggcgcgaaaagaatatcaaggaaaagcggttcatactgattctcagttttcttgtaggtatctttacggcattcgccgcactgatactgaaagtcatcatacactggatacagaacttcctgacggataatttcaatgcgacggaagccaactacctttatctggtctatccggtagtgggtatcttcctgaccggattgtttgtccgctacgtggtgaaggacgacatcagtcatggtgttaccaaaatcctatacgccatctcgcggcggcagggacgcatcaaacggcataacacttggtcgtccatcatagccagttccattaccatcggtttcggtggttcggtcggggcagaggcgcctattgtgctgacgggttcggctatcggttccaatctgggaaccatcttcaagatggagcatcgtacgctgatgctattggtgggatgtggtgctgccggtgcggttgcaggcattttcaaggcgccgattgccggtctggtatttacgctggaggtactgatgatagatttgacaatgtcctccttgttgccgttgctgatatctgcggtgacggctgcaactgtttcctatatcgtgacgggtacggatgccatgttcaaattccatctggaccaagctttcgaactggagcgtattccgtatgtcattatgctgggtatcttctgcggattggtttccctttattttacccgggccatgaactctgtggaaggcgtgttcggaaggttgagaactccctataagaaactgataatgggcggtgccatgctgagtatcctgatattccttttcccaccgttgtatggcgaaggttacgatacgatagaattgttgctgaatgggatgagcaatgccgaatgggacacggtgatgaataattccttcttctacgggcacggcaatctgttgctgatatacctcatactgattattctgttcaaggtctttgcctcgagtgccacgaatggcgggggcggttgcggcggtatcttcgcaccttcgttgtatctgggttgtattgccggttttgtcttttcacatttcagcaatgaaatagagatgacggcttatctgcccgagaagaactttgccttgatgggaatggcgggggtcatgagtggggtcatgcacgctccgctgaccggcgtgttcctcatagccgagcttacgggaggatacgacctgtttctgccactgatgattgtttccgtcagttcttatcttaccatcatcatgttcgagcctcatagtatctattccatgcgtttggccaagaaaggagaactgttgacgcaccataaggacaaggccatccttaccctgatgaagatggagaatgtggtggaaaaggattttgtgaccgtgcatcccgaaatggatttgggcgaactggtaaaggccatttctgcctcgcatcgcaatgtctttcccgtgacggataaggaaggggtgctgattggcattgtcttgttggacgatatccggaacattatgttccgccaggagttatatcatcgctttacggtgggaaaactgatgacttcggctccggcacgtctgtatgatacggacagtatggagcgggtgatgcgtacctttgatgatacgaaggcgtggaatctgccggtggtggatgcggaaaacaaatacttgggcttcgtgtccaagtcgaagatattcaactcgtaccgtgaagtattggtacatttttcggaagactgaggactttttggtatttactattttactatttacaagttactatttgccgttcggggtgatggggcattgtaaatcgcaaagaagatgcttcgtacattgtaaatggtaaattgtaaatgggcaaatgagctgcctcgcaaatggtacattgtaaatggtaaactgtaaatgaaatggtggaaaagaagaatttgaggattgtatatatgggtactcccgactttgcggtggaggctcttcgttgcctggtagaaggaggttacaatgtggtgggtgtcattacgatgcccgacaagcctgccggacggggacataagctccaattctctccggtgaaacagtatgcactggaacataatcttccgcttcttcagccggagaagctgaaggatgaggcttttgtggaggcgttgcgtgcatggaaggccgatttgcagatagtcgttgccttccgcatgttgccggaggtggtatggaacatgccgcgattgggcaccttcaacctgcatgcttccctgcttccgcagtatcgcggcgcagcccccatcaactgggcggtgattaatggtgatacggaaacgggcatcaccactttcttcctgaaacatgagattgacaccggtgaggttatccagcaggtacgggtacccattgccgatacggacaacgtgggtatcgtccacgacaaactgatgctgttgggcggtcgcctggtggtagaaaccgtagatgccattcttgccggtacagtgaaaagtattcctcaagaagaaatggccgtcgtgggtgaactgcgtccggcaccgaaaatcttcaaagatacttgtcgtattgactggaaccgcccggtgaagcgtatttacgattttgtacgcggcctttctccctatcctgccgcttggacggagctggtccaacccggtggagaatctgttgtggtaaaaatcttcgagacggagaaaataggggaatcccatcaactggttcccggaaccttgcagacagacgggaagacctatatccgcgttgctgccgaagatggctttgtcggcatccgctccctccagcttccgggcaagaagaaactgaaaacggatgaactgctacgcggcttccggttgacggaaggatacgtgatgaaataactgattgtcattcaatgacttcctactgcaaaactactgcactcgttttgcagcgtcactgcaaaccgctttgcagtgttgctgcaactaatatgcagtgtgactgcaactgctttgcagtgctactgcaacacgtttgcagtgacgctgcaaaaggtatgcagtaagtttgcagtgagagttttgatttccaatgttaggctgaattaaatcttttctctatatttgtacataacaaagttcgtaaactttagaacataacattatgaaaccaatcatatccccttctattctctctgccgattttggttatctggcacgagacattgaaatgattaacgaaagtgaggcggagtgggtacatatcgacatcatggacggtgtgtttgtccctaatatttctttcggattcccggtactgaagtatgtggcaaaactgtcgcagaagcctttggatgtgcatctgatgattgtacagccggagaagtttattccggaggtgaaggctctgggagcccatgtcatgaatgtgcattacgaggcttgtccgcatctgcaccgcgtggtgcagcaaattcgcgaagcagggatgcagccggcagtaacgattaatccggcaactcccgtgtccttgttgaaggatattattaatgatgtatacatggtgctgataatgagcgtaaatcctggcttcggcggacaaaagttcatagagcattctcttgataaagtgcgcgagttgcgtgaattgataacggttaccggttcgcaggccttgatagaagtggacggtggcgtaaacttggaaaccggttcgcgcctggtagaagctggagcagatgtactggtggcaggcaatgccgttttctcggctcccgatccgaaggaggccatccgtgcattaaggaatctgtaatccgtcttctggattgataatcgacagctggcaacggcatcctttccttcgactgttgatgccgttggtagttggtattttgtgtggagatgcgtttccacacgtgctttctgcatgggagtatgtggcaggttttctgctttttctttttattataggtagatacaagcataccggatgggtgtatggagcggcggtataccttttcttgggtggtacggggggctgcttgatgagttggcagcagggaaagacggtatttcccttttcgggcaaacctgctgtttatagggtttgtatccgcgagcatcccgaagagagggagcgcagcatattgtgcagggttgccctgctgggagaggtagagaaggatacagttacgggttgcccccggaatcatctttttctggcttattttccgaaagattctgctacggtcactttgtgccgtggtgatgagttgttggtatctgtccggcttgctcctccggcgaacaatggtaatcccgacgagtttgactatgctcgctacctgaggcggaaaggttatagcggcacggcctacgtggctgacggacattggcggaagacggggcatgatgcctcccgcactgtcagccaggtggcactggattatagggcgaaagtagttggcttataccggagtttgggttttgaagctgatgaattggccgtactttctgcgttgacggtgggggataaagaggaactgagcgatgatattgtggagacctactccgtctcgggagccagccatgtactggcactttcgggattgcatatagggtttctgtatgctttgctcttgtttgtgcttcgtcctttgtggaggcgatggcggcggttaaaacctttgttgcttttgcttctggtccttttcttggtgagttttgcttttttcacgggattgtcttcctcggtggtgcggtcggtcgtcatgttctctttgttggcgtttgccggtttgcagccggaaaagccgctgactctgaatacgctggcggcaactgctttcctgatgctgctgtgcaagccgatctggttgtttgatgtcggttttcagttgtcattctcggcggttgcagctattgtacttgtacagcctaagttgtatgccctttggaaggttgacaatcgtttcctgcgatatttgtggggacttatgacagtgtccatggcggctcagctgggtacggcccctttggtcattttctatttctcccgtttttccactcattttctgttgactaatctttgggtaattcccatggtgtcgttcgttctgtattctgctgtctttctgttgatgcttacgccgctgccttttgtacaacatctgtttgcaagggtagtagaggcattggtacatgtccagaatgaagtgctccgctggatagagcatcttcccggcgctgttgtcgatgatatttggctggatatatggggtgttttgctcgtctatctgttcttggggatggcatattatggctttctacgccttacggtacgtagagtctgctttgcgttgctggcattgttggcagtggtttcctggcattccctttccatcatgtccaatgttccccggcaggggattgctttttatagcgtgagaggctgtcccgttgtccattgtatggcagacaaccgtcattcttggttggcatgtaccgatagcttgccggatatgccgcgtttgtgccgtgccctttctccgcattggaaccgcctgcgtctggagactccccgactggttgccggagattataccacttccggcttatccatgcgcaaccagattgtctcttacgccggtaagcgcatctgtcttctttccgacaaccgttggagaaacaagaactcttcccgtcccctttcagttgattatttgtatgtctccaaggggtatcaaggtgggatagaggaacttacttcgctcttttccatgggcatggtggtgcttgacgcttctctttcagactattatcagaataagattgccaatgattgcgttcgcttaggtattccctatcttcttctttctcaaaaaggttcttaccgcatattgttataaatcacaaacttttcgtacttttgccccttcaatttgttataaacgccaaatagtaaatagtcaatcgtcaaatagtaaataagaatatgttgaccaaagtaatagaacaatccaagatagaccatttcaccaaatggtttgaccgtgcagacaagatagtaatagtttcgcatgtgggtcccgacggggacgccatcggctcttctctgggcttgtggcacttcttcagctcgcagggaaagacggcgaatgttattgtgccgaatgctttccccgacttcttgaaatggatgcccgggagcaaggacgtccttctgtacgaccgctacaaggagtttgccgacaagctgattgccgaggcggatgttatttgttgtctggactttaatgctatccatcgtatagatgccatgggtgacgctgttcttgcatctccggcaagaaaaatactgatagaccatcatctccatccggaggatttctgcaagattatcatttcccatccggagatatcttccacttcggaactggttttccgcctgatttgccgtatgggctatttcagtgacatttcaagggaaggagcagagtgtatctatacgggtatgatgacggataccggcgggttcacctataattccaataatcgggaaatctatttcatcatcagcgaactgttgtcgaaaggtattgacaaggacgagatttaccgtaaggtgttcaatacttattcagaaagccgtttgcgcctaatgggatatgtcttgtcacaaatgaaggtctatccggactatcatgcagccttaatttctctgactaaagccgaacaaagccagttcgactatgtgcgtggagatagtgaggggtttgtgaacattcctttaagcatcaaaggggtgattttctcttgcttcctgcgtgaagatacggagaagccgatgataaagatttctttacgttcggtcggtacattcccctgcaatcagctggctgccgagttctttggcggcggcggtcatttgaatgcttccggcggtgaattttatggaacgatggatgaggcccgcaaggtctttgagcaggctttggagaaatacaaaccgctgctgaatgccaaaggataaaaaaagttcagttgtaaaggttaaaagttacgaactttctatccgcagctttcaactttcaaggaaatcagatacttttgtacgaaattactaaataacagaaatgaagaaacttactttattcttttttgccttacttgcagtttgtttagccttccaggcatgcgataattctaaaacttatgccgaaatgcttgaggaagaaaaagatgccatcaaagcatttatcaaagacagtagcattgtcgttatttctcaaagtgaattctatgcgcaagattcgacaacggatgtaagcaggaatgagtatgtgcagctggcaagcggggtgtatatgcagattgtggataaaggttcgacgaatcctgcagatacagttaaaccgaatgatttgattttggtgcgctttgaagaacaagggttgatagctgttggaggggtgaaatcgtatataaccaatatgaatagtccgactgttgtggatgagtttagatattctgttacttcttcgtctattgccggacttttcactcaaggctatatgcttatatatcatggttcgtctgtacctgctggctggctggttgcgttgaattatattcgtaacggagcacatgtgaagctgattgttccttccaagatgggacagtcggatgctatgcgggacgttcatccttattattacgatttacataaactccaaatttggaactaaccgataaattttaaatcattaacctatgactctaatcaaatctatttctggaatccgcggaacaattggcggtggtgctggcgagggattgaatccgctcgacattgtgaagttcacttcagcttatgctaccctgattcgtaagacgtgtactgtaaaaagtaacaaaatcgtggtagggcgtgatgcccgcatctctggcgagatggtcaagaacgtagtagtcggtaccttgatgggtatgggctgggatgtagtggacattgatttggcttctactccgactaccgagctggctgtaaccatggaaggtgccagtggaggtattattctgactgcctcacacaatcccaagcagtggaatgcgttgaaactgctgaatgaaaagggcgaatttctgaacgctgccgaaggccaggaagtactccgcattgccgccgccgaagaattcgactatgccgaagtggaccaactcggctcgtaccgtcaggatttaagctacaaccagaaacatatcgacagcgtattggcacttgacctcgtagatgtggaagctatccgaaaggcaaacttccgtgtagccatcgattgtgtaaactctgtaggtggtattattctgccgcaactacttgagcagcttggtgttcagcacgtagagaagctctattgcgaaccgaccggtaacttccagcataatcccgagcctttggaaaagaacttgggtgacatcatgaacctgatgaaaggggggaaggcagatgttgcatttgttgtagaccctgatgtagaccgcctggcaatgatttgcgaagacggcaagatgtacggtgaagaatatacgctggttactgttgccgactacgtattgaaacatactccgggcaatacggtatccaatttgagttcgacccgtgccttgcgcgatgtaacccgcaagtatgggcaagaatattacgcttccgccgtaggtgaagtgaatgtaactaccagaatgaaggaagtaggtgccgttatcggtggcgaaggaaacggtggggtaatctatccggcaagccactatggacgtgatgccttggtaggtattgccttgttcttgagccatctggcacacgaaggtaagaaggtgagcgaactccgtgcatcctatcctgcatacttcatggcaaagaatcgtgtagacttgactcctgaaacagatgtagatgctattcttgccaaggtgaaggagctgtataagaatgaagaaatcaatgatatagacggtgtgaagattgacttccccgacaaatgggttcatctgcgtaagagcaatacggaaccgattatccgcgtttatagtgaggccggtacaccagaagctgccgaggaaatcggtcagcagattatgaaggtgattgaagacctggcaaaataagactgattgtaatgactgttatatgtcccacttttcttttggagagtgggactttttttagggagtatttattgctgctacaattcgatgactttctctatctcttcttcaaagtttggagtaaagacttccttgcctatgctttttttgatttcatcaatgctccagaaacgtcctccgtccagctcgtcactgggatgtatttcaccgtcgtagaccgttttgtgtacgaagaccagttccttttcgcgggcagactcgaagacataatgcaagacggtttcgagaacaaagtcggtaatgccgagttcttcgcgtacctcgcgtttcagcgccatctctacactttcacctaaatcgacgtgtccgcctacggaggtgtcccacttccccggttgtatgtctttccattcgggacgtttctgcagatacagctcacctttggaattgaatacatgaagatggattaccggatgcagcagtttgctaccgttatggcattcgccacgggtggcggcacctatgatgttgccttgttcgtcgacaagggggaacatctcttgattgttatcgtggttcattgtgtttagggtattaataatgatgaatctccatagctcagaaagcggaaatcatgtgccagtgcatagttataaatcttctgccagtcgccgtgtacgaaagctgatacgagcagcagcaaggtgctttgcggttggtggaaattagtcaccatagccttcacgattttgtattcatatcccggggcgatgatgatttgagtgctggtatgcagagtctccatactatgcttgtcaagataggcgacaatggcttgcagggcttctactacaggggtggtggcggccttggcagacatttcataaggttgccattggtggacgtgcaagtcttcctccgtggcttcgggattattcagtaaggtcgctccgatgtgataaaggctttccaatgtgcgcaccgaagttgtccctacggccactgccttgccgtcgtgcgctatgagtttttccaatgtgttgcgcgagacggagatgtattccgtatgcatttcatgcccttctatttcttcacttttcaccggtttgaaggttccggctcccacatggagtgtcagttcttccaattctactcctttattgcgcaatgcgtccaatacgcgtggggtgaaatgcagtcccgctgtaggggcagccaccgaacctttgattttggaatagacagtctggtaagtctccttgtcactttcctgggtttcccggttcaagtagggagggatgggcaattcaccgaagacctcgagaatgtcggcaaaagtcacttccggattattccagcggaagtttacccaatggctggttccgtggcattcgccccgttcggcggtcagggtgagtggtttgcctttcacggtcatctcacgtctcagcatgccttctttccattttttcaggttgccgaccatgcagagccaagcggtatgctcggtttgctggaagttgagggcatagtcgttcggctgtataggttctaggcagaatacttcaatcagtgctcccgtttctttccggaaatgcaggcgtgcttggatgactttggtattgttgaatatcatcaggcttcccgatggcagatactccggcagtgaagtgaatctgtcttctgaaacttctccgtggcgatacaataacagtttggactggtcacgtacggacaatgggaactttgcaatgcgttcgtccggcaacgggtagttgaattcgctgattctgatatgtctggggtcttctttcatgatggctttctctttattatatcggctgcaaaggtacggatatttgggaagatttgaagaataagggaaataattcctaactttgcaggaagaaagtaggaaaagacaaactaaaagataagttactatgaagataggagataaagttcgtttcctcagcgaagttgggggtggtgttgtgacaggatttcaagggaaaaacatcgtgttggtggaagatgccgacggttttgacataccgatgcccataaacgaatgtgtggtgatagagaccgatgattataatatccccactccggcagccaaagcggctgccaagaagaagcgggaagaagagcaacaattgcgtacgaccgctactgcggcaaggccgtctgctatggagtctcaggtttcagagcctcaaacggtccgtttggagaaaccgcagatatctgtttatcgtcagcccgagatgaaaggcggagatatcctgaatgtttttctggcttttgttccggaggatatcaaggctgtcagcactacacctttcgaggcatatttggtgaacgacagtaattattatatgtattatacctattcgagtgctgaaggaaagtcctggacagtccgttcgcatggtttgatagagccgaatacgaaacttctgctggaggagttcgaaaagtccgagttgaacgaccgtgaacgtgtgatggtacagctggtggcattcaaagataaccgtgcgttcacaatgaaaccggctgtcagtgtggaagtccgcatagatatggtaaagttctataaactgcatacattccagcagacggttttctttgaaacaccggccttggtgtatgatattgtccggaatgaccagcctgccaagcaggtgtatgtttcggcagaggaactgaaggaggctttgatacagaaaaaaacggcagatactccatccaaactgcagacggtcatcaaacgtgggggcaagaatgggattgtcgagattgacctgcatatcggcgagttgctggatgacacctgcggcatgagcaacagtgaaatattgaattaccagctggacaagtttcgtgaagtgatggaacaatacaagaaaaagcgcgaacaacgcatcgtctttattcatggcaagggggatggtgtacttcgtaaagcgttattggatgagttgaaacgtaaatattccaattgccgccaccaggatgcttcgttccaggagtatggatttggggcgacgatggtgacgattaaataaaatcaagtatttgaatagtgaatagggcagttcaaacgttggaatgccctattcattatttttgatggcttatatagctaaatattgtactatgatgtgatttttttgtttcattttaataaagcggtaacgtatgctcttttatggctgagaaatacgccttatacttgatggtatttcgcaaaaatattttaagtttgtagatgtattgaataaataatctaattacgggaaacatgggagagaggatggataagcgaattcgattttacatttattggatattagggcttgtgtttctaggggcttgtgcgcccggagataaagaggacgtatacacagagatgagagcttttgaggatttttcccgtataaatggagattctgtggccattgtgccccgcaaggtaaggttgaaggctcttcaaaagatggaagaggcaaaggatagcttggtcaaatataattatctggcaatgacactgaaaacatatttgattacttcacaacttgattcggcgcaaattgtaatccaacagatacatgcctttatagaaaggcagcatagttcctctcaaatggcagatttggaatccgaatgtttcaatatgaagggaaatatctttgcacgcgttgggaatatggattctgccgaaatttgcttccggaaggcttatgaattacggatgagagggactaggattgaagtggtgccggatattttgatgaatcttgctgatgcgaataaccgtttaggaaaattggacataggggcagcttggtataggagagctttgttgatgtgcgactctttgcatatggcttctaccaagaaacctcccatttattatggtttggcacaagtatatgttaccatgcgtgattttgaacagtgtgattactattacaatcttgcaggggaaagctatgacaatatgctgccttatgaaaaatatatttatttgaataatagagggacttcttactattatagggaggattaccagacagcgataaaatatttccaaaaggttattgatttagtcgaaggatatgatgatatgagttttgaacttaatctggggaggttgaatttaggagactgttatcttcaactgaatatggttgatttggctgttaaatatataaatgaatgccaacttttttttgaggaaatgggggtaagtactgcactatattatatcgatacgcagaaaatagaattggctctgcttcagaaagactttcaagaggcacgtcgtttattgtccgagagtgtagtccctccgggcatcgaccctgatatggtacatatccgtaataaataccttcagcagttttacgaggaaaccggcaactacaagagggcttatcactatctgcagaggaacaacctgcttgatgattctatcaggaatgagcgtgtccggatgcgtacggcagacttgactttgcgttatcagcaggattctaccttgatggcacatcgggttttgcttcaggagcagaaaaacgaggtgctggtgctgaggcagacacagtttgtcgtgtttgctgtagctgttgtatctatattgacggcggttttcctttatctgtacagcaaaaagaaacgtgctttgttgcttgcacggaatcatcgcacagtctctacacttcgtctggagaatatccgtaaccgcttgtcccctcatttcatcttcaatgtgctgaacagggagatggcggagcggaatgtagaagaaaagcaagagctttcgtcgctggtaaaactgatgcgttgcaatctggaattggcggaacaactgtgtgtaaccttggcagaggagctggattttgtgaaaacatatattaatctggaacgccgttctttaggtccggattttcattcggaactgaagatagaaaaggatgtgcagccggagcaaataaggattccgtctatgatgattcaaattccggttgaaaatgcagtgaagcatgcgttgcgcgagaaggaaggtgaacgtaatctttgggtttcggtctgccgccggggaaacggtatctgtataaagataacggataatggtggcggttatcgtccggacagtcggaaccggggcacggggacgggaatgaaagtcattatgcagaccattcagattctcaacaataagaataaggaggccattgatgtttcagtgcacaatgtctctctacagagtggtgagatgggatgtgaggtgactttctggttgccagacaactacgattacaggatttaaaagaaccgtttaatctcgttttttgcaaggataggcatatttacagacaaatagtccgtaaatgaccttctattgctttgtatgggagtaggattatgtatatattcgcgagaagaaaaacataaaaggaacatggataaatataaggttgcaatagttgacgacgatgaggtggctcttgagaatctgagttttgaattgggaaaggatgcacgcttctttttgaaaggaactgcccgtaatggtaaacaagggaaaaaactcattgccaaggtacagccggatttgttgttcttggatgtggaactgccggacatgactggaatggaattactgcaggaaatacgtgacagtgtttcgtggaatatgcggattgttttctatacggcttatgataagtacatgattcaggctatccgggaggctgcgttcgactatctgctgaaaccttttgaagagcaggagttgcgggatattcttgcgcgttttgtagagcaggcagaggctgggcagagaatgtcatatcccattggtgcaccgttgcataccggacagacatttatcgtatttacgccaactaatgatatgcgtgcgttgcgtccggctgaaatcggcttttttcgctattgttccgagcgtaaacaatgggaggtgatactaaacaaccagccgccgttggtgttgcgtcgcggaatgactgctgagcagattactcaatattcatccagtttcgtgcagatacatcaatcgtatattatcaatattgattatctgatgattataaaggatagcaaatgcatgctttatccaccatttgacaaagtgacggaactgctggtttccagaaagtataagaaagagctgcaagacagattctgcttgtaaagtgataagaattatttggttagggagttgacgccgcaggttttggtggcgttgacgtaaagaaaaggcattgaacctctaaagtccaatgcctttttatttatcaaatactattttcgtatttatcagaagcgaagtttatttcacttcgatacctttgttctgcagtgtgacgttcaatactctggcataatcagcatactgcttttcattcagagtctttttcatcaacttcagattaccataaactgcattacggagtaacttctcctgattcttcttggaatttgtagcgcgttccatctgttctgtaaaatattcgcagatgtttgccacttcttcatgctggttggaatccagattcaaatacttgctcaactttgttatgttgatgttaccttcccattttgcagttgtaggttggtttcctgctgcaaatgttgtagcagtcaggcagactgctgccactaatgttaatcctaaacgtttcataatacctactttttaattgttattcctaaaaactaatctcaatctaatacctattgaaaactctctaagcgcttagctttttctttttacctatgcaaatataggtatatgttttataacacaaaaatgaatacgtaaaaaagtgtagtttataccttcatttcttgacttaaatcaattttgtagtgtgaaaatgctttatttggatgctttttgtaatacgaatgtaatgtaggttaaatgaaattcagtttattgtaatggataaaaggatttttattagtcaaaatgttattgccaaacagtttcgggcaattctatgattactctgctttcagagcagactcccacaaagcctaatccacctatgacgttgcaaggcagactgataggttccattaaagtatcgtcgtaatccccatcatccaggcagtttaaggctttcaggtagcggtattcggcttcagtgatgctaagcagccgtacggtgatggtttgtttgcgggatatatggtagtagtagtgtccctctaccggataatattcttggtagagaggggtatatacttttaatgtggcatacgaatcacggaaagtgttatcattgaatatgttgtatttgttatttatggtgggaaacaattcattttcttcatcatcatagttgccagggtggccgtcagtcagtataacatcttcccggttgatgatttcgttctgtcggggagcaaggatggtagtgtctctgggtatggaggcccaatgccaagagccgtcctcgtcttccactttgatgaggctgccgttttcatcttccaggtattctttccatttgcaatagtaactacggtcattccaaatgtccagccggtagtagttcttctcgttggggcggtcttgcaatgtaattttgtattggcggtaaagggtttgtccgctgtactcgcgcaggtaggccaagcaagtgtccacgtgcaggctctctatcggttgtggcacggtgacctcggcactggcatggtatttcccgttttcggcagtggcttccagacgtatgttgtcgccgggatgcagtgtgctggtcagacgatatttcttgaaacgtatacttttcagtaatgattcataaatgtccttatcaagttctccttccagatgcccataaatttcttccggggaaaccgctttcggagtttctgctattttgccattgatgtagaggaaaagagttgcttcgttcaaatgttcaatactatagccctcgcctaaatggagatagacatcattctcagcttgtccggtttcgagcaaggcgttcatgatgatttgcggatcttgttgtccgggattgtaaggaatctcgttttcgcaggctgttaggaagcctacaatagttatgtatataataaggtgtaatttcatttttgttttcatatgccggatttgtttttaaaatctataagtataggtaacagaaggaatacaaggcagtattgttattttcttgatgacagtttgagctttcttctgcccggtatttccatgataaatactttcgtagaaatcatcgtagtatacgttgtatccatttttgtatttgctgtaaacgatgttcggattcatggcattgtatgcattgtagatactgatattccaggtacgcataccatgtttggtcttcttgttgaagttgacgccgagattcaaacgatggctggcgggaaggcggtaattgttacgccgggagatgtaaccggtttcctcaatagagccatcgggccggatgatgattgttgccttttcggggatagtgatacatccaccggtattgaatatccaggaagctcctgcatcaatgcggtcactgaacttatggctgagattgaggctgatgctgtggcggcggtcatatttgtaggggaaccatcggccttggttgatggtaccgttcttaaaacggtgttcggtcttggatagggtatatgccagccagccggtagtcttgcccaatgttttctgtaccatcagttccagaccgaaggagaggccttcgcccatttccactttttcttcccagttggtagaggtgccgaagaaggatacaccgtcttgatattcaagtatgtgtttcatctgtttataatatccctcgacggagaactcccaacccggcagtccggaatagtagcctcctatggagaactggttggcatacatcggactgatgtctttggtaatgggtacccagaggtcggtaggcatagacagcggagtagaggacagcagatgcacatactgtgccatgcacgtataggatgctttggcagaatatccttgtccgaggtcatagcgggcggaaaggcggggctgcagcgaatagtagcttttcccttgtgtgtggaacagcgatgtgcgtacacctgcattcagactgaacctggcgtttacattgaaattgtcttcggcgtaaagggagatttcttgtccgcgcatggcatggctgttgctggtattgtaaaccgtatcttcctggagggcgccattatctatatcttgtattttcgaggtagctattcccggacggaacgtatggtggatgtactctgcaccgaacttgatgtggtgctgcggcatgggggtgtagtcaaagtccatacgcgcactccagtcacggataccggagttgaacttggaggagtaatagtatctgtcttgtactttattggcgacagtataggtatcttccatgtttccgtccagccccatttcatatttgttgtatgagacggtggtgttgcaaaacagcttgctgttgaatacatagttccagcggccgtaggcgatggtgtttccccaattcagatggctgttgtccttggaataattcttaatgctgttgtcgtaattgtcaccgtggtagtaactgtcataatgatagtggtctttccccttgtagaaactgaggaagatgcggctacggtcgctgaacttatggttgacctttgcattgacgtcgtaaaaatagtagttgtatttgtcggaataggtgtcgtctttgtctacaatgagatttttgaagaatagggtggggatggctcgtgcgctgaaactgaaggaggtccgttctttccagatagggccttcgatatgcagtttgtccgtcagcaggcctatgctgaatgcgccgtggtatttatgcatgtccccgtcgttggtccgtacatctactatagacgaaagacgcccgccgtagcgggcaggaaaagaacttttgaagagtgtggtgttctttaccgcttcgggcgtaaagatggagaatactcccagcaggtggtctgcgttgtaaactggaattccgtccagcataaccaggttttggtcgggacctccccctcgcacatacatgcctgcaaaaccttccataccggcttgcacacccggcatcagctgaatggtcttcagcaggtcggcttctcccaatatggacggggtatgcctgatttgtgtcatcggtatctcatgcgctcccatggctgtgctttctatgccggcctcccgcttgtccgagagcaccacgacctctgccagctggttattgctgtccagcctgacgttgagtaaggtgtctttcgtcagttcgaaccggctatgccggctttcgtagcccaggtaggagaaaaccagttccgtttccccttccggcagggtgagggaatagaaaccgaaaggattggtggcagtacctgtggaacgacgactctcaaggatattggcaccaatcagcgtctcggaagacgctccgtcggtcacgtatccgctgatggtgaacttacggctaacgggtttctgcggcacgggccgcttatggagtagaatgtgctttccggatatttcgaacgttatgggttcgttttcaaaggcacgttgcaatatctcactgatgttcttttgtttcatctccagtgtgatgcggtgcgtgagctttacttcttccccatagatgaaggagaatccggttgcattttccagttgcttcacgaaactctctaaagttgcgttacggatattcaggtttatacgtgtttccttgttttgtgcctgtgcatggagtgaggcgcttaaaagaaccacacacatcagaagtacggttctgatgcggtggtgcgaacagatagtagagctggtcattgtcagttaagtttagtagtaaggataatagtgttgttttcttttttataggtaaagttgccggcgtccttcagtaggtcgaggatttctgtaagactctccccttcgcggaaggtagctgtcatatgatagttcttcaggtaaggggggagaaacgatgcgtgtcaaagt

SEQ ID NO: 4398 - DNA, 1618 bp, Unknown
  gut microbiota DNA sequence
cgccaccatcctgcgctcattcttcctttaataaacaatgtatggctgaatacccgataaacaagggtatcggccgtccggtagagttcaagggcttgaaggctcagtacctcttcatcttctgcggaggtctgctggctctcttcgtcctgttcgtcatcctctacatggtcggcatcgaccagtgggtatgtatcggcttcggcgcggcatcgtcctccgtcctcgtatggcagaccttcgcgctgaacgcccggtacggcgaacacgggcttatgaaattgggagcggcacggagccatccccgataccttatcaaccggcggcggatcacccgattattcaaacggaaacgaaaggaagaaacgacatgaggaatacatccaaaatgacaacactggaaaacaagttcccgctattggcggtggagcaaggctgcatcatatccaaagacgccgacatcacggtggctttcgaggtggaactgccggagctttataccgtgacgggcgcagagtacgaggcgatacacggctgctggtgcaaggcaatcaaggtgctgccggacttctccgtcgtccataagcaggactggttcattaaggaacgctacaaacctgaattggcgaaggacgacatgagtttcctctcacggagcttcgagcgtcacttcaacgagcgtccgtacctgaagcacacgtgctacctctacctgaccaagacgacgaaggagcgtaaccggatgcagagcaatttcagcacgctgtgccggggacatatcattccgaaggagctggacaaggaaaccgccggaaagttcatggaagccgctgaacaattcgagcgtatcatcaacgacagcggtttcgtcaggctgcgccgcctctccaccgacgagattgtggggacggacggcaaagccggactgatagagcgttacttctcgctcatgcccgaaggcgacgccacgttgcaggacatcgacctctcggcaagggagatgcgcatcggcgacaaccgtctttgcctgcacaccctgtccgacgcggaagagctgcccggcacggtggctaccgacacccggtatgagaaactctccaccgaccgctccgactgccgcctctccttcgcatccccggtggggctgctgctctcctgcaaccacatctacaaccagtacgtgattatcgacaacagcgaggagaaccttcaaaaattcgagaagtccgcaaggaatatgcagtcgctctcgcgctattcaaggagcaacagtatcaaccgcgagtggatagaccgatacctgaacgaagcccattcctacgggctgacttcggtacgggcgcacttcaatgtcatggcgtggagcgatgacgcggaggaactgaaacacataaagaacgatgtgggaagccagttggcgagtatggagtgcgtgccacgccacaacaccatcgactgcccgacactttattgggcggctatgcccggcaacgcggcggactttccggcggaagaaagtttccacacctttatcgaacaggcggtatgcctcttcacggaggaaaccaactaccgcagttcgctctcgcccttcggcatcaagatggtggacaggctt

SEQ ID NO: 4399 - DNA, 73712 bp, Unknown
  gut microbiota DNA sequence
ggtgcgacagccacctcttgcgtttgcataccaacatacgaaattagcagagttttcgcggaactacaacactcttattttattaataatcaagcgattataccatgtgatagaaatcactatagcgaaatttcctttctcacaaggtgtatgtataggggtacaatgtataaaaccttactgctgtgatactatttgttggattaatgacttggttatcatatgtatatcataaagttaatacgttgcttaaagattttaaatgattcttcctcttatatgaagaatatcttttgtcaacatctatcatcctagctgctttcaatgaagcatttactctacattgtcattttattagcgaaagtactaaagtctatgtaaaagaatatttcaatagcttcaaaaaacagtaaactcaaaactttgtgattagctaaacaatcaagacaactgttgtttcttcataacagttttcatcatttttgcttccacacttccacccgctccttgtatccctctattcatcggcattacagacgctgtggaagcaatgcaaaagtgtggaagcaaaatttgcttccacacctccaatcagtcttaaatattgataacacaccaatgtcaatcttctatttacactatactatacttaattgattctcagcaatttctcactgcaaaactttgcaaacctattgcagcgatactgcaaagctgttgcagtgatactgcaaactaatatgcagtgcggctgcaaactaatatgcagtgcggctgcaagcaatatgcagtgatactgcaaacaatatgcagtggtactgcaaaacgtatgcagtaagtttgcagcgagcaaactgaaactgaatagtgaatgaacagactttaaaggagaagtatatgactaacgatatgaaagtgtagtattggctatgctaagttcgtgtttttttaggcaaaggcatgagtgcatggttcttttctaaatcatgcactatagtcatatccattacatttgtatacacttgtgtggttttaacacttttatgccccaataatttttgcaccgttgtgatgtttactccattataaatcaatagtgttgcattagtatggcgagcagtgtgaaatgaaattttttttgataaaccagctaggcgggaaatcacaattaaatccttgttcacattagagttatcccttaaatgaaagaagctttgtaagtcatcccgatatttgtccagaataacaagcccttttccttcgaataagagataaagaggtaatctgacttctgtactcgtctttatggatttataaattagccaggtttcttgacgaatctccacgatgttatcgggtgataaactgataaaatcagaatatctcattcctgcatagcaacaaaacaagaatgcatctaaagtcttttgcaatttagtatatctgccagccaagcttaatttctccaacttctccaactcttcaggagataagtgcgtatgcttgttttctatagttttaatcttgtactttcgaaaagcgtatttttgtatctccatataatccttgttgatggcgacatttatatgtcgcttcagatgcttcatatgtttggctatcgtatttgtgtgataacctcttgattgcaagaaatattcaaaggaggatatgaattcgaatgttaaatcagaaaaggttacatcctttttgaactgttgtaataatgaaagagtggagagatgatttcgttttgtgctttcttttagagtagagtttgctatctcttgcctaaaaaaaggaataaaagcggttttgttttcgcttgtgctcaaaacatcctttagtaactctaatgaaatacgccttccttgctgccacaattccaactcttttttttctatcatagccatgaactcatatatcaatctattcagcgcatctgcattaggatgattcttcacaataagctttttattgtcccactgttctggctttaaataaactttggttgaaaaatactttttctttctgtccaaataggcttctacttgtaccaatgccattccttttttattcaggcttctttttctgttgtacactagattgtaaataatcttactcattttacttgattttaattaataccaataacaaataagacgatattctgtgctcgatgggattagaataagaattaatatctctaaaaagtgtctttttgtgtttagctattaatcggtatttagcctccgggaactctcaatttgtttcaaaatcaggtccgttctctgttttagcggcttatttattaaccattttgttttaaaatatgtgtatttcttggaaaaatcatcctaaaagagggaatcatagtgatagtaaacataagccagtttaggttttttaagtgtgaaaaatctgttattaagcataaagtggcatgtttaattaacaaattgatagatttacaaggttttttcaataaaatagttgttcgtttcagttttattaatatatttgcactttgttagagtaaagaaacaattaatgtaaagttaaactttaagagagaatttatgaaaagaaaattaatgctgttattggcctgtctttttgtcggaataggcctagtaactgcccaaacccagaaggttacaggtgttgtaatttctgaagaagacgggcagccagttattggagcctctgtattggtaaaaggtacacaaattggtgctattaccggtgtagatggtgattttacattaccaaacgtaccaagttccgcgaaaactctggtgatttcttatattggtatgcagacccaagaagtggcaataaaacccagcttaaaagtggtgatgaagtctgatactgagatgcttgatgaggtaatggtggttgctttcggtacagcaaagaagtctgcatttacgggttcggctaaggtggttggtaccgaaaagctggagcagtcgcaagtgacgaatgttactgatgccttggcaggtgctgtgccgggtgtgacactgacttccaatgacggtgctccgggttcaaagtcatccatcaagattcgtggttttagctcaatcaatgcaaagaatgaccctctgattattgtggacggcgctccttatagcggtgatattaataatatcaatcctaacgacgttgagtcaatgacagtattgaaggatgcggcttccaatgctctttacggtgctcgtggtgctaatggtgtaattatcatcactaccaaaagggccaatatgtcgggagaggctaaggtgacttttgatgctaagtggggtgctaacactcgagcgttgcagaaatatgaagtgattgacaatcctggcatgtactacgagatgcattatcgtgccatgaacaattattataagtcaacgggaatgaatgaccaagctgcatggcttgaggcaaacaagaatctgtttggctccaacggtggattgggatacaatgtatatacagttcccgatgggcaattcctcatcggtcagaacggtaaacttaatcccaacgccacattgggtagagttgtgaattataaaggacgtgactatctgctgactccggatgattgggaagatgtgggaatgcgtaccggtctgcgtcaggaatacaacttctcggtgagcgcagccaatgaaaagtcctctttctatgtttctttaggttatcttggaaatgagggtatcactgaaggctctgacctgaaacgtttgacaggccgtttgaaagccgactatcaggcaaagaagtggttgaagattggtggtaatatgggatatgcacgttttgattccaactcgttgagtaacaatggtaccagttcgtctaccggtaatatatgggcgtttgttacccaaatggctcccatctatcccgcctacgtgcgcaatgctgacggcagcatcatggtggataataatggtattggaatgatggactacggtagtggtatcaatgcaggtatgcagcgtcctttcattgctgatgccaaccctattctagacaataaactaaataccagaaactctgaaggaaatgccattaacggcaacgcctttgtagatataactcctatagaaggcctgaaggtgacattcaatggtgctttcaacttggatgagacacgtcatagttacgtttacaatccttactatgggcagttcgactccactggcggtacagtgagtaagtatcatacacgtacttacgattacaacctgcaacaacttgtttcttatgcccgttcgtttggcgacaataacttcgatattcttttaggtcacgaatattatgattatcgctactatgaacttggggctagcaagtcgcagatgttctctcaaggcaataaggaattggatggtgccattatcgacggacaaggtgcttcttcctataaagagcgtcgtaacaatgaaggtttcttcggccgtttgcaatacaattatgacgaacgcatcttcggctcggcttctttgcgtcgtgatgcttccagccgtttccatccggaccatcgctggggtacattctggtcggtaggcggtgcgtggcttatcaacaaagaaagctggtttgatgcttcatgggtgcaggaactgaagctgaaggcttctattggttcacaaggtaatgacaatatcggtgacttcctctatacggatagatttaacattatcaactctaacaacagccttggtacttcatttaaatctaagggcactaaagacatcacttgggaaaccaacactaacttcaatatcggtgcagagttccagttgtggaaccgtgtgaccggtagtatcgagtactacagacgtaagacttcggatatgttgttctcatttaccgtggctccatcattgggttatgcttcctatatggacaacgttggtaacatggtcaatagtggtgtggaaatggacttcaatgtgaatatcttcgatacacgtaactttacgtgggatgtgaatgtgaacatttcaaccttgaagaaccgtattacgatgcttgatcctgataagttgattactactgagtatacagctgatggaaaaggatataagggctattctaacggaagcttcttcattggtgaggatttgtctatgtttacatggcgcttgaaggagtatgccggagtgaatgaaaagggtgagtctttgttctataagaatgtcaaggacgaggccggcaatatcaccggacgtgaaacgactacgaatcatgctcaggctgactattacatcacagaggaaagctcaatacctaaggtgtatggtggtttcggtaccaaactgaaagtatatggcgtggacttcggcataaacttcacttaccagattggtggtaagcaatatgatggtacgtatgcttactttatgtcgtcaccttatggtacggctggttacaactaccataaggatttgctgaactcatggactcctgagaacacaaatactaatatccctcgtttccagatgaacgaccaatattcaggggcaatgtctacgcgcttcttgacaaatgcaagcttcttgaatatccagaatattaatgtgggctacacgttaccttccaagtggacaagaaagttggccatcaactcattgcgcgtgtatatgtcggcagaaaatgttttctattggtctaaacgtaaagggttcgacccacgtcagtcatacgacgagacaaccaatgctactttctattcaccgatgcgtaccatctccggtggtgtgtcatttgagttctaaacctaatatatagattacaatgattatgaagaagaatatattcaaactattttcggttatggtcgtatcggccacggtattgaccggctgtatagaagaggtttttcccgaagattctacagcgacctccgatcagattggtgcatcggcaacagcgattgaggcttcgcttaatggcttgccatcgcaaatggtacaaggctatctagtgtacggtaagcaaacacatgagaccgaccttgcttatccctcattgatgttggcccagacagaactgctgggtgatgtcgtggctacggattacggatatgactggtggtggcgcttcaatgccaataatggtatgaacgacaccggctattattcatatttgccttacttcaccctatataagttcgttaaatcggccaatgacgtgattgcggccgttgatgtgactgatcccacaattaccgatgaaatgcgtgggcttggaagtatagcccatgctttccgtgcattggactattatacgctgatggtacttttcgaaccggtagaaaacatctataccgattgtagcaaggtactggggctgacggtgcccatcgtgactgaggcaacaactaacgacattgcgaagagcaatccgcgtgcaacccacgaagaattggtgaatttcattcttgccgaccttgacaaggcagagataggtctggagtcttatacacctgtcagtaagaacttccctgacttggcggtcgtatatggtctgaaggccaaagtatatatgtgggatggtcagtttgctaaagcggccgagtatgcccgcaaggctattgataagtcgggagcaacacctatgagcgaatcacagtggcataatcccactaccggtttcaatacggctacttctgcatggatgtggtaccttcaccccacggcttccaatatgggtaatcttgctaatttcattggtcacatttccaatgaagcggattggggatatgcttctttgtctaagcttcagatggcacgttcactttatgacgcgattcctgctaccgatttccgcaaatattcttaccttgacccggacagaagtacttacgcttaccagtcagtgagaggcaatgcatggctggatgaacaaccggattatatgtcattgaagttccgccccgtgggtggtgactataacacttattctgtgggtgcggctgcagatattcccgtgatgcgtgtggaagagatgtatctcatagaggctgaagcagtaggtgccagccagaatgtggcagcaggcgtacagttgttgaataactttatgaagcagtaccgccagagcaattacaatttcagtacgggtgatttgcgtaatttccaacttgaggtgttgaagcagatgcgtatcgagttctggggtgagggaatcgcattccctacggctaaacgtctgaaaccggatgtcattcagaattatgagggtaccaactttatagaagatatcttcaagataaactgtaaaggtgtgaagcccaattggacattgatgattcctaagaccgaagtcgattcaaataccgcccttcagggaatgaacaatccggacccgtccggtgctattgctaaacgtcctactccgataggggagtttgcaccgggtaacaattaaccaatgaactaacttttaatagaatttgtatatgaataagatattcaataaattgtttttgggcttggccgtatgcggtttggctatgacggcttgttcagacggtgtggagtgggagccttctccggttcctaccgagggtgtacaagcttatatttatgctgataacactgatttgacttattatccgaatgatgaacagttttttgtggtcaaaatcggccgtcagaaaacagatgcggctgcatctatccacttgactacagatgcagagaacgtaacagtgccgacaacggttgattttgctgccggtgaagcactcaaagaagtaaagattgcgtttgacatagctgtgggtactactgcatcttatactattgccattcctgaagaagattcctatgtttatggttcacccaaggtgacggtcaatataaagcgtgactatacttggctcaatataggtacaggctactatacatctcaattatttggagagggttgggatcaacctgtgctgaaggctaaagaggctaatatctataagctggaagattgcattacgaaaggatatcccatcatgtttacgctaagcgatgacaatcaagaactgataggttgggatcctcaacctactggttatgacaagacggactatggtatgctatattttgcagctgcaggtatggagcgtaaagggaacgtgttgtctttcccgatgcagggcttagtaatacttgacggtggtaaatggggagtactgtatcagggattcacggaaacgttggagatgccggaagggttctgattatcctggcaattagataacatgtaatttgaaatggcatgtaagatgaagttcgacttcattttacatgccatttttctattgtatctgtttttattttattcccctttttaaggcgcttccgccaaaattatttatatttgctgcccgaaccaacaatacgtatatataataaggtatagaaactatgaaagaatttgtaatctccgaagcgcaggcagaaacagcggtattggtaggtcttgtcacgaagactcaggatgagcgtaagaccaatgaatacctggacgagcttgcattcttggctgagacagccggggcggaagtagtgaagcggtttacccaaaagctggatgcagcgcattccgtgacttatgtcggcaagggcaagctggaagaaattaaagagtatatccggaatgaagaagaagccgaacgcgaaatcggcatggtgatttttgatgatgaactctccgccaagcagatacgcaatatagaagctgaactcaaaatcaagatactggaccgtacgtccttgattctcgatatctttgccatgcgtgcccagactgccaatgcaaaaacgcaggtggagctggcgcaatacaagtatatgcttcctcgtctgcaacgtttgtggacccacttggaacgccagggtggtggctccggtgccggtggaggtaaaggttccgtgggacttcgcggcccgggtgaaacgcagctggaaatggaccgccgtatcatcttgaaccgtatgtcattgttgaaggagcgcttggctgagattgacaagcagaagtctacccagcggaagaaccgcggacgcttgattcgtgtggcattggtgggatataccaatgtaggaaaatccacattgatgactttgctttcgaaaagtgaagtctttgcagagaataagctgtttgccacgttggatactacggtgcgtaaggtgattattgagaacctgccgttcctgctatccgatacggtgggctttatccgtaaattgccgacggatttggtagactccttcaagtctactctggatgaggtacgcgaggcggacttgctgttgcatatcgtagacatctctcatccggattttgaagaacagatagaagttgtgaacaagacgttggcagatatcggtgccgccggtaagcccatgattcttgtattcaataagatagacgcttatacttatatagagaaagcggctgacgaccttacccccagaaccaaggaaaacttgacactcgaagaactgatgaagacgtggatggctaagatggaggataactgcctctttatttctgcccgcgaaaaaatcaatatggaggaactgaagagtgtagtttatcagcgtgtgaaggaattgcacgtgcagaagtacccctataatgactttctttatcagacctacgaagaagaagtttaattttagttatgagttataagttatgagttatttgctggcagcggtttgaatcggtagtgccggcaaaggcaataacttataactcataactcataactcgttataaggatgaattacagaagactgaccgaagatgaaattctccggttgaagagccagtcatgtctggctgatgattgggggaaagtaaccgttgcagaagagttctcaacggaatttgtgcatcatacccgtttttcgggtgaggtgtgtttgggagtgttccattcagaatttatgttgccgggaggaatcaggaagcattccggtttgcggcatgtgacgctgcataatgtaacggtgggagataactgttgcattgagaatatccagaactacattgccaattatgaaatagggcatgacaccttcattgagaatgtggatattattctggtagacggtgtgtcgaagttcggtaacggggtagaagtgtctgtcctgaatgagacgggaggccgtgaggtgctgattaatgataaactctccgcacaccaagcctatattctggcgctttaccgccatcgcccggagctgattgcacggatgaaggaaatcacggatttttattccaacaaacatgcttctgctgtaggaagcatcgggaaccatgtaatgatattgaacaccggttccataaagaatgtgcgcatcggtgattattgccgcatctgtggtacatgccgtctgtataacggaagcatcaacagcaacgaggtggcgccggtacacatcgggcatggggtgatttgtgatgatttcatcatctctaccgggtctcatgtagatgacggagctatgctgagccgctgcttcgtggggcaggcatgcaagttgggacacaactactctgcttcggattctttgtttttcagcaactgccagggagagaacggggaggcgtgcgctatttttgccggaccttatacggtgacacaccataaatccacgttgctgattgccggtatgttttcctttatgaatgccggttcggggtccaatcagagcaaccatatgtataagttagggcctatccatcaaggcactttggagcgtggtgccaagacgacttccgattcgtacatcttgtggcctgcaagggtgggagcgttttccttggtaatggggcgccatgtcaaccattctgatacttcgaacctgccgttctcttacttgatagagcagaataataccacctaccttgtacccggtgtcaacctgcgtagtgtgggtaccatccgtgatgcccagaagtggccgaaacgtgacgggcgtaccgacccgaacaaactggattacatcaactataatcttctcagcccctacacggtgcagaaaatgttcaagggacgggaaacgttgcagaatctgcgtcatgccagtggcgagctttcggatatctattctttccatagtgcgaagatacgtaactcggctttggtgaaaggtatccgcttctatgaaatagccattcataagttcctcggaaactctgtcatcaagcgcttggaaggcattgacttccggagcaatgaagaaatacgtgcccgtttgaagcccgatactgccattggcagcggcgaatgggtggatatttccggattgatagccccaaagagtgagatagatgcgctgatagacggtattgagtccggcaaagtcaatcgcttgaagtctatcaatgccgagtttgagaagatgcacagcaactactatacctacgaatggacctgggcgtatgagaagttggaagagttctatggtatcaagccggaaggtatgacggcagaagacgtcatacatattgtcgaaaaatggaaagaagcagtagttggcctcgaccgcatggtgtatgaggatgctaagaaagaattttcactggcttccatgacgggctttggagctgatggctcacgcttggaaaaggaactcgattttgagcaggtacgcggcgactttgaaagcaatccgtttgtaatggctgtgctgaaacacattgaggtgaagacggcgctgggcgatgaactgatagggcggatgcagcgggtgtcagaaaattaattatgatttgttgcgtttttactctaattaaagaattatttcaataatagtttttacctttgctcggtaaaggcggttttgtgctgcctttgctacccgaatcacttttaaacattaaatatacgagtaattatggcaacaacacctccgttcaagtatcaacccatgttcgagaagggaaaagatactactgagtattatctgcttacgaaagattacgtgtcagtaagcgagtttgaaggaaaacctatcttgaagattgaaaaagaaggtttgacggcaatggccaatgcggctttccgtgatgtatcgttcatgttgcgtcgttcgcacaacgagcaggttgctaagattctgagtgaccccgaggcaagcgacaacgataaatacgtggcactcaccttcctgcgcaatgccgaggtagcatccaagggggtacttcctttctgccaggatacgggtacggcaatcatccatggtgagaagggacagcaggtatggaccggctactgtgacgaagaagctctctcactgggtgtttacaagacttataccgaagagaatctgcgttattctcagaacgctcccctcaccatgtacgatgaggtgaatacgaagtgcaacctccccgcacagattgacattgaagctacggaaggtatggagtacgagttcctctgcgtaaccaagggtggtggctctgccaacaagacttatctctaccaggagacaaaggctatcctcaaccccgaaacattggttcccttccttatctcaaaaatcaagactttgggtacggcagcttgtcctccctatcacatcgcattcgttatcggcggtacttctgccgaaaagaacttgttgactgtgaaactggcttccacccacttctacgataacctacccactaccggcaatgagttcggccgcgctttccgcgatgtggaactggagaagctggtactggaagaagctcataagattggcctcggtgcccagttcggcggcaagtatctggctcacgacatccgcatcatccgcctgccgcgtcacggtgcgtcctgtcccgtgggtctgggtgtttcctgctctgccgaccgtaacatcaagtgtaaaatcaataaagaaggtatctggattgaaaagctcgacagcaatccgggtgaactgattcccgaagaactccgtaaggccggtgaaggcgacgtggtgaagattgacttgaatcagccgatggccgatattctgaaggaactgaccaagtatccggtttccacccgtttgtctctgaatggaaccattatcgtaggccgtgacatcgcacacgccaagctgaaagaacgtctggaccgtggcgaagacctaccgcagtacatcaaagaccatcccatctactacgccggtcctgccaagactcctcaaggcatggcttgcggctccatgggcccgactactgccggacgtatggacccgtatgtagacctcttccaaagccacggcggcagcatgattatgcttgccaaaggtaaccgcagccagcaagtgacagatgcctgccaaaagtatggcggtttctacttgggctctatcggtggtcctgccgctatcttggcacagaacaacatcaagagcattgagtgcgtggaatatcccgaactcggtatggaagctatctggaagattgaggtggagaacttccctgcattcatcttggtggacgataagggcaacgacttcttcaagcaactgaagccctggaattgcagcaagtaaaacagaagccttttagaaaggcataatataaggaaagccgtaacggagaaaatcttgttacggcttttttgttttgtaggggaaaacaaagtgtttcgcggcatagaacactctgtttcatcaagcaaaacaaactgttcctttatgttgaaacaaattgtttcaataggaagaaacaaactgttctttcatgttggaacaaagtgttcttccctattggaacactctgttctgccttgataaaacagattgttctctataggagaataaaactgaaactcgtttgttatcgtatttttgttacattctccttttcatttctcggttaacttctttatctttagccctccaaacaacctatttaataaaacatggaaccaactcttacacgacaaactccggcacaacacatcgtatggctggatgtggtacgccttgttgcaatgtttacagtagtttgctgccattgcacagacccttttaacttctatccgggcacatcgcccgacattgttgacatcaagttctggggagctgtctacggtgcggcgctccgtccttgcgtaccgctttttgtaatgattaccggtgcattgctgttgccggtacggggtgacgcctcggcattctacaagaaacgtatcccccgcgtattctttcctttcctcatctggtctgtgatttacaatctgttcccctggataacgggactgctgggagtggagccgaaagtgattctggatttcttcccttattcgggtgaggaagtgatgcgccagtctctggcagtgagcctgggatatattgcagaaatgccttttaatttctctctattggatgtacacatgtggtatatctatctgctgatagggctttatctctatcttccgatattctcggcatgggtggagaaggcctcggaacgtgccaaactatggtttcttgcagcatggggagtgacactgctgctgccttattataccgagtttgccgctccgtacctttgggggacttgctcgtggaactcgttcggtatgctgtattactttgccggttttaacggctacctattgttgggccattatctgaggaaccataactggacgggtcggcaactctgtggcatcggcattcccatgtttgccattggctatgccgtgacattccttggtttccgtcgtatgacctccttgccggattttacggatgagatgctcgaactcttcttcacctactgttcgctgaatgtagtaatgatgaccatccccgtgtttatgctttgcaagcgggccaatttccgttcggagcgcatcaagaaagcattggcaaacttgacgctctgtggttttggagtctatatgatacactatttctttaccggaccgagcgtagtcctgatgcgtgctatccatgttcctatctatcttcagataccttgtgccgcagtcgtcgctttctgtacttcctggtttctggtggcaatggcataccgttgtttcgggaagcggaccaagtgggtgctggggtagtttggatgaaagattgtttatctttaaaggaggagatttagggcttattatctcctccagattctccacatatagtaagcgcagtgcgtgaatgcgaaaacaaacgagataatcagcagcactttgctttctccccatcccacagtctgttggtgccacagtccggtgatgacacaaagaacggcaaggataagtccaatcatgttcaaggtcacctgcccgtggcgggtgtcgcctccatgctccagcttactgtgcttcatgccgtagcccacgtagatgtccagaccgatgagcatccacagcaccaggcgtatccatgtatcggcaggaaggaacaacatcatgcaaaggcaagtaagaatacccagtatggggataagtggaacaagtggggttttaaaggaacggggcacgtcaggcatggttctgcgtactaccagtacagcggcacagaccagcgtgaaggccatcagcgtgccgatgcttgtcatctctccggccagccgtgcgggtacaaaagctgccagcaggcccacaagtaccatgaagagcaggttgctgcgtgccggagtacggaacttttcgttgatatgcgagaagaaaggaggcagcagcccgtcgtggctcatgctcaggaatacgcggctctgtcccagcagcgtcaccatgatgacggagcaatatccgaacagaatggacagcacgatggcacggttcagccagggatagtccggctggatgatacctgccgcatcagcctgccccatgtgctctatggctatggcaacgggagcaatgccttgctgtccgctgaaggcggtgtagtgtgccactcccgtcatgacgtgggcaaaaaccatatagagcacggtgcataccagcagggagaccagaatgccgataggcatgttccgcttcgggttcttcgtctcttgggcagctgtgctcacggcgtcgaacccgaggaaggcgaagaatacgatggccgcccctcgcaggatgccggagaagccatattcgcccagcacgcccgtattggcagggatgtaaggtgtatagttgtcggtattgatgtatttccagccgagtatgacaaaaatcagtatgacggaaaccttcaggaatacaatgaagccgttgaagatggagctgccttccgtaccccgtatcaggaagaggctcatcagcacgacgataaggaaggcggggatatttacgactccaccatcccagggacaggcggtgaggacttgcggtagatgtatgtccagtccctcgagaaagacgaccagatagcggctccaactgatgcttaccgtggttgcggctacggtgtattccaataccaggtcccacccgataatccaggcgatgagttcgcccatcgtggcatacgagtaggtgtatgcgctgccggctacgggtatcatggatgcaaattccgcataacatagtccggcgaagcagcatcccagtgcggcaatggcaaaggacagtgtgatggccggtcccgtatagcctgccgccaccgttccggtgatggagaatagacccgctccgatgatgactcccacgcccagggcaacaaggctccacggaccaagtacacgtttcaatgttttctttccggaggcattcgcctccgcttgcagtgcctcgaatggctttctgatgaataatcccattatgcttcaattctgataaatcgggcgcaaaggtacggattatattgcttattccatatagcgcgctacttttccactgatttgcagtagggagatttcacataatttggtatcatattctgcggagagaatacgttcttctgcatccagcagactcttttgggcttcgcgcatctcgattcccgagaggttgcccagcatatatcgttccatggcaatctcgtggttctccttggcagccacaaggttctggcgttccaggttcagcatttgcaggttgttttggtaggcctgccataggttgctgaggtcggcgcgcagggcctgctccagttgctcccgttccaggcgagcgttctgcacggcaatgcgggcattcttgcgttcgcggcgccggttgccgtcgaacagattgaagccgaccgtgacgccgaagttcagaccgaggttgctgcggcggctgttggcagagatgtcatacttgttgagggtgtagccgtatccgccgttcatcttcacgtatgggtagtcgcgcgagcagactttcttgtagtccagacgggccagggtattgttctgttcggcacgtagcagtgaggcgttgatggtgagggtggcgttccacagctcctcgaagttcagggaggcggtcacgttgatgaggctgtcttgtatgataaacggctggtctacatctttgtttgccatgagttcgttcagctggatacgtgaggtgtgcagcagttcctgctgtttcatgtattgggcactgtcggcattgaagtccactttggcctgctggtagtccaggcgcgagaagttaccgatgtggtaacgctcttccacaatgcgcaggcgctctttggatagcgatacggcataacggaagttcttcaagcggattttttgctgcacatagttatagtattcggcggctatgttggctatcaggtcctcgatggcgatgcgcgtattggtctcgccttggcgttccagctccttgagccgttggtagttggcggtaatgttgaaaccgtcgaagatggtccagttcaggttgatgcctgcatcgagagtttggtcaaacactccgttgtccttggttgtctctccggtggctcgggctttggtctcggtattgtctatggttcccttgtagccggcggagaggtccagtgtgggcaggtagcccgcattgcccagtgtggcgttgttcttgctgacctgctcttcattgcggacaatgcgcagggagtagttgttcagcaatccctgctccaggcaggacttcaaggtgtaggtaggcgcaggctgtgcataaaggcccagcgctgtgcaggcagtggctatgaaaattaaaacaatgcgtttcattcggtcttcagtttacttcggttcgttgatacataactatatatggcaggcacgatgtacatcgtcagcagtgtggagatgagcatgccgcctacgacggcagtacccatggcgatgcgctggttgcagccttcgccggtggcgaatgccagtggtatcagtcccaggatggtggaggcactcgtcatcaggatggggcgcagacgttgcagggaggcgtccttgatggctcgcatcttgtcttcacccgcttcctgcttctgattggcaaattccacaatcagaataccgttctttgccactagaccaatcagcatgataataccaatctggctgaatatattcatcgtaatccccccgaaatacatgaacaccagtgcgccggcaatggcgagaggcaccgtcaacatgataatcagcgggtccttgaagctttcgaactgggcggccagaatcaggtaaatcagcacgatggccagaatgaaggcgaacatcagactggaggaactctccctatactctttggagtctccggtcagtgcggtgcggaaggtctcgtccagcgtctccttggcaatcttgtccatttcatccagaccttgtccgatggtcttgccgtccgccagtcccgcggagatggtggcggaaacgaaacggttgtaacggtacagtttcggaggtgcgatgccgccggtaagctcaattaggttgtccagctgtaccatgttcccgttgtcgcttcggatatagatgcctttcaggtcggcgggcttgttgcgttgctggcggttgatttcgcctaatatctcgtattgctttccgttcatgtagaagtagcccatgcgctgtccgctcaagccgtattgcagggtttgggcaatgttcttggtgcttacgcccatgatgctcgccttgtcacggttgatgttgatgcgtgcttcaggcttgctgaacttcaagtttacgtctgccatctggaataccggattttcgtagaccttcgtcatgaacttggggagcacctcctgcaatttctcgatattggttgcctgcaatacatactgcacgggcataccgccgcgccgtcctccgaatgaggaggactgctgtacgaaagagcgtgccatggtctttttctgcactgccttcgacaacttttcggcaacttccatctgggtatagtcacggtctttcatgtctttcagtgtgatacgtacgttaccgctaccactggacacacgcgctgttaccgcttctgcatccgggataatggagtccaccagatgattgatgtcttcggtatagtcgcggatatattcgtaagtcactccttcggcacccattgtattgatactgatttgcgaacggtcctccaatggcgccatttcagccgggatagtattccaaaggactccgataagcaggatggtgacgatggtgaagggcagggcaatccagcgccgtttcaggaaggcggccagtgactggctgtatacccggttcatcccttcgaagaaaggttcggtcttgcgatagaaccagctctgctgttcccttttgattaaaagtttggtggcaagcatcggcgtaaaagtcaatgcggcgaaggaggagataatcaccgaaccggagaccacgatactgaattcgcggaacagtcgtcctgtcgtaccgtccatgaatacaatagggaagaataccgccaccagcgtaatggtagtggagatgacggcaaagaaaatctccttggctccttctatgccggcttctttcggtggcatccctttctcgatgcggacataaatgttctccgtcatcacgatggcgtcgtccaccaccaagcccacggcaagcaccacggcaagcatggagagcacattgatggagaaaccggccagatacatgacgaagaaagctccaatcagcgaaacggggattacaatacatggcacaagcgtcacacgccaatcgcgcaagaagaggaaaatgatgatgataaccagtacaaaggcctcatacaccgtctgcttcacctcgtcgatagaagcgcggataaacttggtattgtcaaaaccgtagttgtaatgaacatcttcgggaaggtctttcttcatcttctccatgcggtcatatacggcgttggctatttcaatgtggttggcacccggctgcggaattactacgacacctaccatgggcacaccgttcatcttcatataacttttgatgtcggctggtcccagttcggcacgtccaatgtcgctgaagcggacaatacggttaccgtcttccttcaggataagattgttgaactcttcggctgtatgcatcagacccaacgtacggatggtgagctcggtagtgtttccttcgatacttccggaagggagctctacgttttcgttgtccaccgcattctttacatccagaggagtgattccatagccggacatcttgatggggtccagccaaagccgcatggaatagcgcttttctccccagatacttacactacttacatctgaaatagtctgaagctgctccttgacagtcaggtcggctatttcactgagctccagtagggaacgtttgtcactttggagggcaaccatcaggataggggtggcgtccgcatcggcttttgatacggtaggagggtcacagtcacgaggcagatagcgctgtgcacgcgacactttatcacgtacgtcgttggcggcggtttccaggtcaacggaaagctcaaactctactgtaatgcgtgatgagccttgctggctgacactggagagggagcgtatgccgggaataccgttgatgttctgctccagaggctccgttatctggttctcgatgacatcggcgttggcacccggataggagcaggatactgatatgatgggattgtctacagatgggtactcgcgtacacccagataattgtagccgatgaagccaaacagcaggattatcagggtaagtactgtcgagagtaccggtcgccgtatacttaattcggatatattcattctttacaattgataattaacggttgataattgacagttgtcaattgatattgtccagtgttaccggtagtccggtacggagttgcagggttcccgaggtgatgatggtatctcctgcctgcaagccttgcaatacttgtacttccgcttccgtacggattcccgtagtaatctctaccggctgggcttttcccgacttatagaggaatatcttgtcttttcccatttccggtacaatggcttcggacggtacggcaagggcgtcctgaatttcatccttgttcagcttgatgctggcatagcggcccggaagcacagctccgttggcattgggataaagtgcacggattgtcagggtatgggtagtagggtctatctttgattcgcgtgcataaaccgtggcgtggaaggtatttagctttccttcgagagtgaagtccagtccggcgccggtctttacgtcattggcataccgctcgggtacggcaaattccaccttcaacggcgaaatcttggtgagtttggctacaatggttgtaggggaagcgtaagtacccacactgacttggcgcagaccgatgacaccgtcgaaaggagcacgcagctcagtttgtgcgatgttcgattctatcaggtcaatgtcggcattcagggtggccagctcggtctttacttgttcgtaggcttctttactgaccgcatccctttccagcagggcgttctggcgaaacacgcggtcttctgccaactttaattgggagacgaggcgttgcaattgtgcttgcagcggccggtcattaactttggcaagtaattgtcctttcttgacgaagctgccttcttcaaaatttatctctatgattttgccggatgtctcgaaagaaaggtccacttcctcatccggcagcaggctgccgctgatttgtatttcatccttcagcagttgcggtttgattatttttgcgtttacgtttagaattttcttaccgctacgttgaccggtcatcaccttgtctgcagcggctaattcttcattctctttaggtaattgggagtagattcctcctccaatcagtccggcaccaatcacgataatgatgccccatttaactctcttattcatgttgtagtattagtagtaataaaatcagccttagattagactacgggaaaagagaatagtttaaaagataaagagttaaaaagtgtaagaatatggattggaaaggtgataaaatgacaaatcagtaagcagcccggtattttccctcctccttgtcctccagcatgttcagataagaagcgtaacgggattcgctgatatagtgcttctcgacagcctcgcgtacagcgcatccgggttcgtggcggtgggtacagttgccgtaacggcagtcggcagataccttgaatatttccgggaagtagtggcctatctcttcttcttccatatcgaatgttccgaaacctttgatgcccggagtgtcaatgatatatccgttgcccggaaccgggaacatttctgagaaggtagtggtgtgcatacctttattatgataggtggatatctctccggttttaatctctatatcgggcagtattgccttgatgagtgtcgatttccctactccggaatgtccggaaaagagggttatgcgtcctttgagttctttctcgatagtgtcgatgccttccccttttctggcagaaaccttgaaacaaggatagccgatggtggtgtaaaggttgatgagactgtccagatagtgcagttcctcttcattgtaggcatccactttgttgaatataatcttgacgggaacacggtatgcctcggcagaggcgagaaaacggtctataaaggtagtggaggtctcgggatagttcaccgtcactatgagcatgcactggtcgaggttggcagcaagaatgtgcgattgcttggaaaggttggaggcgcggcggatgatgtaattcttccggtcctctatctcgctgataaaggccgtaccttcttggttcagtatgatgttcacataatcgcctacagccacgggattagtgcttcgtatgcctttcagccggaagttccctttgattttacattcaatctcccttccgtcgtcagtccgtaccaagtaccaacttccggtgttttttataacgagtcccctcaaaataattgaaagttgaaagttgaaagttgaaaatggaaggttgaaaggcttctatacttggtatatcggtttattttcaactttccattttccgttttcaacttaattaaacggtcatgatttctttatcctttgcagccagcatgtcatcaatctgcttgatgaacttgtcgtgaatcttctgcagcttttcttcaccgcctttctgggcgtcttcggccagtccgtcctttacggatttcttcaaggcgtcgatggcatcacggcgtgcattacgtacacttaccttggcagtttctccttctcccttacactgtttggcaagttgtttacggcgttcttccgtcagtggcgggatgccgatacggataatctcaccattgttttcgggcatgatgccgagactggagtcaatgatggccttttcaatgacgcggaacatgctcttatcccatggcttgatggcaatgctgcgtgcgtccggagtggttacggctgccacattgttgataggaaccatacttccataagaatccacacggataccgtccagcaaacggatatcggcttttccggcgcggatatgagccagtgcctcgtccagatacatgatggccatgtccatactttcttgcgcttcgtctaagatgtcttttacgtctctcatattattttcgttttgaaatagctttgatttgaaactttgcaaatataattattaaattgaaaattgagaattaagaattaaataacattcattttttattctccattttccattcaattgtgcaccagtgtaccgatttcttctccttgcatcacttttttcagattacccactgtgtccatgtcaaaaacgatgatgggcaggttattctctttgcacatgcaggtggcagtgaggtccatcactttcagaccgcgcttcagcacttcgtcgtaggtgatgtcgtggaacttcgtggctgtcgggtccttctccgggtcggcggtgtagatgccgtccacacgggtacctttcagcatgacatccgcctcaatctcgatgccgcgcagactggaaccggtatcggtagtgaagaacggattgcctgtaccggcggacatgatgactacttcgcctgcttccatacattcgatggcacgccatttattgtagaattcaccgatgggttccatacgtacggcagtcagcacgcgggccttcacgccggcagctaccagagccgaactgagtgcaaggctgttgatgacggttgccagcattcccatctggtcgcctttcacacggtcgaaccctttgttggcaccgctcaatccgcggaaaatgtttccaccgcctatcacgatgcctatttgtactcccaattcgtggatttctttgatttgagctgcgtactcggcaaggcgtttctcgtcgatgccgtattgcttttcactcatcaggctctcgccgctgagtttcaataagattcttttataggttgccataatatatagttttgttacattgctttgcagcaaagataaagaattaaactgaaaagtgcagcagaatgtggtaggatagttgcctaacgcacagtctttaggaactcgtccatgctgtgatataacggaacgccatagcggttgcaagtaatccgcacattgtcgtagcggtagaaaccgggttcacagataacgtgcagtttgcccgaacgcatgtgcagtcccatctccagcagggtgatgggggacttgctgcttgccaggatattcatgattatcaggtcggctttttccagatgttccagttcccagttcacttgatgttcaaagtcggacatttcgccgctgagtcccttgtcccttcggggattgtataggatgtatttaccttgggggcgtgcgcggaaccagtcgcaggttgccttttgccagtctatgcttttgcccatgtcgatggtgcctgccaggaaaattctggtgtattcggcttcgttcacttcggctttgccttcatccgggtggagtactataacctcggactgagcctgcagcccgataggaaacaacagcagtaaaagcaggtagagacttttcttcatggttggtgatggttttataggattagtttcttttcttgcttcttatcgggagtcttgggaacagtttcctgaaacggaccagttggcttgtaatattgcctcctgcgatgacgaacgttacggctacgataatcatcaccagtccgaagctttctctgactgtcaggctttctccaaagacggctattccgaagaagatggctgtcacgggctccaatgcgccgagaatggcggtcggggtggagccgatatattggatggcaccggtagtgcagaggaaggatatggcggtggggaagacagccaatgcaagcagattggcccacagataccactggtccggtgtgttcagtacgccggaatagagcaggcgtgccacaaaaagcgataggccgaagagaaggacatagaaggtgactttaagcgtagccacatttttcaacgatgtctggttgatgcccacgatgtatatggcataggaaagggaagacgcgaaaaccagcagtgtccctatcaggttcagtgtgctgccgtcctcgctcttgtagagcagtccgatacctcccagtgcaagcagcatgcagacgatggtttgcagtgccagcttctccttgaaaaccatggccataataagcgccaccatgatgggatagacgaacagcagtgtagacgctatgccggcggccatgtagttatagctcaggaaaagcgtcagtgaggagagggccacgagcaatcccatgatgatgagcggaaatgtttctttccgctgtatcttgaatgaccgccctctcgcctttatcataatgcccagcaacgggatggcgaagaggtatctgaaaaaaagtaccgagtccgggtccatgccggccttgtacaacgggagggcaaacagtggattcatgccgtaggaggctgcggcgatggaacctaaaatatatcctttggcttttgcgttcatatctttatctgtaaattagcgcgcaaaggtagatatttactttgatttcctccttcttttctgtatgaaaaccgtatgaattctacacttatgccttcagtgtgtagtcgccggcttctttcgtcactactttctgcagttcttcgagcgtcttttcaccgtccgaaaactctacggtggctaccggagggttcagggttacggtggcgtgtatgccttccatactgttcaatgctttctctacatgcatgcggcaatggttgcacatcatgccttctactttgaattctttcttcatgattgtttctgttggcggttcaacttctttgttttcttctccttcatgtattcttttccgtttcagcagcaggctgttgctcaccacactgacactgctgaatgccatggccgcaccggctatcatcggattcagcaggaagccgttgatgggatagagtattccggccgcaatgggtacacctattatattatatataaatgcccagaagagattctgccggatggtccggacggtgagacgcgacagacagagagcttccggtatcttggtcaggtcggaagagatgatggtcattttggctacatccatggcgatgtcgctgcctccacccatggcgatgcttaagtcggcttgggcaagggcggcgctgtcgttgatgccgtcgcccaccatggcaaccttccggccttctgcctgcaaccggctgacgaaggcagccttgtcctgcggcaatacactggcctggtagtgggcgatgcctgctttgcgggcaatctcacgggcggtggcctcattgtctccggtcagcatgtggacttcgatgccggcggcgcgcagctcgctgacagcgcggatggaagtttcctttatccggtctgtaattccggctattgccagcacgttttcttcatcggcaaaccagatgacggtctgtgcttccgatgtcagtcgggttgcctcttcctgcagggagggggggatggcgatatggttttcttccagcagtttccggttcccggcgaggtaggtccggccttgtgcccgtcctttcacgccttttccggtgatgctttcaaagtcttgaatgtctatggaggccgactccttgaggtggttcaccacggcttctgccaacggatgttccgagagcttctccagactatagaaaatgtccgacagcgcattgcctgcagtggcgccagtaccgggcgtcattgcctgcgtattccatatcagcttgctgactaccggttttccttcagtcaccgttccggtcttgtcgagtaccacggtgtctatcttcttggcaatctccaggctttcggcatcttttatcagaatgcccctttcggcgcccttgccgatgcctaccatgatggcggtaggagtagccagtcccagtgcacacgggcaggcgatgatgaccaccgtgacaaatgccagcaatccgtgggtgaatccgccggttccgtccagtagcatccatgcgatgaaggcaagcactgcgatgcctataatggtaggcacgaatatcccggctatcttgtccaccagctgctgcaccggtgccttgcttccttgcgcgtcctgcaccatgtgtataatcttcgccagcagtgtatccgtgccgattttctctgcccggaagcggaaacttcccttctggttgatggtacctgcaaagaccttggcgtctttgtgcttggatactgctaccggttcgccgctcagcatactttcgtctacgtaggagctaccttccgtcacgatgccatccacggcaatccgttctccgggcttcaccaggacgatgtctccggggcgaatctgctcgatagggataacgcgctcaaaggaagagtgagggacagcgtgtccttcatccacaatgatggtcacagtcttgggttggagccccatcagtttcttgatggcggttgaggtgtttcctttcgctttttcttccagcaggcggcccagcaggataaaggctatgatgacacttgccgcctcaaaatatacatgcggatggatgcctctggatagccagaagtccggaaatagcatgttgaacaggctgaacagataggcggtccccgtactgatggctaccagtgtgtccatattggcgctgccatgctgcaattgtttccaggcgctggtgaagaatccccgccccagccagaatacgacgggagtggacaacgcccacatgatgagattggcatggggcatatccatgaagaacatgcctatgatgacaacgggcatagacaagatgatggcccaggttgtgcggaatttcaatgcgctgaatttcttgttgtgggcctcttccgcctcttcgagcgtgttgccgtcctggtttatcaacaagtcatatccggccgcctgcacagcctgctgcaaagcctcggaagaacagctcgtagggtcatattccacggttgccgttgccgaagcgtagtttacgaccgctttcttgacacctgactgatggttcagcgtcttttctacccgtgcggagcatgaggcgcaactcattcccaatacgggaaatgtctcttgaactatattcttttctgccataacaattttgtataagtcattactcttgctatgagtgacttggttccaaatgcaaataccgtcagtctcattccgagataccgttggtttcactacttgaaaccgtcggtttctcgcattgaaaccgatggtgccaaaagttgaaacttgtttggcaccgtatactggctacctgacgccttgttctggagggtggaatccatattttatatcagtcatagcgatacaaagataatgctttttcccttgaaattgttcatagcctacccctcacgccaagcaggttccttcttgctgggaaatgcccgtcggatgacttcccggctcaagcctgtctgcaccactccccgcatcagcaggtaagtgaggaaagcaagccatagggcatggtttgccaggacgggatgcagcccataatataagataaaaaagctgacagctgccgctgccatggagaggagcattcctcgcgtggcggtggcgccgatgaagatgccgtcccagatgaaggcggctatcccgacggcgggcacggcaagcgcccaataaaaataggtgtcggcaacagctatcacttctttgtcatccgtcaatagtccgaggaaggcattgcctcccagcgcataaaccaatgtaaagagaaccgctatcaccgctccccatccgaagaggtgccggacggtgtctgtaaaggcttcccggttgcgtgcgcctatgtatctgccgcttaaggcttcgccagcgtaggcaaagccgtccattacatacgagaataaggtgaagagctgcatcagcagcgtgttgaccgccagaataatctctccctgcgaagctcccgccgaagtgaagaacaacgtgactgccaccaggcaaagagtacgcagaaaaatatccctattcacttggaagaaccggaacatcgcccctttctcccagatacctgccccttctccccctttaatttttaatttataatttttaatttcccagaatcttttcagcctgccgtagttgtgcatccaaaggacaatgcccatcaggaagccagcatactgggcaatcaacgtccccaaagctactccttctactttcatcccacacagataaaccagtccgaggctggcaatgatattgaccacattctgtgtgatggctatatacatggggatacgcgaattctgcatgccgatgaaccatcccgtcagtccgtatagccccagcatggcaggtgccccccaaatgcagatatggaaatagcacgttgccatttctttgacttcatccgtaggatggatgagaaggaaggctccctgcctgataggcgtttgcagcaggatgaggcagaacgcgactgccaggcctatgctcacggaacgcaacagcaggcggaccacctccggtaaatcccgcttgccgaatgcttgcgaggtcattccgctggtacccatcctcagaaaaccgaatatccagtagataatgttgaacagcatgccacctacggcaatggcgcctatgtaggcgggcgaacccagatggccgacgatggctacatcaatcaggccgagcagcggcacggtgatgttcgatacgatggaaggtaaggctatttgcagtatttgtctgtctctgggcttcatttatattatttaattcattaaggtcggcaaagttaactatttttctactttcaactattgatggttaccgtaaaaatgcgtagttttgtaggtagatttctatgagactgattgggctgttaaactatatatatacactaaaaatgaaaaccttaacgttgcttttctccttgttcttgatgtgtccgctgtctgtctggggacagtcggcagatgagttgctttcgaaagtgtccgatgcactttccgagggtaaagatgactatgcggtgagtttgtttcgccaggcggcaaatgccggtgaggataggacggaaatgttctactggaccaatgtggacaagagcagtgaggtggctccccgtcttgcggatgtgctggctgtgcactacaaggaaatgcggaattacgataaagcctacctcttctataaggagttcttgcagcgtcatcccgaagacgtacctgcacttgtctcttgtgccgaaatggagatgatgcggggaaaggagaaagatgccttgaaaacctatgaaaaggtattgatgctggatgccgacaatctccaagccaatattttcttaggaaattattattatctccaagccgagaaggataagaagaagctcgaagaagactataaaaagataacttcccccacaaggatgcagtatgcacgctatcgcaacggattgtcagacgtgttcaccaatagctacggcaaggctaaggcatacctgcaacgcgtgcttcaggtattcccctccatggaagcaggcaatacgctggaaaagataaagaagatggagctggagctgaaatagctgtccgcattccgactaataggaaggggctgtttgtctcttatttctctccggtctcttttaatctcttcagatattccgaaggtatgcagccgaattcttccttgaagcattgccggaagtagaacagattgtttatacctaccttgaatgctatttccgaaatgttgtatttgccttccagcaggtattgctcggcgtgtttcatccttatcttgcggacatattcgttggtggaaagtccggtaagcgctttcatcttgcggtagagggtggaattgctcatgcacattttatccgaaagatagctgatgtctattttgtctgaagaaagccgttcctctatcagctggtttatcttgtggataaactcgttgtccagcttgttgagcgattctgtaatgacagccgctttattgcttatggcggcattggcgctgaaatggtttgccaggttgcgccgcgactggagcaggttttctatacggctatgcagcaggctggcgctgaacggtttggtgaggtaggagtcggcacctacctggtagccttcctctttgtcgcgcagcgagtctttggctgtcagcagtataatgggtatgtggctggtgcgcacgtcttttttcagctcacggcacatctcgtttccgtccattaccggcatcataatgtcactgacgatgatgtcaggtatttctttcagggcgctttccttgcccagctttccgttggcggcagtctttacttcaaagtggtcggagaaggattcggctatatagtcgcagatgtccggattgtcttccactaccagcaatatgggtttgtcgctggatgaaacttgatttacttgtgcctcttctatatgctggacgttgctttccttttcctgcgaatcggcatgcagtgcctgcgggtaactgttgtcggtaagcaggctgacgtagaaggtactaccttgattgggagcactctctacgcggatttccccttcgtgtagggctacgaggtttttcaccagagaaagtccgataccggtacccgaagcctggtgtttgccgccttcctggtaataacggtcgaatatgtggggtagtgcctccggcttgataccgtatcccgtgtcgctgacccggatttccgtatagttcacttcggcacgttccacctgtcggataccgatgctgatgctacccttttccgtgtactttagggcattggatatcagattgtccaggatggtctggataatttccttgtcgaagtatataggcatatgctctttctccaccaccagccggatatcgacggctggcttccggttcagttccttgtacttcaggcctatctcgcggataaggggtacgaggttgtcccggctcacgcagagtttcttgttctgggtctcggtctttctgaactccaatatctggttgatgaggttcagtagccggatggcactttggtgaatgacggatatcttctgtgcgtctttggtggatagtgtatcacttttctgtatgtcttccagcggacccagtatcagcgtaagcggggtgcgcagttcatgggtgatgttggtgtagaagcgcaggcgttcgttgttcagttcctgctcgtgttcgtggctctgcttctccagttggtacagtgcttcagcatccagtcttttcttgtaggcatagagtatagagaaaaggatgataagggacagcaggatatagaatgactttgcccaccaagtaagccaaaggggtggggcgatgcggatgtccagtgaggtggttgcgtccgaccatgcttggttgcgcatgcgcgttttcacttggaactggtatttcccgggaggaagattacgaaaggtgacattattggggtctgtaagcgtataccaggagttctcgagtcctttcagcatataggcatattccacttggttgaccagggcatagttctggatgttgaaccggatactgaaactattctgtgtatatttcagttgcacgttcttctgtccgtttaaggcaatggtgctctgtccgttttccggtttgttcagcgggtcggtaatttcaatgttggtgatgaatgcgggcggtgatttgcgttcctgcaatacaacttccgggttgaagtagcacagaccgtttatagagccgaagtaaaagttgccgtcttgtccgtaggctacactgccccgactgaagcttcccatggggaggttgtcgtgatagtcgtagttatagaaaatgtctttactgtccacaagacagctgatacctttgttggtgctcacccaaatatttcctgccttgtcctcaccgatggcttgtatgtgggtgttagccagtccgctttcacgttggtatactttgtagtttctgtctgtcagggaggggaagcataccaaaccttcacccgtggccacccacaaccgctttctgctgtcttcgtagagagcattgatggtattggaggggaatttggccaggacgttgaagagctggatgctttggagttgagggtcatagaggcccaggcctcctccgaagaatcctacccatatttggtcttcggaatccttcagcacacagcgggccagattgttctccagattgtagtgtgccttgattgtcttgctgtcacaatctataagatagacgccttcgctggttccgacccaaatgtttccctgcttgtcttcatgaaaggaacgtacgtcagtgcgtgacttgtcttcggagaaaatctgccggaagctttggctcttgggattgtagtaggctattcctccataaaaaagtccgaaccataatcctcccttcgagtcgcacaaggctgcctgcaccgtattgcttctgaatttcttgttgtcagcattgtatatggctattcgtcttcccttgttgaatacgttgattcctcctccatcggttcctatccagaggttaccggctttgtccatacagacaccggaggctattttactgttcaggctgttgttggtggatggaaaaggagaatatttataagtgctgaagagtgacggctcgcgttttatgaagttgatgccgcctccccaggaacctgcccatacattaccgaaggaatcttggagcaggcaacggatactggagttggacaagccgtattcatcgtctccctcccggatagaaagcgcatgaatctggtccgacgaacggaaaagctgttgggacaaatccactacggcaatgccgccgaattccatggctatccaaagtctgttgtcatccagttgacgtatatcatatacacggtacgatatgcagttggttttgtcgtcgaaggggatgaaactttccgcttccgggttaaacagtaccactcctctatcggttcctatccatatgtttccgcttttgtctttgtagacacatgtcacttcgttgccgggcaggctgttgggggtttgcggctcgtgtgtgaagttcttgactgtcttgtcttttatggaaagtatactgaatccccggtccacatgcccgatatagagtagtccgttaccgccgtctatggcagaccagatatggttgcttgcaaaacccggtacggtttcggtattgtaatgggtgaattgcccggtttgcttgtcaaaatagtccacgcctttccaataggtgcaaatccataggttaccgtcggaggcggcaatgattttggtaatgtcgtccgtaaccaggctttcagggttgttttcgttgtgtctgtaagtgatgaatgaatcgttggcataattgtatgcattgattccggcacgctgggttcctatccataagatggagtcgacgggatcgtccagcagacagttcagttcgttgccggtgatgctttgcttgccggttgtttcttctttataataggtaaggaagcgtattccgtcgaatttatttaaaccctcttctgtggcaaaccatagagagccccgtttgtcttgggctatgcttaccacatggttgttggacagcccttcacggatactcagatgttttatggtatatggctgcgcggatagcaggaatggcaggcataggaaaatggaaagtagaatcttcttcataacgggtcgtttttcattgcatgagtcaaaagtacaaataaaatctttagatgatgtgcacaaatcgtgcattgacagatttatatgccttctctgcaagatttatacagctgttgaatcgaaaattggcatatgtttgcattgccgattattataaatcggaacaaaatgtacttttttgtttaactttaataataatatttatgaagaagcatttctttaacgccactttctgggcgttattatcgctggctttatggactactggatgtagtgacgatgacggatactctgatgtagacgggcagattccgacaatgacattggtgacggatcatattgaatccggtgccggccatcgttttaccattgaaggttcgttggctgaccaggatggaattgtatccgtcaatctgcaatgtgccgatctttatctgaacaagaccattgatttggtcgaaatctatggagctccccaaacggagtatgagttgagctattcttatgacctcaagcgtgatgaaatcggtgaacgcttcaccgtgaaagtgaccgtaacagatgcgggcgggcgtgaagtgtcgcaggatgtgttgataacgatggatggggactttgagaatcctacatttacaattgcccctggtaaggaggttaccgtactgataaaggatgaaacaaagttcaacctgaatttcacggtgaaagatgaccgcatactggattatgtactcattgagattcctggggtagaaggttttgaaagccgccgtatagaggctggcgggcaatctactttgagctttacggagaagattattctgcctaatgaggtgaaaagttacgatgtgactttgacggctgtggatgccagaggcaatcagacagtgaccaatagtaccatcagtgtatctgaaatgcctgacttccccaaaatgtatctggccgatgtggcaaccgtagaggaattgaacagtgatattttcggtgtaccgatggtgattaaccatacgggcgagtaccaatatcgtgcacgttattataataaagctgccggtacggaaattttcttcttaccgcaaaagacagactttactcctatctgttttggccttgatccggaggataatacaaaattgacggatgacccggaaacggctaaacctattgtcttggatgaggctggtgtttattatgaaatagacatcaatgtgaaagagtctacttatagtatgcgcacgtactcggtgacagaggctacaaatccgatgaaatatgaatatggaaagccttgttttgaccgttgggagaatggggaatcgttcattgatttctatatcggttggggaggttctcctcaggatgcgggaaatcagttgtttgcccaggataaaaataatcctcatcttttctattatccggaaaatggaacttggacgctggaagccggtgaagaaatgaacttcatcatatccaattatcatcccgacggatggtgggatcatgtggaatggcggtgtgacgactctcagaatgtagagaagtttggttacttcagtaagaaaggggatgtgaatcctaattgggaaggcaccaatcagcgttgggaagacggctcgatggtaggtgacaactggatgaagcctacggttacggtgaccggcaactaccgctttgagtttgacgcgcatttgggtcgcggcaagattgttcctgctaattaaaaagtaacattagatttaagatatgaaaaagcaaattctattattatgtcttgcgctgataagcctttgcggttatgcgcagcagataacggttaagggtgtggtgacttcggccaccgaccagcagccgttgattggaactacagttcaagtgaaaggtaccggtacgggtacaattaccggtatcgacggtgattatacattacccaatgtagacaagaatgcagtgttggtattctcttctattggttttgagtctcaggaaatagctgtaggtggacgtactacgattaacgtggtactgaaggaggctgcggaattactggatgaagtggtggttatcggttatggtgctgtgaaaaagagcgatttgaccagttctattgctacagtaaaaggcgatgaaatcactgaaaccgtgaccggtaatgctatggatgctttgcagggtaaggtaaatggtgtacaagtcaccagtggtggtggccctggagctactccgaaggtgctgattcgtggtgtaactaccgtaaacggtacgaatccgttgtatgtagtggatggtatgccggtaggtgacaatatcaactttctgaatagtaacgatattgcttccatggaagtattgaaagatgcttcggctgccgctatctatggtacacgtgcatcaaacggtgtcatcctgattactacaaagaaaggtaaaactggtaaagcccgcatcaattggaattcttctgttggtttccagaccgtggccaaacctaatattgccggtgcggctgaatataaagaagtgttcaatacccgttatacgaatgatggcctttcttctatctggaacgatacgggtgctacgaccaatcccggtggtacagactggtgggatactgtagtcaataaaacagctttggtgcagaaccattcacttagtgttgccggtggctcagaacagtttgtttataactttagcgtgggctattatcgtaacaactcacagtttgatgtaggttattgggataagataaatatccgtctgaatactgaatatacatttaataagtatgtaaaattgggagttgatattgctccacgtgtcgaatcatgggatgataccccaaaccagttctcggcagccatggctatggacccgacaactccggtattccgtccgcaggaccaatgggaggataatgagtacaacaactatcaacgctcttacaacaaccaggagtggaatcccgccggttcaattgcccgtagcaatgctcattctcgcgagttgggtgccattctgaatacctatctgcaggtaaccccgatagaaaagctgacgttgcgcacccagttcggtgccaatgcacactatcgccgttctgattcattcgttccgaagttcaatatggatccgttggagaaacaagacttgaacgaaatcacccgccgcaatcaggagtggtttgactggaactggacgaatacagccacttacatggacactttcgctgaaaagcacaacttgaatgtaatggctggctttactgccgaacgttttgcatggtacaatactcaggcacggcgtgataatgttcccaataatctggaccagatgcaggaagtgaatgccggacagcagggtacggatgaggccaacggtgaaaccacttacaatacactggtttctttcctgggccgtgtcatgtataactacgataaccgttactacatttcggcatctctccgtgccgacggttcctcccgtttcccgaagggcagcaagtatgccctcttcccgtctgtttccgcttcctggcgtgtcatcagtgaggcatttatgcaggaccaggacatcttcagtgacctgaagcttcgtggaggctggggccgtgtaggtaatcagaatatcaacaataatgctacccttactttgttgagcgaaacccaatactattatggcaatacgttggcaaatggttacttcgtgtctacagtaggtaacaaccagttgaagtgggagactgtggaagattggaacgtaggtgtggatatgtcattccttgattcacgtttgggtgtaacattcgaatatttccagaaaaagtccattgacatgctttaccagaaacagaacatcctctctttgggatatgataactggaacagccagatttggatgaacatcggtagtatgcaggcccgcggttgggaagtgggacttacctggcgcgatgaaatcggcaaggatttctcttacgatcttggtctgaacctttctgccgtgcgcaacaaggccatcaagttctcgggcgacggtcctatcaatgtcggtggattcaatagcgaccagattatccgtaacgaagatggtggttttatctcccgtttctacggttacgtggccgatggcttgttccagaattgggaagaggtgtatgcgcacactgacgaacacggaacactgattcagcccaatgcaaaaccgggagacatccgcttcaaggaccgggaccataacggagtgctcgatgccaatgacaaagattatatcggcaatccttatcctgatttaatgatgggtctgaatattggtatgcgttataagaacattgattttgcagccaatttctatggtacgttcggtaatgatatttacaatgtcaccaaaggacggtactccggttcaggcggacagaatgtttgggcaggtacactggagaaagcatggcatggagagggtaccggcaatgatattccccgtttgtcgagcaatgacttgaacctgaactatagccgcgtttccagtttctatgtggaagatggttcctacttgcgttgcaagctgttgcagataggctatacgcttcctaagaaatgggttggaggtgctgacttgcgtctttccttctctgcacagaatccgtttaccattaccggttattcgggaatggaccccgaacgcccgatggttgacggtactaccgacagctctggcagtgccatcaataccggtattgacaacgtggcttatcctaatccgagaacattcttgtttggcattgacttcaaattttaattcttgattatccatgaaacgaatatttacaatagtagttctgattgcttcgctggtgtttacctcttgcgaggacttcctgacggaagacgtacgcgggcaattgaacgtggacacttattataagtccatagaagagtgtgaatccgcagtcacgagctgttatcaggccatgacatatggaggatggtggcaaatcaacaccgtgtggttactttccgaaatgtgtggagatgatgcctggatggggaatacctctcagtctcagagtgattatatctcattggcgcattatcagggaaacggtgccagcaatggccctatctccaatttttggcagtaccgttacaaaggtattttacgttgtaacatagccatagatcgcattgcggctctcgaaacccaagagacagaaaccagagaccgtctggtggcagaagcccgtttcctgcgtggctactattacttcgaactggtgagaaattttggcggggtgcccttgatgaccagtttccaaatgccggaagaagtggagggaacagaacgtgctacggcagaagccgtgtacaaattcatagaggatgacctgatggcagctgccgaaatactgccgcaacgcagtactgcgcaagtagggcatgctacccgtggcgccgctttaggattattgggtaaagtgtacctctatcaggagaaatggcaggctgcccatgatgtgttgaagactgtgatagatgaaggcgaataccaattgcttcccgatttcgggcaggtatggaatgtcgactatgacaacagtgcggagagccttctggaaatccagtatgaatatcatcccactttgggcttaggaggggcgcttgctacggtaaccggtgcccgtaatggtcctggtgatggttggagctggtgtcagcctacggcaaatttggagcaagcttatattgaggccggtgatacggaacgtttgaaatggacaataatcaagtcgggctgtacagaaattgctggcgaagaccaattcgaagatttcattgacgcaagcaaagcgttgaataagtatcaggaatatcttgataaatatggttgggaccccaattgctatattatcaatcccgctgaccataagtctgcgcgtatcatccgcaagtatttcctgccgatgaaatatcgtgctcaaggcgatgcaacggcttacgccacggacaagagtcctttgaatcaccgcattctgcgttatgccgatgtccttttaatgtatgctgaggcttgcaatgaactgggtgatgacgcttctgcccgtgatgctctcaatcaggtgcgcagacgtgccaagttggatgacgttacggcaagtggaaaggcattgcaaagtgccattcgcctggagcgccgtttggaattggctttcgagcagaaccgtctgtatgatatccgccgctggactgatacaaatggtaaaaagatgattagcaatatcctgggaccgaacggttcctttgtgaagtggaacactgaagaggctacccgtgacgctcttgagtgggaaaatcaaggtgaagcaagtgacaaaggcatcactttcaatgaaaaccgcgacatggtgttccccattcctttgtacgaaatcacgatgtccaacggttccattacccagaacccgggttggaattaaacacattctgatgaaaacagattgttgcaggaactgattattcaataggtctttatattctgtcgcggatagtttgcaatggattatccgcggcagtttttttaatccgaaacaatatcatgaatttgagacacatttttattcttccggcactgcttgctgcaatggcttgcagcgacgattctcccgttacgccggatactccagacactcctgagggtccggacattacaaacagcgtagagaaactggtgagcatcgatgccggacagactttccagacaatagccggctttggcgcttcggactgttggtcgcctgcctttgtgggcaagtcatggacttcgcaccgtgcggggattacggaactgcttttttcttcagagattgtgggcggcaagccgaaaggaatcggcctttcccaatggcgggtgaatcttggtggcggcagtgccgcgcaaggtgaagccagcggcatcgaggataaatcccgtcgtgcggaatcctatcttacggatgacttgacgtacgactggacccgttgcgagggacaacgttacttcatggaccgtgccaaggagctgggatgtaacaatttcgttcttttcagcaatacacctcccgtgcagtacacctataatggaaaaggattttccgccagagggggactttccaatctgaaaccggagcattatggtgactttgcaggatatatggccgatgtagcggcccgttataccggtgaaggctatcacataagccatatctcgcccgtcaacgagccgcagtacaactgggacagcggtcaggagggcagtggctggaccaatgacgaagtggctgcactggcacgcgagttggatatgtcgttggatgaccgggggctttccacagacattctcttgggcgaatccggtgattgggagtatctgtataaagtgaaaggcgatgccaaccgcagtaatgtattctcagctttctttacacccggctcttccgcctacgtgggtgacttggcacacgtgaagaatctcatttgcggacacagctattggactgacggcacatgggacggtatgcgcaacgtgcgcaagcaagtggcccaggctgccggtcagtataatctggatgtttggcagagtgaatggagtatgctgggcgataattacagcagttccgaattcgtgggctacgagcaggcttctgagatggatatcgctttctacatgtcgaaggtcatccacaatgacctcactgtggctggggtgtcttcctggagttactggacatcgatggatgtttcccgttgggggcataagaaccgttttctcttgatttcgctggtacctgccggtggcgagtatggtgatatagagcaggagggaagctatcaggctactgccactctttgggtactgggcaattacagccgctttatccgtccgggataccgccgtattgcccttgacttgaacgaatcgcgtacttttttcggttccgcctggctttctcccgagggggataaggtagtggccgtctatacaaacatgtctgataaggcggttcgcttaggtgaaacgcatgtgggatggagcaatgaagcgaagtcaatagctacttatacaactaccggtagcaagaatctggtggaaggaacggtggcggcaggcaagcaggtgattctggaagccaagagtgtgacaaccgtggtgtatagcctgaagtaaggaattagtttaacttcaaagaaaatctatatgaaaatgtattttaagaataacaggactgctcttatctttttgctggcaatgctggtcgttgctccgataaaggcgcaggtggcatttggcgatgccgcaaaattcaatgacggatggctgttccggctgacggacgactcggctattgtccggactgactatgacgacagcgaatggcggaagctttctttgccacacgattggtccatagaggggcaattgtcgcccacactggccagttgcaccgggtacctgccgggtgggataggctggtatcgcaaacacttcagggttgaagacaacgcaacacgtcattatatctatttcgaaggggtatataaccggagcgaggtttacctgaacgggcatctgcttggcaggcgccccaacggctatgtatcgtttctttacgacatgaccccttacctgaaggaaggcgacaatgtgctggctgtccgtgtagaccatagccgttatgccgattcacgttggtatacggggtcgggcatctatcgcgatgtatggctggtggctgctcccgatacacatattgcgcaatggggtgtgggctggcatgccgcttcgctgacagacaagcaagccgtcgttgcggtcgatgtagaggtggagaagcacaaggcaacttccgacaaactggaactgaaggcttcactgtacgatactgccggaaagaaggtggcacaacgccgtgtgcgtgttgccgatggaaaagagggcattgccaagcaaagtcttgacttgaaagtgtccaaaccccatcgttggaatctggataatccgtatctgtatacattgaaaaccgaattgcttgccaatggcaaacgcattgacggcagtgagaccaaagtgggactgcgtacgctggaatttgatgccaacaaaggttttgccctcaacggcaactggatgaaggtaaaaggtgtatgcctgcatcatgatgcaggagtgctgggtgcagtagtgccgccggaggtatgggaacgccgcctgaataacttgaaagggattggcgtaaatgccatccgcatgagccataacccacaagcccccgttctttatgaactgtgtgaccgcctgggatttcttgtaatggatgaagtctctgacgaatgggagtttccgaaacgcaaatgggtacaaggctggaatgtgggtactccgagttatgacggtactttcgacttcttcgaggagtggatagaacgggacgtaaccgatatggtacgtcgtgaccgcaatcatacctgtattttcttgtggagtatcggcaatgaagtggattatccgaacgacccttattcgcatcccgttcttgatggagctaaaatcaaccagcctatgttcgggggctataagccggatgctcccgatgccatgcgcatcggaaccatagcaaagcgtctggctgcctgtgtacgtgccgtggacacttcccgtcccgtgaccggagctttggcgggtgtcgtgatgtcgaacgagacggagtatcccgatgctgtggatgtggtggggtataactatacggaaaaccgctacgaccaagaccatgccacttatccggaccgcattatctatggaagcgagacgggttcggggcttgatgcctggtatgccgtccgcgacaaggatttcatcttcgggcagttcatctggaccggtacggattatctgggtgaatcgggcagatggccgtcccgcggtttgtacacgggtttgctcgatttcggaagtttccccaagccacgcggacatttccgggcttcgttgtggtgcgagaatccggtcacgtatgcaggaacatatccggtatatgtcaatcccaagcatcccgagcatgtattcctttcgcctgatgcatgggacatctggaactatgacgaggggcagaacatacgtgtggtgtgttataccaatgctccgcaggcgcgtttgctgctcaacggcagggtggtaggcgagatgaaaccttatgatgaaaagaccggcatcatctactgggatattcctttccgggctggtgagcttcgtgctgagggctgcgataaggaaggaaatgctttgtcgagctattccatccggacatctggacgtccttatgccatccgtgccacggcggatcgcactattttgtccggcgaccgcgccactgcgcacataaccgtagaggtggttgacgaagaaggtactgttgtgaaacttggcgacaatgaaattacgtgtacagttgaaggagcggcgcgtctgcttgggctcgaaggctctgacaacagtgacatgagtgattataccgataaccgtcaccgcgtataccacgggcgtttgctggcctatatacagactaccggaggagagggaccggttaaagtaaagtttgcttccccccttctgaaaggaactgaagtaaagtttgaagtagggcagtagtacactactatggacttatgtttgtgccatcgtattggcacagtcgtgccagtacgatggcaaggctgtgccagtatggtggcacaactttgccaatgcgatggcacgggttgtgcatttcttacagaatgtattgcacttccttgaacagatattcccgttcacttcctccttcatcctccagcacgaaccgtccgtcttgctctacacgcagcaaccgggcaaggaacttgccgttggcatcttcataagggtgcaatccccggcgacggaaaagggagcgggcataccgtgtggatatctcgtcggagtagacggcgaagtcctccatttggaggctgttgtagtagatttgtacacgtcttaggatatgggcaaggatttcataacggtcgtgctcctttccggtgatttgtttcagtgagacggggttgggagcatcactgttgaagacttcctggttgatgttgataccgattccggcaatgctgcgcctgatatgatgtccggaaaggtcgttctctatcagtatgccgcagattttcttgtctttccaataaatgtcgttcggccatttgatggtgatttcatcagaccatctgctcagctcttccttaatggcgagggaaacgatttgtgaaaggatgaactgccggcgggcttccagaaaagaagggtagagtacaaagctgaaaagcaggttcttgccttcttcagcttcccaggtgttgccgcgctggcctttaccggcagtttggaactcggcagtcacggttgttagttcggcaacggattcttgcaactggttgcaaagctggctgaggtattggttggtcgatgccgtctcgtccaatgccaccagcgggaacgggaatgtgtcagggcagggcttcatattcggtacgcatttttttggtgaacttcttcaatacttcttccacggagtggtctatcagttgcttcaacagtttgtcgtcgacgttaccgtcaaggaacacctggttccagtactttttgttgaagtgataggcaccttcgatggcaacatagtgctcccgcagttcgagtgcatattcggggtcgcatttcagacaaatcttgttggcgctttccaggtcgataagtgcaaacattttatccatgactttcatcacgagcgagtattcgtcaaacggaaagcattccgtgacggcttttttgctgaggcaatattcgcgggcggtttcgatgtccatgatggtatttacggttttacggtttacaatttacgattgaaataactcttgcttgtcaattttcaactctcagaacatcggcggatagaaggcttctttgagatgctctatcctgaatgcacccggttcgcctacagccgttatgatgtcgaagcggacgggtgcatccaagcagaagtgcttgatataggcatcggccgctacgacaatacgtcgtattttctgccagttcacggcatcctgcggctcaatgtaatccgtattgctacgggttttcacttccacaataatcagttccttatctttgtcggctacaatatccagctcaaggtgattcttccgccagttacggtcacgtatggtgtaaccgttctgttccaagtatttggcagcggcgtcttcaccggcttttccaagaatattgtgtgcactcattattctgcgtgtctggcaggcatcagcataccgtcgtgtccaggacggaagatagcgggcaacttataagttttaccatccaatgtattgaccactgcactgcgcgtttggggggctggatttgtaccggtaatcagttcaatggccttggcatacagaggttcttcattgtttccataatctttatgaatatagaatacaccttgttcgttataaggattggtttcatccatcaatatatcgggttcaaatcctttttcatactccccgaatcctttggcgttatagctttggaaggtgataggaacaacacgatatgtgttattccggacagtgtactcctcatattccatacctacgttcttaccagtggtcttttcacctataagtattacgtccaaatctattccttctaaggaattaatgacgagttcactggcagaggccgttccatttccgacaaggcagtagacgcggggaaggttgaggcttccggctgataaggaagtacccaagttgggataactggagtatgcaaataattcatcttcccgtttgttattgagttttgccattctttcatcattgtatcgtaaactgctgaatactttaccttgagaggcagtaccggcaatacaagttgctatcagattagccgacatggtatgcccaccaccattgtaccgcaagtccagaatcaaatctgtgacgttcttgtttttaaaatctttgaaaacattgaataattcttggtcaaagcctgcctcgaacccagaataaacgaggtaaccgattctatgtccttctatatcttccttgacattactgaagatgacggggttgttgtatgtggctttggaagttatggtgtattccttttgcccggtaatggtgcctccttctacgacatcttctgtcaaagtatagttgatagttgcatctggtgacaatatgtcgtaatagaagttattaatattgttattatttatcttctttccatttatcaggcttatcattgctcctcgtttgagtccagcttcggaggccggtgaatcgggatatacaccttggaggcagaaataaatggtattttctgcttgtgtgccaatgcttatgggggttataccggtgataccgaaactatatgccagttccttgtttacaattttggtggtacgggttgaactaatattgggcaatagctggatataagagaaaagattataatatgtcttgccgtcgctaccgacatatgtttttttatccaatgtattggtagtcatacttcccaatgcatcatagaagaagtcttcatagcctttgttatggtcaagattcaacgttttgtattcatcgttccagagatacatttccctcagatattcatcaacttttgcgttaatctccatatcttcagtggtttggggaacactggtccccttttgtgtaacttcaaaacttgcaggagaatagccgtctatattaatggaaattctggctgtccggttggtggtggaacttgtacttacagataatttcaaggtgctttgtccttttgtacccgaggtcgtattcagtttgcaccaatccgctcctgaggtgacggaagctacccatttggctgcagcattgaagcttacagacaactcattatcctggctgatctccagggattttccctctgtccaactctgattggttatgccggtattaagtttattatcgtcatcgtcactacatgagataaaacttatactgaacaatgtgagtagaaagaaactaagataatttacatgtttcataccttttaaatttagaactctccaaaaatacgtttttaattactaaattaaaatgtttttaagaaatactttaagtttaccggtcaaaaaaatatttcagtgctatttaagtgtttccgatataaaaattacgtaggttcgttttgtttttacagaagtaaaagtaattttgcaggaaatatgagaaagagagataaaacgtgtgcgaaagcaacgcccgaagaaccgaaacgcgagcagcgcatggtatgcctgatgagcgaggaagagcagcggattgtggaccgttatctggagaaatacaagataacgaacaagtcgcgttggctgcgggagactattctcatgtttatccataagaatatggaagaggattatcctactttgttcggtgagcacgacatgaggaggtgaaaattaaaaattaaagggggtggcgttggacgatagctattatatgaagcaggcgcttttggaagcccataaggccggtgaacggggagaagttcccgtaggtgcagttgtggtgtgcaaggaccgtatcatagctcgtgcccataatttgacggagactttgacggatgtcaccgcccatgccgagatgcaagccattaccgctgccgctgcaactcttggcggcaaatatctgaatgaatgtactctctatgtcacagtggaaccctgcgtgatgtgtgctggtgccattgcctgggcgcagatgggacgtctggtgtttggtgctgaagatgagaaaagagggtatcagcgctatgcctcgcaggcattgcatcccaaaacacaagtagtaaaaggaattctggcagatgaatgtgccgccctgatgaaagagttctttgccgccaagcgcaaataatctctaatcctttatccctaatctctactctttgatttcttcaaaatccacatactctccctcgtctttggagaacagtttcttgtggcgggggcgtatttcaccttcttcagtttgtgcctcctcagacgattgtctattatcattgtaggaataccctcccggctggtaattaccatttcctttttggtagggaccggagttggaggaagtacggcgtccgcccaatccgaatatgttccggatgacagtaccgataatgctgaggccaatgagcagaatggcaattatgatgatgaataaaaatcctaaaatatgaaacatgggctaatgtctttttatgtgttcgttttctgcgaacttcaatacaacaaccgtgccaaagatttgtttatttacttttccttgtaataagcgaaagcagtatataccagacgatgattgcagaaaagctgcagattcccaagaagatgaggaacggaatgcagacaagcaggaaaatgaagcttgttttattgtctttccatgacagattcttgaatttgagtgagaacattggaatctccgatacaagcagccatgagaaaaggcagaccagcagcaacagataaaccggatggaaattgctgctcaccagccagtcgtgagcgcccgtcaccaatgaagcccagaacaaggcgtttgccgggacgggaagtcctacgaaagagctcgtctggcgggtatcgttgttgaacttggcaagccgcagtgcagagaatacggacaaaagaaatgcgagataggggaaaacgccggccaagctttccattgcgcccgaatagtccatttccttgaacaaggaaaatacaatcagggaaggggccactccgaaactgacatcatctgccagagaatccaaatccttgccgataatggagtgtgcgtccagtgcacgtgccatcatgccatcgaagaaatcgaatacggcactgaagataatgaaagcgagtgcccattcatatctggcttcgaatgccatgacacaagcaatacacccggagaataggttcaggcaggtcagagtatttggaatatggcgggtaatgcagtttgccattgttgttcttttattatttaagtttggctatcacagtctgattgccggtagtcagttgtcctagtttaacgaatacttcggtgcccaacggtagaaagacatccacgcgggagccgaatttgatgaaacccatatgttcgtcaatatagcattcctcgcccggttcggcataggtcacgatgcggcgcgccatggctccggctatctgtcgtgccataatctccacgccttccggagtttctattactacggtggaacgctcgttgtcggtgctggctttgggcagccacgctttcatgaactttccgttttggtgccataccttctttaccgtgccgtctaccggataccagttggcgtgtacattgaccagactcatgaatatagataccatgatacggcggtcgtggaagtattcgttttcctccacttcttccaccactacgattttaccgtcggcaggagctaccacgactttctccgtttcttgtccgaacaaacggatggggcagcggaagaagttcacgagtatgccatatactatgaggctgatgaccgctactacgtaaaaaggaactttgcattccaatccgaagtaaagggcagtgttgacagccagaatcagaaccaggctgcctgccaatgtatgtgttccttcacggtgtatgcgtatcttttttaatctttttaatcgacccatgtatatcgtatttgctaatttagatagaaattatctgcaaaaataagcttattttgaaaatctaacaaggatttggagagagaaatgtgcatgttgataactttttgggaaatatttttgttagctgtgatagaggttgtaattttaggctctcaatagaaaggatatatatgcaagattttgttcatttacatgtccatacccaatactctcttctggatggtcaggcaagtgtcagcaggctggttgacaaggccatgaaggatggtatgaaaggcattgccgtgaccgaccatggaaatatgttcggtatcaaggagttcaccaactatgtcaacaagaagaacagcgggccaaagggggagataaaggacctcaagaaaaggattgccggtattgaaagcggtgagatagagtgtgaagacaaggaagcggagattgccgattgtcgtgccaagatggcagaagcggaaagcaagctgttcaagccgattgtaggctgtgaaatgtatgtggcccgccgaaccatggataagaaggaggggaagccggaccagagtggctatcacctgattgtgctggcaaagaatgagaaggggtatcacaatctgataaaacttgtatcgcatgcctggacaaggggatactatatgcgtccgcgtacagaccgcagtgaactggaaaagtaccatgaggggctgattgtctgctcggcttgtatcggtggcgaggttcctaagaagattatcaatgaccagctggaagaggcagaagaagctgtacgctggtataagaatctgtttggcgatgattactatctggagcttcagcgccataaagccactgttccccgtgccaaccacgaagcctatccgcttcagcagaaggcgaatgccaagttgctggagcttgcccggaaatatgacattaaggttatctgctctaatgacgtccactttgtggatgaagagaatgcggaagcgcacgaccgcctgatttgtctgagcacgggtaaagatctggatgaccctacccgaatgctttataccaagcaggaatggatgaagacaaaggctgagatgaacgccttgtttgaggatgttcccgaagccttgtccaataccttggagattttggacaaggtggaatattattccatcgaccacgctcctattatgcctacgtttgctattccggaagatttcggaacggaagagggctatcggcagaaatataccgaaaaggacttatttgatgagtttacccaggatgaaaacggcaaggtggtgctggatgaggatgccgccaatgccaagataaagcgtctggggggctacgacaaactgtaccgtatcaagctggaagccgactatctggcaaagttggcattcgacggtgctaaaaagctgtacggtgatcccttgtccgacgaggtgaaggagcgtctggtctttgagctgtacatcatgaagacgatgggtttcccgggatacttcttgattgtgcaggactttatcaatgccgcccgcacacagctgggcgtttcggtaggaccgggacgtggttcggctgccggctcggcggtggcctattgcctgggcatcacgaaaatagacccgattcaatacgaccttctgttcgagcgtttcttgaatcccgaccgtatctctttgcctgatatcgatgtggacttcgatgatgacgggcgtggagaagtgctccgctgggtgacggagaagtacgggcaagagaaggtggcgcacatcattacatacggcacgatggcgaccaagatggctatcaaggacgtggcgcgcgtacagaaactgcctttgagcgaatcggatcgtctgtgcaagctcgtgccggataagattcccgacaaaaaactcaacctgccgaatgctatcgcgtacgtacccgaattgcaggctgcggaggcttcgcccgatccgctggtgcgcgatacgatgaaatatgccaagatgctggaaggtaatgtacgcggtacgggtgtgcatgcctgcggtactattatttgccgtgacgacatcacggattgggtacccgtcagcacggcggatgataaggagacgggcgagaagatgctcgtaacccaatacgaaggttccgtcatcgaagatacgggacttatcaagatggacttcctcggactgaaaaccttgtccatcattaaggaagccgttgccaatgtacgtctgcaccgcggcttggaactcgacatcgacaagatatccatttccgaccctgctacctataaactctattgcgacggccgcaccatcggtacgttccagtttgaatcggccggtatgcagaaatatctgcgtgagttgcaaccgagcactttcgaggacttgattgccatgaacgccctctaccgtccgggacctatggattatatccccgacttcatcgaccgtaagtggggacgcaagcccatcgagtatgacatccccatcatggagaagtatctgaaggatacctacggtattacggtctaccaggagcaggtcatgcttctgtcgcgtttgctggcggacttcacccgtggtgagtccgatgccttgcgtaaggcgatgggtaagaaactgcgtgacaagctggaccacatgaagccgaaattcatttcgggcggacaaaagaacggccacgacccgaaagtgcttgagaaaatctgggccgactgggaaaagtttgcatcctatgccttcaacaagtcacatgccacttgctattcgtgggtggcctatcagacggctttcctcaaggccaactatccggccgaatacatggcggcggtcatgagccgaagtttggcgaatattaccgatataaccaaactgatggacgaatgcaaggcaatgggcatcaatacattggggccggatgtgaatgaaagtaacctgaagttcaccgtgaacaaggaaggcaatatccgttttggtcttggcgcggtgaaaggggtaggcgagggtgctgtgcagagcatcatggaggaacgcgagaagaatggtcctttcaagggtatatttgattttgtgcagcgtgtcaatctgacagcctgcaacaagaagaatctggaatgtcttgctttggcgggcgggttcgacagcttcccggagctgaagcgagagcagtattttgccgtaaattccaagaacgaggtcttcctcgaaaccttggtgcggtatggtaaccgttaccaggccgaccaggctgcggctgcaaactccttgttcggcggtgagaatgtggtggatatcgccactccggaaataccggtagcggaacgttggagcgacctcgaccgtttgaaccgggagcgcgatttggtaggtatctatctgtccgcacacccgttggatgagtattccgtagttctggagcatgtttgcaacactcacatggcagagctggaagataagacggcacttgtgggacgcgaaataacaatgggtggcatcgtgaccgccgtgcgtcgcggtatcagcaaaaatggaaatccttacggcatagccaagattgaagactattccggttcggcagagcttcctttcttcggaaatgattgggtgacctatcaggggtatctgggtgaacgtaccttcttgttcatcaaagcccgttgccagcccaagcaatggcggcaggatgagttggagctgaagataacctccatggaactgttgcctgacgtcaaggagaaactgattgagaagataaccattctcattccgctgagtgtgctgaacaaggctttgataactgaactggcggaactgaccaaggaacgtccgggcagtacggagctttatttcaaagtcagagatgaggatagcaagatgacggtcgatttgatttcccgtcccgtgaagctttccgtggggcgtgaactgattacttatttaaaagagcgttcggatcttgagttcaggattaattagttatctttgttggaaaacgaagataggctgcatctcagcataaaaaatgaactagttcattttgttttgcattcggtttgcactatctttgcttcgaaagcgaaggttgataaaacgcaattgacagtaaattaataattatagttgacatttaatattaaaagaaatggctttagaaattacagacagcaattttcaagaaatcctggcagagggaaaaccggtagttatggatttctgggcaccttggtgcggcccttgtaagatggtgggaccaatcatcgatgaattggctactgaatatgaaggaaaggtaatcattggcaaatgtgacgtggatgagaacggcgacgtggctgccgaatatggtatacgcaacatccctacagtcttgttcttcaagaatggagagctggtggacaagcaagtaggttctgctccgaaatctgcttacgtggccaagatagaagcgatattataaggtactatttgacgatttactatttacgatttaccctttcggcatcatagcgcagccaaatagtaaatcgtaaatcgtcaaatagtcaataacattaaccctttaagcaatagtaagtatgggaatggaagacgattttttgcagaatgatgtcgatgatgaaaagaccatcgagtacatcaagaattatttgccgcaggagttgaaagagaagttctctgacgacgagttctattattttctcgatttgattgacgagtactattccgagagcggcatccttgatgcgcagccggatgcggatgggtacatcgagattgatttggggaaaatcgtggactatattgtcaaggaagcccataaggatgagatgggtgactatgatccggaagaaatccttttcatcgtacaaggtgagatggaatatacggaatctttggacgaagaatagtctgtatcaaaagtataggaaaatcgcggatgagcatggcttcatccgcgattttttgtttttatgtagccggtggcgtattcagaaaaaagaagatggacgtgccgatgaggatgacacccaatacgccgtagaacaggcgggcttgtcgccgccctacattttgtacgataaactgggtgtttcgggcagtaaagaaccagttccagtccaatatggctgccagcaaggcgatgatgcccgcgacggcaaaaattccttgaacgatgtattggctcatcagaaataaaaattaagaattaaaaattaaagtgggggaaaagcatgccttattcaaagttctctaacgtgactttccgctctccgttctccacttcttcgatggtgaccttgatggtattacccggcaagagctcctctaccagctccggccattctatgaagcagagggcgccgctgtagaagtaatcttcgtaccccatgtcatacacttcttccagtttcttgatgcggtagaagtcaaaatggtaaatcagttcaccggcagtgtcggaacggtattcgttgacaatggcgaaagtaggggaggtgatgacgtcggaaacgcccaactcctcgcaaacggctttgatgaaagtcgtcttgcccgcccccatttttccatagagggcgaagacggtattgtcacccatttcagcgatgaactggcgggcggcttcgtgaatctggtctaatgactgaattttgatttccattgtgtttatagatttctttagcgttgcaaatatagccaaaaactttttcccgtcttgcaaatggcatagataatgatggaaaagaatatgatggatgcccccgaggggacattcaagtagaaagaaatcatcagcccgcccaggcaactgaggtaaccgatgccgatggaaagccagatgatgcggtggaaccggtgcgagaacaagttggcggtcatctgcggaacggtgagcagcgaaatgaccagcacgatgcccaccatgcgcaggcatgccacgatggtaagcgcaatgaacatcatcagtgcatattcgaatacctgcaccggaatgccttgcgagcgggcaaactcccggtcgaaagccacgtagatgataggatggagatacagtgcaaaaaacagtatcagcagcagggcaagcccacccaatagagcgatgtcgctccaggtaatcgtgagaatgttgccgaagagataggcggacaagtcgggtgcgaatcccggcgaaaggaaagtgaacataatgcccaatgccatgcccaatgtccagaatacggcaatagcggagtcttcccgcatatccttccgtttgctgagccactctacaccgaaagcggacaagactgcaaacaaggctgccgacagaatgggggaaatgccggtatacaatcccagaccgataccgccaaaagatgcatgcgtcaatccaccgctgatgaacactagtctccgggtaacgatgtacgtgcctatcagcccgcaagcaatgcttgccagcagactgccgatgagggcatgttggaaaaaagtgtattgcagtagctccatttattcaattaaaaattaagaattacaaattaaaagttggatgtggagtgttaggaatggggggtgagacgacgttcgccgataatgaggaatacttcatccttgatattctccggcagggctatgccgcgtaattgcaggctgcgcacccatccggctacgtccgtgtcttgcatggtgtagaacacgtcgcggaactcgtcttcctgctcgggagtataggcatcgggagcggtgccgatgtatttgtccagttcctcgtcatcgtaatattcaatttgtttgctgacggctgccagtaagctgtcacgttcgcagatttcatgctgtccgcagcattcggaatccacttcctgcacttcgggcatggcgtccagttcgccgcggtctatcttcttctgcagtttccggttgcgtataattccggctgtggctgccacgagggcaagggcaatcaggctaataatcaatatccacataggcctccttttcttgaaaaacatgttccattaatagaacggacaaagatacacattgttttgtacacgacaaaataatgagtcagattgcaggtaggcagattactttcgcccgacgcaggcattacttgcttggaacgtagtataaaactactttggatgcattctaatcttagaatgtatcctttattcctaagaataaaggttatattcttaagaataaaggctgtatttctaagaataaaagctttattctaggattgcattgcatcttggcggactttaaatcccgccttttgcaagtcttcccagtaagcagggtaagatttggtaacgacctgtggttcatttatccgtatttggggcagtacaaggcaggcaggggcaaatgccatggccatacggtggtcttcataggtggcgatgacggggttagcgtctgccgggcagcgttcgccatcccataacaagatgctgtcttgctcggagcgcacgacgtaacccagtttacgcagttccctaatgagggcggtgatacggtcggtctcctttattttgaggctttgcagtccggtgaagcggaaagggatgtccattaggcagcaggtgacgacaaaggtctgcgccaggtccgggatgtccaccatgtcttcgtcgagacgggtggcgggagtacccttacgggtcagttttactccccggtctgtatattcggtatggacgccgaggcgggcaaagacttccgcgccgcggctgtcgccttgatagctgtgggcgaagagaccgagtagttcgatttctgccgtgtgcgcttcttccttcgtgctgtcttcactttcttttgcgctacttctgtctcccccttttattttttcatttttaattccttctattgccatcatctgataccagtaagaggcggcgctccaatcgctttctacggtgaaaggggtatccgtgtatccgccggggctgacggtgatgcaatcttcggagacccagtcggcttgggcgccgaagtcgcgcatcagttgcagggtcaggttgatgtaggggcgggagatgatgtcacccgtcaagtgcaggcgcaggcctttgggaaggacggcaccaatcatcagcagggcggatatgtattgtgagctgacattgccggcgagggatatttcgctgccggtcagttctgttccggtgatgcgcaagggagggaacccttcgtttccgacgtattctatgcgggcgccgagctctcgcagggcgtctaccagtatgcggatggggcgttgctgcatgcgttgcgtaccggtgatgattcgggtgccaggagttacgctgaggtaggcggtgaggaaacgcatggcggtgccggcggcaaggatatctatatgtccgggatttccgtcgagggcgcgagtcatcactatggtgtcgtcacaatcgctcagattgcagggcaggatattgccgtgggcaagggagtggaggatgagtgcccggttactgatgcttttggatgccgggagctgtatggctgcgtgcagtgaggcaggagcggaaacggtatatcgcatggtcgtatttgttaagttacggtggtaaggcgttttttattgtcactgcaaaagtaggataaatctttgggaaatggaaaaaaggaaacttgtttctgtggtttcaatctttcgtttatctttgcggaagtaagtcctgctatcgggacggatagatataattaagcatcattcttatggaaatagatttaaccacccccgctttgctgttttcggccatatcgctgattatgctggcctatactaaccgtttcttgtcctatgcccaactggtgcgcaccttaaaggaacagtacatggagaacccgtcttcggtgaaggcggcgcagattgccaacctgaggaagcggctctacctgacgcgtgccatgcaggtggcgggcatcggaagcctgctgctgtgcgtggtcagcatgttctttgtctatatccgtctccatctgctttcggcctatattttcggtttggcgctgatattgctgattgtttcgctggccatatcggtgtacgaaatatatatatcggtgaagtcgttggagatacatctcaacgatatgcacgagtagcggctctatgggatgatgttccgtacggggagctccagttctccccagtcaatcatggcattgaatagtctgacggtagagaatgaaggcaagtcttccggtctgatgtctttttcctgcaagattccttcttccagcaaggctgcccgtttggttcctttcagcaggggatgtgccggcgtgtaccagtgggtgccgtcggaaagggcgatgttggcgatggaggtgtctgtcagcaggccttgtttcacaatcagaatgtcgtcgcatgcgccgcgcagggcaaagaggcggttcagcggttcgcgtccggcgcttttgtaggtgtagtcgatggtatcggcctgcatcagtgccagcgaatgcacgtgccgcacggtgtagggggagtagctgacatcttcaatacctttctcaccatacactacgcgtgccttgacgatgcccgccccggtgatgcctgctccacagccgggagacgacagataatcggacagttgcagcggtgtgctttccggccagaagtgggcgcgggtatcgttcagcctccggttgtggcgggaaaggttgcagacccttccgtggtcgatgcgtatggtttcaataaataggcacatatattttctgtattacttcgttgtattcgctttcccaccggcttttggcggtgatgccgcctcctgccttgaagtggagctggccgttttcctgctcgatgaagcgtatcatgacagcgctgtccagctgtccgtcggcataatgccccatgatgccggtgtagaagccccggcggtagtcttcggcctgggcgatgatttctacggttttgggcttgggggcgccggtgatggagccggcaggaagcaggcggaagatgatgtcgcccaggtgtgcggtgtagtcttcgggcagggtgccgcatatctcggagctggtctggaggatggggcccttattggtttgcaggcggtctatatatcggtaggaggtcacttcgacgtgttccgaaaccatgctgaggtcgttgcgtatcaggtcgacgatggtggcgtgctcggctgcctctttggtgtcctgcatcaagagctgttccgcatcgggcagggtagcgtcgatggtgcctttcatggggaaggactttatcttgcccttctctatgcggacaaagatttcgggggagaagcagacgaaccggtctttcagccacagcttgtacaaggcttcggagtggaggaatatttcttccagtgtcagattggtggtgacgggtacccggcaagtgaggttcgtcaggtagctgttgcctgccagcaggttttgcttcacgaggtcgaacgaatgtctgtatgcggcgggggaagggggagtgatgtcccactggatagggccggcgcatcgggcggctgtgcttctggcaagggctgttgcagccgtctccgtgttgcctgccttcgggaattggaaaaggcaggtggcggggtctatccggtcgaggggctcaatgtgcgactgctcttgcgcgtagtctacgatgaagaggaagggcacattggctccggccagtgcgttcatgcgggcgatggtttctgtccggctgtacgtcttcatgcgtcaatagactgcggaggctatcacctggattatcagaatgaggaacaccatggcaatgggatataccgtggcataggccacgctcggtatgttgctgtccgtcatggagtcggcggcggcaaggccgggcgtactggtcatgccgccggtgatggtgcccagcaggtcgagaatgtttatcttgaacacgaacaggcctacgcatactgccaccagcatgggcaccagcgtgatggcggcgcctacgccgaacaagagccagccgctttcctggaacgtggccatcagattccgtcctgccgatgtccctacttcggcaaggaagagcagcagtcccagctggcgcagcagttggttggcagggccggacatggaccacagaatggggccggtctttccgatggcgctcaggaacaaggcgaccatcaggatgcctcccgtcagtcccggagagaacgacagactgtccgagaaggagatgttgagcttgccgaagagcacgcccagcacgatgcccagggcgatggggaagaagtcggtgtcggacagttgcttggtgtcgttgcccagcaggcgtgccactcccttgatgccgtccttctcgcccaccaccatcagcttgtcgccgaatttcagggcgaggtcgggcgagggggagaggtcgatgccgcttcggcggatgcgggtgacggtgcagccgaagttcttcatcaggttgaggtcgcccagctgcttgtttatcatatccttcttggtgagcagcagggattcaatctcctgcatgtctacgagtggcagttcgccttcttcgcgttcgcccacgaggacggcgagctggtttaaggcctcttcgctacccacggcttgtatgtagtctccctcgtgcaggatggtctgggcggtggggatggctatctgctcgttgtgcttgtggcgtgagatgacggctccggtcatggcgcgcgcattgatttgcatcaggctccggtcgaagacggcggggttggttacgcggaacagacaggttgtcagttccgggaactggctgcggcgttccttctccaaccggcgcgcctccttgtcgaggtcgatgcgcatgatacggggcagcagcttaacgaagagaatcacgccgataacgccgaaaggataggcaataccgtaagcgatggatgccagtggggaatgggtgctgtcaatggcaacggcgagtcccggcgtactggtcagggcaccggctatcagtcccacgacactgggagtatcgatgtcgaaggcatatttcagtcctactgccgtcagggcggcggagcagatgatgagcagggtgatgatgataagcgtcttgcccttgctccggaaggagtcgaaaaatccgggaccggcctggatgccgatggtgaagatgaagagcaccagtccgaagtttcctaattctttggggatgatgacaccgaagtgtccgaacagcagggcaatgaagatgacggcggagacgtcgagcgaaagccctttaatcttgattcttcccaacatgaagcctaaagccacaatgagaaagagcgcgaaataggaggagtttaacaagtcagcaaacataatcagttaaagagttaggaatttatgtcacaaagatagtgcaaaaaagtgagatagaaaaagtcttgcttccttgtggcatataaaaaaagatgatgtgccatcaaccgttttgacacatcatcttaatatatatatcggcctatatgaccggtattcctgcgtggggcagggcggtacttatttttcgagttccttcagcagttcctctacggcagctttcagctgtgtgtcttctcccttcacgatggtctcgggtgaattggctactttgatgtccggctccagctgcgagttctccagatagctgccgtccggtaggcggtagcccacgacggggatgccgaataccaatgacgggtcttgcaggcgttcccacgacacgctggtcatggttcccggcacgggcatgcctaccagcttgcccagtccgcggtggctgtaaacccacggcgtgccgtgcgcattggagtagttggcctcgcacatcaccatgatggagggtttgttccagcggcggctgggcatgtcgcacgtctcgcgaccgcgcaccacttgggtgaagtatttttgtccactgaaaagtatttctatatcctcgtgcaagcgtccaccgccattgaaacgggtgtcgatgacgatgccttcgcggttgttgtacttgcccaggatgtccgagtagacggaacggaaactgtcgtctcccatagactcgatgtgcacgtaacccaatcggccacccgaccatcggtcaacgtctgccgcacgctgtttcacccagcggctgtagagcaaatcactgaacgcaccgttcgtgatggggataatgacctcttcccagcgttccttggtctgtgggtcgaagagggaaacaagtgtcttcttccgtgctttgttgttgagcagcgtgtagtagtctgcatcgggggtgatttccacgccgtctatcttctcgatgactgtgccggctttcacccgggtgttggctgtgtcgaaggggcctttctccactacttcggcaatgagcatgcccttgcccgtgtagttccagtcgaagaacaatcccaggctggcagtaggctcggactgccctttgggatagaaacggccaccggtgtgagatacgttcagttcgcccagccattcgctcagcagttcggcaaagtcataattgttgtcgatatggggcaggaagcggcgataggcggcggtcatcttgtcccagtccactccgtgcatcgaggtgttgtagaatcgcttctgctgctggcggtacacgtggtcgaacatgtattcgcgctccgcagccaaatccatcttggcatctacctggaaggtgatgggggtcagcgcatcggatgaagtgtccattttctgcatcttgcggctgcccagcaagaagaggtttttgccgtccttgtccagctgcatgtccgcccatccggcatccatcttgtgcagcagtttggtttccttcttgcggaggttcatcttccagaggtcgtagccgccttcgaaggctgccaggtagtagagtgtctcgccatccttggagatgatggtgctgcccatgtcggaagagttcggggtgaggcgcaccacacggtcttcgatgcctttcagctctacgacgatgtctttcggctggtcatctttttcgtcagcattgctgtctttcttgtcgtctttcttctttttatccttgtttttgccttggggggtgtccttcccggcagacttcttctgctccttctccagctccttgcgcaactcgtagtcttctttgctcaggcagtatttgtcgtaggcgtcttggttgaggaagacgagcatggcgtcgttcagcgagccccatgaggcatgggcacgcatgccgtagcgttcggtggtgaagaggatggcgttgccgtccagcgcaaagcggggatagccgctcatgtagccgctattggtgaggttgatgatgtctttgcctccctctgcgctgaccaggccgatgtcggagtaggggtcgtgcttgttgccggtgaactcaagcgtaaaccacttgccgtccggcgaccatgtgtagtcaaatcctccgccggtgctgtaccaggtggatccgtccgtaatctggcgcaccttcttcgtctccagattgagcaccatcagccggatgcggtcttcgataaaggcgagttccttgccgtcgggcgagaattgcggataggcacgttccacggtggtggagggcagcagcacttcttcttcaatcagcgtggcgttcgggaagttagggtcttccttgcgggctatcttggcaaggtagagctgccagttgccgcctcgctcgctggcgtaggccagggtgcggttgtccgtcgcaaaggagaggcccgcttcgcgtgccggtgtgtgcgtcacctgcttggtagtggcatagtctgccgaagtgacaaagacttctccgcgcagcgtgaaggcaatctgttttccgtccggggacacaacggcagaggtggctccgtcggaagactgcaggttggcgaattgcggccggtcatcgcgcaccagttctatggcgactttcttcggggtggcatccggctgctgggtatagatttcgccgtcgtaactgtagcacaacgtcccgccgtcactcatggagaggaagcgcacgggatgtgtcttgaagctggtgatgggcttcacctctcggggctgtgccagcgggaaggcatacacgttgaatgagccgccgtttctctcactcaaaaagtaaaccgttcttccatcgggtgacaacaccgggttgcggtcttcgcccgcgcggtcggtgaggttggtatgggcgcccgtctttgcatcatacagccagatgtcgcgggtgatggaggaggtgtggtgctttctccattcatcttcaaatcccttgcggtcttggtagaggaactgatggcccgccttgtcgaagcagaccgcttcggcaggggtgcccagcacttgctccgtacgccctcccgttgcaggtactttgtaaagctcggtcatggccgaagtggggaaaagagcgctgcttgccgggtcctggatggaggcggaaaacaagatatactttccgtccggagtgaatgtggagggtatctcaccggtggagtgggtagtgagccgttgggcggttccgccgtctgccggcatcacgaatacgtcgaagttgccgtatctgtcgctggcaaaggctatttgtttgccgtccggcgaccatatgggggtacattcgtagctctcttgggtagtaagctgtgtggcggttccacctttggccggcaccttgtagatgtctcctttgtagcagaatgcgatttccgtaccgtcgggagagatttgcacatcgcgcatccagagcggcgtggcggcatgtccggcaatggcagtaaggcctagtgcaaggattgcaagggttttcttcataagtgtgtgggttgatgttaatatagaatgtttataaacgtcatgatgctgtccacaaggcaaggagcgaggtacgtcatttcatacctcgtgccttgtatatctgttctttggcattgttgatgctttggaacttctcttctgcggctttcttgatgtcttcgcccagcgttgccacccggtcgggatggtgtttcaaggctaggcggcggtaagcggcacgcacttcgtcattggtggcagtgggttcaatttcaagtactttgtaggcctcgttcagtgagctaccgcctaggttaagcatggattccacttccttgacggatagtcccatgtacatggccacttctttcaaggcttctatctcctcgttgcagacgtgtccgtcgcttttggcaatttctaccaagaataccagcagttgcaagcgttcctcgtatgtcaggttggcggcaatctgcgttccacagtcacggatggtgtttttaaatgccagtgggttttgtctgtccatctgcttgcgctgttcgaagaggttgagcagtatccgttctccctcgcccacggcagcctcaccgaatgtgcttctcagaaagcggcggacgaattccatttcactatgcatgatgcgcccgtctgcacggataatgtacgaagccatcacgagcatggagaagaggaaactgttccgttgcccggtataggtagtgccgtgcgttggtgcttctccataataactgcctgcgtcatttgaatcggtgtcgaacaatgaaccgaatacaaaacctgccaaggctcccagcggtcctccggccatgaagccgatgatgccgcctatccatttagctgctcccataatttttcttgtttaaagtgcaaaaatagagatttcttacgagaattccagtaaaagtggatgaagtattgggagatgggggaagatattgcattggcagacggagtgctcgaagaagaaaaagatattatcaattagtcggcagatgtattgaatattcccgaacgcactgctattccgattcggtgtaaccatccttctgtaccattagcgttgcccggcatgtcgatatctgcatcatcagggcgtcctggtgtcgtaatatcctccgcatcaaggtcttcgggaagtgtttccggaatatgtcttgaagtggatgttaccttgtaaattttctgcatggactcgttcagataggtagtagccccgtaggtaaagaaaggaatgattaccttgtctttcaggtcgtatgcttcgaggaatgtacagactaccattgcgggttgatgccaccagcaaggcgaaccgacgaaaattgtatcatatttcgccaatgcctctttatcaagcagattcgctactccagggcgcaggtcattataggcttcatgctgaatgcggtcgctgtcatcgtaaggatttgcagcatacggttcggcagcctcaatgcgatggatatctgcgcctgtaagtttcacgatacgttcggcaatggcctgggtgtgtccttcggcagaaaagtagagcacaagcatattgccgtttccggatggagtatcgggagtgtcgtcggtggtagagcatgctgccattgtcgttagagagaggagcaagagcggaataagaagtaactttttcatattcgagttgtttttagatatttattgattagtgtattcttcatcgcttacaggttcataccactgtgtagcacccaaatgaacttttgtattgatagctatatgcgtgaatccgctgtcgggagccgctccgtgccaatgcaccacatctgccggaatagcgactacatcgccgggattcaacacttgtataggcttccccttttcctgatagtaaccttttccggcggtggcaatcagaatctgtccgcccggatgcgaatgccagctgtttcgggctttcggctcgaatatcacgtcggagactaccacatcgaatgtttcactgtcggtcatcagccgttggaggtatgccgttccgttgaaattgctgccctcgatggcatctccttggggaaagagagaggctgatgcttttgggggtgtttcaatcttgttttccggtttcggactgcaagcaccaagtgttgcagccagtagaaataagtaagtcatctttttcatcttgaagagttattttaaatgttgtttaaagaaagagtccagtttgggaagcgtgattttcagatatttcggctggtcgtataaatccacgtgcgtagctccgggtacgacaaacagttctttcggttcggcggctttcgcgtatgcgtcctcagaaaaatatttcgatactgcattttctcccactatgaaaagcataggacgtggcgatatagtctcgatttgcgcaaaggggaagaagttcatcatcggtgcgaggctcgtgtaggagtaatagcccgtagagttgggatgttgaccgcgttgtggattgtcgtaataatcgaggaagtcgatggcaaacttcggtgtgttctcatccactttttcgggcagggcacggatatccttgcgtacagccccaccatattccatcgtacgctggcggccgatttcatcaaggatagccatacgctgttcgtaagtctgcgagtcgcctataccctgacggcgggcgcggcccatgtcgtacatactgatggtggcaagtgccttgatgcgatggtctatctgcgtagcactgacagagtagcagcctccgccacagatgccgattactcctatcttatcagcatagacagccggatggttcgtgaggaaatcgactgccgcactgaagtcttctacccgcacttcgggcgattccatacgacgcggataaccgccactctcgccataataggacgcatcgaaggctaatgccacatagccgagttccgccaacttacgggcatggagtcccgaagtctgttctttgacgccaccaaagggatgaccgacgatgatggcggcatatttctttgtggcatcatagtccgcagggaaatagaggtcgccaactatatcaatcaaaaaacggttgtggaatgtcactttctgtttcttcacgtcattctccactgctacaatcggggtttccggtttggtagtcaaccctttgctttgcaataattcgttcaatacttgtttgccattatcggcttcgctacgtccgatattcttttcaatgatagccagcacaccgcgtaattcgtccggtgttacgcctacattcagcgcaatacccatgtgccctttcagcatcggttccacgcctttgcccaaagaagctattatggcaacggttgccagttcccgttcggcataggtcagcacgtcccgctcgaaaagctcggcaaagagatgttctttaaggaatacttcgatttccggggccaggacggcatagttggctttcggcgcatctgccggggtgcccgaaatctctgcaagaatgtcacgtccgcgttcgtatttgctgcgggtatcggttatcggtgacgcttcgcgcccctggttgtctctgatgccttttgccttacgctcgtcaagtaccgcaaccaatgtttgcagtccgcgcagggcacgcggaaaaccacaataggcgtaggaatggaccataacttatttaagctcgctgacggtgataccgctattcagtccaccgataaggactgttcttaattggtcgaggtgccccatgcttgtaagggctgcgacctctgcgatgtattgtcgtttactgttcatggtttgttctgctctcggtgtttgcgaagctgcgatgccgcatccaaagacaagtccgagtagcgttgtcataattctcatttttagtttcataatctttattattatgtatcaagttttacttgctgcaaaattaggctggattttccacttcgaccggtcatgaattacggtttaaaggataatttttactgattggagagataacctgaagatattttctacatttgcatagaaaccactgaaatggactgttatggagaaggttatgcaactgaaaacgataaaggagtacaatgactatatgggtgtggaaacaaggcatcctctggtcagtgtcatagagggaagccgtatgccgcaccccgtaccccatgcacgcaagcacgtggggatgtatgtgatttttctgaaagaactacgatgtacggacgatttgacctacggtcgtcgctcttacgattttcaggagaacacgctgctgtttatcgctccggggcaagtattcgggcatgaagccgacgggtcgacttttaccggttccggatggtgtctgttgttccatcccgacctgctacgcggtacgccgctcggtcggcatatgcaggattatacgtttttctcatacgccgctaacgaagcattgcatctatccaaacaagagcaacagaccatcattgattgtttgacaaagattgacgaggaaacatacaaccaggcagaccgtcacactaacctgattatcgcttctgccatcgagctgctgctcaactattgcattcgtttctatgatagacagtttactacccgtaaaaaggagaacaagggcatgctcggctcttttgaagcattgctgaacgactatttcgtatcggataaacccgctgagcggggtacgctgactgtggcttattgtgcagaccaactgaacctgtctgcaaattatttcggagacttgattaaaaaggagacaggtgtttctgcgcaagaatatatattaaccaaaataatggatagggcaaaagagttgcttactgaccccgctaaatctgtcggtgacgttgcttatgccttaggatatcaatatccacagtatttcagcaaggctttcaaaagagttgtaggatgttctccgaatgaatatcggacattgagttaatgtaaaaaaataaggagctaagttttagacttaactcctcaatgctcaacagtcgggatgacaagattcgaacttgcgaccacacgccccccagacgcgtactctaaccgggctgagctacaccccgaattgcggatgcaaaggtagtgctttatttttaatctgcaaataaattgattgctttttatttgttgtattctatggtgtgttttgtatggtctttattattagtgttttatgatggctttacttactgctatttagaattgtttctaaacaatactttaattgcttaaggcttttgttctgttcggctatttgtatttagtctatcgtcttttgtatggaattggattattttaccctaaaactttaatcaaactttaatcgaagatagatacaaaataggaatatatcttgctactacatttctcattattagtatggggttgacgtatattgaaagaaactttccgtgtgttcattgttaataaatcttaatagattaattttactcgtcaaaaatttaatcgtggattgaatttttacgttgcactcatagagaactgtattattaattaaaaaaagaaagaagattatggcaaagtttcgtat

SEQ ID NO: 4400 - DNA, 51831 bp, Unknown
  gut microbiota DNA sequence
ggtgccaccaggaatcgaaccggggacacaaggattttcagtcctttgctctaccaactgagctatggcacctttttcgtttgcgggtgcaaagataaagagttttttttataccgcaaggctttttgaggaaaaatatctaaaaaaggtgcctcttgctctatggagcgaggcaccttacttctaaaaatcatttgctatcgaagacatcagtcgatattcggattgatgctgtgccagtctttgatggcaggcagtacacccatttctatcacctcgtcacgaagtttgcagagatgggcatagctttctttcagtttggcttcttcttcgggtgtgccgttcagttccttatagtgtacgccgtctttggtaatttcagtttccattgccatcatgatgtggtcgaagccgtggttgtgtacatatgtaccggcaggccagcggaacggtttgccacccatagctgcagctatcatttcgatggagacgtatgccggactctggaaggaagaacgtccacggagggcgatgatgttggcaccgcctttggttaccttagtctggatttcgacccactgttctttagtcagggcaggggtaccgatgatatcaagtaacggtttaccgtccaccttggcggtagaggcatatacagccatctgttcaccatgaccgccgtaggtacggcaattttcgattttgtcgggggcgatgccgaaatgcttggaaagttcactacgcaggcgggtgctgtcgagggcggccagtgtggtcacttgtgaaggtttcaggccggaatacaatagggtaatcagaccggtgatgtcggcagggttgaaaatgacaaccacgtgcttcacgtccggacagtaggcttttacattcttaccgaattcttcggcaatagcggcattgcctttcaaaaggtcttcgcgggtcatgccggccttgcgggcggcaccgcctgatgataccacatacttggcgccggtcagcgcttctttgatatcggaggtaaatgtgatgttcattccttcgaatccgcagtggaacagctcttcggccaccccttccagtccgggagcataagggtcgtacagacataggttgggagtgagatgcatcatgattgcagtctgtgccatgtttgaaccgatcatgccggctgcgccgacgattgtcaatttgtcatttgtcagaaattccataatcttttttatttaaaggtgagtaatatcttttcttgctgattgtcacgatacaaagataaccctttttgaagagagttgttcatagaaaaaagttatcttttagagcaaaaagttatttcttctttccgaactgctgtattgtacctaaattacttatctttgttgggaaaatgaagataagtaagaaactatgagcattgagttaggaaagtacaatacgctggaagtggtgaaggaggtagccttcggcatgtatctggacggtggcgaagaaggtgaaattctgcttccgtcgcgttatgtcccccaagactgtaaggtgggagacaaactgaacgtttttatatatcttgataacgaagaacgtctggtagccactactctgacaccgttagtgcaggtcgggcagtttgcctgcttggaggtggcgtggataaaccagtatggtgctttccttaactggggattgatgaaggatcttttcgtccccttccgcgaacagaaaatgaagatgcaggtgggaaagaagtatgtggttcatgcccatttggatgatgaaagctatcgtatcgtggcatcggccaaggtagaccgttatctttccaaagagaaggccgcctatgagtcggggcaggaggtggatatcctgatttggcagaagacggatttgggattcaaggcgatcatcaacgatgaatatagcggcttgctatatgagagcgagatatttcagccactgcacacgggcatgaggatgaaagcctatgtgaagcaggtacgtgaagacggcaagatagacctgctgcttcaaaaaccggggcaggctaaagtagaagatttctcagctacgttgctggactatatccgtgaacagggcggacggatagctttgaatgacaagagtccggcagaagaaatctatgcaactttcggtgtcagcaagaaaaccttcaaaaaggctgtgggagatttgtacaaaaaacatctggttgtattggaggaagatggaatcaggattaggaattagtcccagtcattaggaatttccctacttgtaaatagagacaatcattagggaggggaatttcctctccctatttttgtcgtacaataaaaaaagaaaagtcatgatacgtcatttgatattaagtgtttgtctagttctggtagcgtttcccgcaataaaagcggcgcccatagacggaatccgtatagaaagtccatatcgtagagtgctggtactggtcgacggacagcaggtttgcctgcctactttcagttgttttgtagccaatctgcgtggtagttgtcgggtagaggtttatgaagcgccatcccgtggggagaattcccgaagaggaaaactcctatatgatgaacgtgtgcattgctccatcaatgaagtggaagatattttcattccagaggacaaaagacctggtggaaactggggtacttctaatcatcacaagcctggcagacccggtgacagaccgttaggaggcgagcagcatgaaccggtgatgtcaccatctgccttcgaacagtttatggggctgatggaaaaacagagtttcgattcagaccgtaaggaagtgctcgaccatgccttgctgacctcttggttcactactgaccagtgtatccgtctgatggatttttatcgtttcgacagtgaaaagaagcagttgatgaagaagatttatcctaaaatagccgataaaccgaatttctattatgcgatagacaagctgaccttctcgtcggacaagaacgagataaatgccttcatcaaacaatatcatgagaagaataactaaaaaaaggagggattatgaaacggattatatttatatttcttgccgctatgatgagtacagctgtttgtagtgcggcaatgagcaacagcaaagtgcgtaaagagacccgttttcttacggacaagatggcctatgaattgaacctgagtacagaacagtataatgacgtgtacgaaataaactatgatttcatttccggtatacgttatctgatggatgacgttcttcggggggaggaatgggccttgaatcgctattacgattatctggatgtgcgcaatgacgaccttcgatgggtgctgaataaccggcagtacggccgtttcatgcaggccgcctatttttaccgtccggtttatgtaagtggtggtcgttggtcttttagggtttacatcacttacaccaaccataatcatttctatttcccgcggccgtatcattaccgtacatattgcggtgggcattatcgtacgcactatcacaacagctattatcgcggtcgttaccatcatccgcactatactggttcgtggagtattcggaatgataagtcgtaccacactagccgccgttcagatttcggttcggtgaacatccgccctaattcgcataagcgtccggcaggcagggatgatgtatataccacgcgacgtagtaacggtagtaataatcgcattagcacaggtacacgtaacagcagtacgcgacgtagtagtgtggatagtggcagaaagtcgagtaaagagaaaatagaagccacaagaactaaaaataatgataagagccccagccgtagcagggtaaagacggcaagcaaggaaagaagaaatgcttccggcgtacggagttccgaaagccgtcgcagcagctcttcaagcactacccgcagttctaccggcagtagctcttcccgctcttcggaaaggagatagaagaacaaaaaactcccctcttgtcagcctggaggcagggagaggggagaatcaaacacaacaactaaaattatacttctttttttattcaatcggttctcccttatagaaatccagaatcttggtacggaacagatagtcatacttggcttgcaattcgtctgattgggatttcataaggttctgttttgcttcattgtattctacggcatttgcttttccgttctcatacttttcgctcatcagcttgaaagactcttcgctggcaacggtggctgtatggctactggtatatttgctttcggcagcagcggcgttgtaccatgcttgttggatttccttataaagtgtcttcttggcattatccaattgcaaggcatagttttcacgttgcaggcgtgccgtgcgtacccggttacgggtagagagacggttgaaaataggtacgctgaggttgaatcctacatatttgttgaagttatcgttcatctgctggctgaaagtacggtcgatggtagaatagtaattcgtaccgagactaccgttcaggctcagttgcgggtagtagttgctctgggcaatacggatattgtgtttactgccttccaagcggaactgtgcagcttgtatggaagccttactcaccatggctgtttggaatatctcatccggaggagtgagagggactaaatccagattgactgccggagattccagattgaacccttccggtgtttccagttcgataagctggctaaggtcgagcagggccaacttatagttgttgtttgtctgcactacattcatctcgtcttgtgccacacgtgctttggcttctgccagttctgccggagaggcttttcccaagtcggcaagccggctgatgcggacatattgctctttgctcaattgcacttgtcccaacgccacctggtggagctcttcattgaacagcacctgaaggtaggccgaagctatattgatggcaatgtcttccttggctttgtccaggtcggcaatggcagctttgaggtttagtttggccaatgcatactggtggggaatttccagaccggtaaagataggtatgctggtattgacagacatattagtgccgtggctgctggtgttgacgtatacagtggaatagtctcccgtatcctcatttttgatggctgtttgcgtacgtccccagttccagctctggccggcactggcattcaggttcggcagtcgtgcccatttggctgtatttacttcgacagcactctgttcggcagcgttggctgtctggcggatactgatgttatgctcgatggcatagtctatgcattggcgtaaagaccatcgttcctgcgcctgcactgagatactgccgaatattgcgaggtataagaatatctttttattcatatcgtatatctttttaagctattccgtttgttaatcctttttctctgcaccgcgaatcttatcctgggcactgataccgcttttgatggcaatctttatgccgtcactcatgccgacctggatggggcggcgttcgaacttctgtaccggtacactgtccgtcattacatatacaaaggtgctgtcaccattgaattcaatggtactttccggtacggcaagcgttttctgggcacggtccaatacgatttctgcgttggcagaatagccggaacgtatctgtacgctgtccggtgcggcaatggcagctttgatttcaaactggttggcaccgttttcttccacacccttcggagatatgtattccagtgtggcatcgaacgaaagattctgcagggcgccgattgttagtttcaccggcatgccttcgtgcacacggcccacttccgtttcgtcaatgttgccgcggaaaatcaaatcgttcatgttggcaacggtagcgatggtggttccgtcattgaaagtgttactcatgataaccgagttaccgactttgatgggtacatccagaatcagaccggtaatggtggaacggatcagggtactactgaaagaggcgctgttcttggtgatgccttcctttacaatttccaggttatcttttgctgtctgtagttcctcgcgtgcctgcttcacgcttacttcccctttttcgtactcttcagcgctgataagcttgtcgttgtacagtttctgggtacgggcgaaatccgtttcggcttgggcagcgttgatttccgccaatcgtacgcggctttcggcagagttcaattgtcccagttcgggtatcacctttactttggcaagcacttccccttgcttcacactttgtcctgcttccttgtatacttcggcaatgataccggaaatctgcggcttgataaggacttcatctctcggttccactttgccggtggctacggtagtcttttcaaggtctgtcacttccggaactatcgtttcgtatactgttactttaggttgggacttctggtacagaaaaacgaatgtccaaatgaataaggcagcaattactaccaataatgcgattttcagaaacttctttgttttcatcttatatttacgatttaattatttacgattgatatagccattatttcatggcttacggttagtggtctctctataagtttattcatccctgatggcttcaattggcttgattgccatggcgcgataggcaggtgccagtccggcaagcactcctaatgcgatgaggaggatgcaggttccgatagccagtccgaatgaaacctggtagtgggttttgataactccagggtcattggcggccttttcaagtatttgcagtacaaatacggcaaaagaaatacctgccatacccgctatagtggttagcaccatgctttccgaaagaatttgttgcagaatgtctttaggacgggcacctatggcacggcgtatgcctatttccgttgtacgctccttgacggttaccatcatgatattcgatacgccgatagctccggcaaacagcgtccccaaacctaccatccagattagaaagcgcactccaatcatcaggttgtccatcatggagaacatagcttccgcattcagaagcatgacggcttgtttgtcatcgggagcaatgtagtgcgctgcttttacaagacgttccacttcgggctgcacgtctttcacttttactcccggtttcatgatgaaacatactacatgcagtttttttccgaggttgtaggtctgttgcatggtggaaaaaggcaatgtaatggcttcagaggcctgcccttgtatattgacattgccttcggatgaacacattccgataacccggtaatagataccatttacccggacatatttgccgcaggggtcttcaccgggtttgaagaggctttcataaacacgtttgccgattacacacactttacgcgactctttaatgtcgacatcattgatgaaacgtccataggtcatctcttgatgttctatctgttcatattcgggatacaagcctttcacactacagtcgtacttgttgtctccgtagacagccacttgtccccataaggcaatggaaggcgtggcaagcgccacaccgtccacattgcgtacacggtccacatcttccatctccaaatcccaccatcgtcctttgcgaaaacctttataagcctcgcttgtcttttgtgcagcgataaagcccgagttggttgcaaatccttcgaactgggattttagttcttcctgcatgccctggccgccaccgataagcgccaccagcataaagataccccagaatacgccgaacgccgtaagcaggcttctcgttttgttccttgttattgtgatgaggatttcctcacacgtatctatgtctattctcataatctttaatctgctctaagtgcttcaataggactgatacttaccgctttcttagccgggaagaacccagccaacgtacccgctatgataagggtcagggtagcttggatagcaatactgaggtctacggtgggatcggagaacatggtctgctggaacatgccggcatccatcgtctggctaccgaaagcagagttcatccattccgtcaccccgatgcctgccaccataccgatataaccgaatagcgtagtgatagtcacgctttccacaataatcagccaaaggatggagaaaggttttgctcccaatgccttacggataccaaattcccgggtacgttctttcacggtaatcagcattatgttcgacacgccgacaatcccactcaacagtgtaaagataccgataacccagattgcagtccggaggatacccattgcattctgtgtctgcagatagttggtgaaacgattccatatccatatggcgctctcatccgtggggtcaaagcggtgattggtggcaatagccttgcggtattctttttcaaaggcttcgttactttctatgctgtgcaggttcttggttgtaaagatgatgttattcagcttgtctcctttattatagatggtctgcaaggtggagaaggggatatacgcttcgtttgcctcgcggtctccctggtcattgtagaggcctactacttgataggccactccactggcattgacaaattgtccgatgggttcagtatgcgtttttccgaaaaggatatctgcagatttcttatggaggatgatgactttacgtcggtctttcaggtcgttgtagttgatgaaacgtccgtccgctgttttcacggtttccacttcggtgtagttgggatatacgcccagcagagagatattgatatattcttgtccgaagctgacgtttacattactttgacgcacggtggcaccggcactgatgacattttcagtgaattgcttctccgtgtcatccatgtcccggttgtccagttggacgcggcgtccttctttcagaccgtcgtatgacttggtggtccagccggggaagatgcggatagagttcaaggcacgctccgacgcattttgctcgaaggcatgtatgataccgtttccggctccgagcagcacgatgagcatgaagattccccatgccacggcaaagcccgtcaggaatgtacgcagtttgttgcgtttgatggttccgtatatttcttgccaaaggtctatcattgataattaaaaattaagaattaagaattaagaattaaaaattaaagggggaggggctcttcctttattatttcatgagtccgtcttttccgaacgggcttgcatcgtggttcagattcgtctcgatgctacctatgataccgtctttgatatggataatcttgtccgtctggttggcaacaccgctttcgtgggtcacgactacgatggtcatgcccgtatcgtgcagttcctttagaatctgcatcacctctacggaagtcttgctgtcgagcgcgccggtaggttcatcggcaaggataatctgcggttgggtaatgagggcacgggcgatggctacacgttgtttctgtccaccggacatctcatttggcatgtggtgtgcccactctttcagccccaggcggtccagatattccagtgccagcgcattacgtttgcggcggctcactccttgataaaagagaggaagcgccacattctccactgcattcttgaaggaaatgagattgaaggactggaagatgaaaccaatcatacggttgcggtactcggctgccttcgtttcgctgaggttcttgatgagggtaccgttcagataatattcccccgtgtcgtaactatccagaatacccagtatattgagtaaagtggactttcccgaacccgatgagcccatgatggaaacaaattcgcctttctgaatgtcgaggttgatacctttgagcacatgcagcggtgctccgttgttgtaggtcttgttaatgtcttttagttgtatcactgttttccctgtttattgctttactcttattaattttcactattagacgcagcaatgctacgaaaagttgcaaaagttgcaaacttttttaaaaaaagattttgcagtgtcgtttttctttgtgatttttgtaaccatgaatgtgattaactaaccctttaaacaaaagtaatatcatgaattcaaacatggaaaagccctatgtagtgggcattgacataggcggaacaaacaccgtctttggtattgtagacgcacgcggaactattattgcaagcagttccatcaaaaccggagcttatgaggacgtcaatgattacgtagacgaagtttgcaagaatctgttgccgctcattattgccaacggtggagtagacaagataaaaggtatcggtatcggtgctcctaacggaaactattacagcggtactattgagtttgccccgaaccttccctggaagggtgtaattcctttggctgccatgtttgaagagcgcttgggtatccctaccgctttgacaaacgacgccaatgctgccggtatcggtgaaatgacttacggtgcggctcgtggtatgaaagactttatcatgataactcttggcaccggtgtaggtagcggtatcgttattaacggtcagatggtatatggccatgacggttttgccggagagttgggacatactattatccgtcgtgaaaacggacgtctctgcggatgcggacgtcacggctgtctggaaacttattgttcggctacgggtgtggcgcgttctgcacgtgagttcttgaccaagagtaccgaaccgagtttgttgcgcgacattccggcagaaaacattacttccaaggatgtgtatgatgcagcggtgaagggtgacaagattgctcaagacatctttgagtttaccggaaccatcttgggtgaggctttggctgacttcatcgctttctccagtccggaagctatcgtgttgttcggtggtctggcaaaagcgggagactatatcttcaagcctatccagaaagctattgacgacaatgtattgaatatctacaaaggtaagaccaagttgctggcttccgagttgaaggactctgatgctgcagtgctgggtgccagtgcgttgggctgggagctgagagatatcaagtaatcaatattagggaaactgataaaggaggggatatgtcaaaactccccttctatcgaagtcaccctcgctacacctatctgtggcgagggtgatttttagtttatgagagtttcgacacacctttttttctttggtggcacatattcctcagcaataaagttatgtcacaagttgcttccacacttccacccattctctgtatccctttattcatcggggttgcggatgctgtggaagcaacttgaaaaggtggaagcaacttttgcttccaccttaaatttacgccaaataatctattaatgtcttgtagtacaataaattaataggatatggggcaatttgccaatatcgtgtaaacaagctattggtttcctgcaaacacggtattaacttcgtaaaagcccgtgcgataataggtggaagtcaggtttttggtatggataagataggtattcagtataggcaagctatgcatatgagagctgtttaacggccgtgaggcgttcgcctaacggccataaagcaccttgttgacggtcgttagcagagcgtctcacggccgttgggcgctgataaactaacatatcagcaagaaggaaggcttatgtgaaaggaaaggagcgcaggcttacaatgttttgaatgagggagtagcagtagagtatcgcatggtgtgtatgcctactgtgtatatcactaaaaaagggaaaccgacattgtcagtttcccttttttatttcgaaataggagtctggaattaaccgttaactcttttttctttgattcttgctttcttaccggtaagagcgcgcaggtagtacagtttagcgcgacgaactttacccaccttgttcacttcgatgctgtcgatagccggtgattcaatcgggaaaatacgttctacgcctatggttcctgacatcttacgtactgtaaaacgcttcttgtctccatgtccggcaatcttgataacaacaccacggtacagctgtacacgttccttgttaccctcgacaatacgatatgctactgttacagtgtcacctgccttgaagctcgggtgctgttttccggtagcaaatgcttcttctgcaattttaattaaatccattgtttttattattaaattgtttcatcgttacaacgcaacataccaggcttctctcttggtgtcctgacagcgattgcgcgaaagcggtgcaaaggaacgaattatttgccagatacacaagtgcttcaagctttttttcgccagttgggatgatttttgagcgtttcattctgctaaacgcaagtctaaataatcggttaattgtgtggctcagtcgcaaaagaaaagtatatttgtagcaatttaaaactaaatgaatatgaagaaacaaactttcagtctccttgcgggggcagtgttggcggttgcacttctattggtttcctgccattcttcctacgaagtgaccaaggtagagggaggcagaattcccatgaactctgtctgggatgccgagccggatgccgaagccgtggctctgctggcgccttacaaggcccggatggacagcgttatgtatcatgtggtgggaaccgcagaaatgtcgatggacagattccggcccgaaagccttttatccaatctgattgcagatgtactgcgtgaggctgcggtggaagtgctgggcaaaccggccgatatggggctaatcaatatcggtggaatccggaactccctgacggaaggagacatcactaccgaaaacatctatgagatattgccttttgagaattcgctctgtgtgctgacgatgaaaggctctgccatgaagcacttgtttgaaaacattgcggtgagacttggtgaaggggtgagtggtatacagttggaaatcagcaaggatggcaagctgctccaggcttccattgccggcaagccggtggaggatgaccgtgactatacggttgccacgattgattatctggctgatggaaacgatggaatgacggctttcctgcaggcggataaaagggagtgcccggatggggctacactgcgtggtctgttcatgaagtatgtggagaagcagacggcagccggcaagaaggtgacttcgcgcatggagggaagagtggtcgttaaagagtaagcattaaaaaaacagaagttctatgaaacatatgtattccttggcagccctgctgcttttcatgctccccgcatcggcacagcaagaggagcgtgtcattactgaagaacccctttgcctggtgtccgccgattctgtatcgtccggccaatccggaaaacaactgtttatcctgcacaccagcgatacgcacagccgtatagaacccatcagcgccgaggctgccgacgagtatgccgggatgggcggtgtggtgcgccgtgccggttttgtaaagcagtttcgcggcaagcatccggatatgttgctgctggattgcggagacatctcgcaaggcaccccttattataactttttcaaaggcgagctggaggtcaagatgatgaacctcatgggctatgatgccatgacgataggtaatcatgaatttgatttcggacttgagaatatggcggaattgttccgtatggcggattttcccgtggtctgttccaattatgacgtgacgggtacggtactcgaagggctggtgaagccttatatcaccttggtgcgcgaaggggtgaaaatcggaatcttcggcctggcccctaagatggaagggctggtgcaggcggataaatgcataggcattgtctacaacgacccgataaaggtggcccaggaaatgacagaccttctcagggagaaggagaattgcgaggttgtgatttgcatgtctcatttgggtatccgcagtgcaaatcccgaaggcgcttccgacgagaacctggtaggcaagacgcgtggcattgatgtcattttgggaggacattcgcatacttttatggaaaagcctgccgtttatctgaatgcggacggcaagagcgttcccgtgctgcacaccggaaagagtggcatctacgtaggagaaatggtacttactttaactgaaaaatagcatgatgaaaagactcaccctccttttatgggttgcaggattgtttatattgggattatcttcacttcacgcccagacgggaggcccgtttcttccttcggctgcagacaaccggtgccggcaatgggtggactccgtgttgtcaggtctgaatgtacacgaaaaagtggggcagctcatcgttgccaccattccggccagagcagacaaggccacgaaaaagcagatgcgcgagctggtaaagaaatacaaggtcggtggcttgctgttttccgaaggtactccggaagagcaggctatcttgaccaatatggcccggaaggatgccaagattcccgttatggttactttcgatggagagtggggactgtcaatgaggctgaaaggcgctccggactatccccgtaatgccgccttgggatgtatcgaggacaatggcctgattgaagaatatggacgtgaggtggcccgccagttccgcgaattgggggtacacgtcaattttgcacccgatgcggatgtcaatacgaatccgctgaacccggtgatacacgtacgctcctttggcgagaacccgcagcgggtggcggaaaaggtggtggcatacagccgtgggctcgaaagcgggggcatactttccgtttgcaagcatttccccgggcatggcgatacggatgtggattctcataaggcgcttcctgccttgcactacgaccgtgcacgcctggacggtgtggaactttatcccttcaaggaaatggtacgtgccggattggggggtgtcatggtaggccatctgcaagtgcaggcgctggacccggacggggtgactccttcttccttgtcgcggaatgtggtgaccgggttgttgaaggatgaactcggctttaaagggctggtgtttaccgatgccttggacatgaagggggtgtctgccattccgcaggtaactaccaaagcgctgctggcgggaaatgatatggtgctggtacagttcaatacgaagaatgcggtgcaggagctggtagatgcagtggagtcgggacaactgagtaaggacgaacttgatgccaagtgccgcaaggtattgatgtacaagtatatgcttggtttgagaaaccgccagccgcaacttcgggtcagcggaatgagctatcgcatcaatacggaggaagcgcaggtgttggctgccaagttgcgccgttcggcagtgactgtattgaacaattatttcgatgtcctcccgctggcaccggtggaaggtgatattgccgtgctcagcatcggagagaaggaggcggatgctccctttgtggaagctatgaaaaagaatgcaggcatcagccatttccacttgccttggaatgccgatgaggctctctggcaggaagtgcaggggcagttggctgctttccgtcgcgtggttatcagcatcaccggttcggcttatgtcagcgaccgtgatgtggcctttctggaaggcttgaacctgcgtgctccgctggtctatactttttttacctcttaccgtacattgcaacctctgatgcccgcacttgccaaatccagcgctgtggtgctggcacattcggcagagacggatttgcagcaatacgtggctgatgttctttttgccaaaaagctggccagtggcagaatgtcgatgagtatcggtaaactgtttccagcgggaacgggctgtatgattgagccgggcatgaaaccggggaagactgttccggaagattacggcatgaagtcgtatgtgctgcaaagtatcgatgccgttgcccgaaagggactggaagcgggagcttatcccggttgccgcgtgctggtgtggaaagacggactgccggtatatgacaaaggcttcggaacccactctgataaggataccactactgtccgttcttcggacctttttgatttggcttcgctgaccaagactacggctacgttgcttgccgtcatgaaactgtatgatgagggcaagataaaactggatgacaaggtttccgcttatctgcccttcttgcgcaatggcaacaagcggaacattaccatccgcgaacttctgttccacgaatcggggcttcctccctatatccgcttctacctggacatcatagacccgaattcggtacacggcccgtactcccagagttgggtggacgagtggcatcgtacgcaggtaagcgagcatagctattattgttccgattttaagttccggaaagggatggtgtccgacaagaatacaccggtctataccctgcacatggcagatggcatgtggctgaacaagagtttcaagaattctatccttcagcggatagccaagtgcgagttggatggcaaacgttatgtttacagcgaccttggcttcgtgctgttgcagcaggtagtggagaaggtgacggagctgccgatggatttgtaccttgcccgtgagttctatgccccgatgggattgcaacgtactatgtttctgcctttgacgaagttcaccaaagcggaaatcatgcccacggcatccaatgacttcctgcgtcgccaggatatatgcggatatgtgcatgacgagactgctgcctgcatgggtggggtgtccggtaatgcaggacttttctctacggccgaagaggtggcaaaggtttatcaaatgttgctgaacggcggtgaattcaatggcaagcgtttcttgagtgaggcaacctgccgtttgtttacgacggagaaatctgccatcagccgtcgcggtctgggattcgacaagccggatgtatccattgtgaagcgcagcccttgtgctccttccgctccggaagcggtatatggacataccggatttaccggtacttgtgcttgggtggacccggaaaacaagacggtgtatgtattcctcagcaaccgcttgtgccccaatgtatggaacacgaaactgggtgacatgaatataagaagagatatccaggaattgatttataaaagtattattccgcaaatcccctaaaaacaatctatctataaggaatgaagagaatatacctgcttgcctatatcactatattgtgttgtctttgtccgcttctgaaagcgcagcttggcccgatgccgtttactccggtgccgccgaacgacccttcgcttgtacgtctcttgaacagtgacgtgcggtgcaggcagtgggtggattccgtcatgcagcgtctgactctgaaagaacgcatcggacaactgttcatctatacgattgccccccagcaggacaaggccaacaaggaactgctgcgtaaggtggtggaggactataaggtaggcggtctgttattctccggcggattgatgcagaaccaggtgatgttgaccaatgaggcgcagcggatggcggaagttccgctgatgattacctttgacggtgaatgggggctggctatgcgccttcgcggtactccgaactttccgcgaaacatggtgctgggctgcatacagaacgatacactgatttatgaatatgggcgcgaggtggcccgccaatgccgtgaactgggggtgcaagtgaattttgctcccgtagcggatgtgaatatcaatcccaagaatccggttatcaatacccgttccttcggtgaaagtccgttcaatgtggcgaacaaggttgttgcctactccaaagggttggaggatggtggtgtgctttctgtcagcaagcactttccgggacatggggatacggatgtggattctcataaggcgttgcccgtgctgccttttacccgtgcccgtctggacagtatagagctttatcctttcagaaaagctattcgtgccggattgggaggaatgatggtggggcacttggaggtgcctaccatagagccgcaaaaggggctcccgtcttcgctttcgcgtaaggtagtttccggtctgttggtgaatgacctcggctttcaggggcttgtctttacggatgcccttgccatgaaaggggtatcgggcaatgaaagcatctgtttgcaggcgctgaaagccggcaatgatttgctgcttgtcccccggcgtattaaggaagaagtggaggctgtgcttgccgctgtgaaaaaaggggagctgacagagaaagagatagaggcgaaatgccgtaaagtactgaaatataaatatgcccttgggttggaaaagaaaccccatgtacagctttcaggtttggggacccgcatcaatactccgaaaacgcgtgatttgatgcgccggctgaacttggcggccatcactgtgctggataaccgggacgaggtacttccgctggacccttccatcggtgaagttgccgtgctcaatgtgggagaagcgcaggaaatccggccgttcctcaaggaactgtcgcagtatacccgtcctgtggagttccatttgggcaagaatctgccggaggctgacgggaaccgtttgaggaatgcgctggccaagtacaaacgtattctggtctgtgtcaccgaacaccgtttgacgccctatcagaatttctttgcaaagttcgctcctgacgtaccggtggtttatctgttctttattcctggcaagcaggtattgcagataaaacaaggggacgctgctgctgaagcggtgattttggcacactcctccaacgaggaggtacagcggcaggttgcccggattgtttatggcagcgcttgttcagagggacgcttgtctgccagtatcggtagtcggtttgctgccggtgcgggagtgacgctgactcctcaaagcgccccccgctttgtacccgaagagcatggtatgaattcccgtctgctggctgaaatagacaagatagctgaagaaggcattcgtgaaggggcttaccccggttgccaggtggtggtgctgaaggatggcagggagatgtataataaagctttcggtacccacgtctggaacgaggccggaagcaaggcgcttcccgtgaagaaaacggatgtgtacgacatcgcctcgctgacaaagaccacggccacactgcttgctgtgatgaagttgtacgatggcggacgtctcagccttacggaccgggtgtcaacctatctgcctttcctgcaggatacggacaagaagaatattacggtacgcgagctattgatgcacgagtccggtctgccttccaccttgctgttctatcaggaagcgattgatgaagagagctacaccggcactttgttcaaggcacgtcccgatgcccggcattctgcacgcatcggacggcagacttgggcgaaccctaagttccgcttccgccagggactgacgtcgaaggtgcagacaccggaacatacaatgcaagtgtccgacagcctttggctgaaccgttccttcaagcaagagtacttgcagaagattgtggatactccgcttagagataaacgttaccgttatagttgtgtgggctttattttgttgcagcagttggtcgaggcgcgcaccggcatgtctatggacgaatatttggccaaggaattctatactccgatgggattggagcgtacggggtatcttcctctgcgcttcttgaagaaggaagatattgtaccttcatcaacagatcctttcttgcgtaagactaccttgcaaggatttgtacatgatgaatctgcagcttttcagggcggcgtttccggtaatgccgggctgttttccactgccgaagaagtggcaaaagtctatcagatgttgctgaatgggggtgagctggacggtaagcgctatttgagcaaggagacttgcagggtatttactaccaccgtctcaaggataagccgccgggggctgggatttgataagcccgaccagcgtaatccccagaagagtccctgcgcagagtctgcccctgcttctgtctacggccataccggtttcacgggcacttgcgcctggacagacccggagaatggcttggtttatgtctttttgagcaaccgcacctatccggatgtgtggaataacaagttgatgaggctggatataaggacggggattcaggaggctgtatataaggcgatgctgggaggaaaaaaataactggtacaattaaaaagagcctcccttgctcacgcaggaaaggctcttttcttcttcaattttgaaacaattaaattctatctgttaagctttaagtgtgtgtcttatcagaacgcaatacctacgcgcagaccgaaattgctcaaaccgtctacgctgtacgtaaagaggtcacctttgttcgtaccgtagctgtaataggctgcgaaatgcaagcccggtccataagcccaaggatacacattgaaaccaatttcaggagatacatagaaaccccatgtatctttgttggcttcgaatacgttgaaagttgacttcaactgtgcatattcagcacccagttttacaccggcatacggctggaatgcacctccacggttccatacatagcgggaggccagaccgaaaggcaactggaatgcagtgtgctgctggtcggtattcagactgccgccttcgcctacgggaagtgtctggcgaccgaaatactcatggttgctatggtagttcaagaaagctcccaatgcaaaattgtctgtcaggaagtaaccgccttcaaaattcataccccagccgcttgatttgtcggcgaagttgttgctgaggggaaagttatattgccagtcgatattggcataaccgttatcggtcatctgtgccttcgtcggtagggcgaagacgagagcaagagcggcaaccgcaaatactctcaaggaaagatattttattgttttcatactttgttcttgttttttggttcaatggcaacttcccagtccggaaaggatgctgccgtattattcttgttaccttaatattgggtaacccgtcatttgtcacttatagctcgtagcttgtcactacttgttagtcaggtaagttgattgagtgaaagcttggttcacaccttgcacggcaagtttggtattgacagaagtagaaccactcagcaagccgctcatatagctggtccacagaacaggaagtttctcgctctggccttgcggcgcctccagattcaacaattcgctgataaaggaaccggtactgtaggaatagttcacggcatagggataataccatccgccccagttgccccagtaaggagcatcccagtagcctggatagttccaccaccattcgggacgtccgtagtcggtgaagtaataggtacttctgacatagcttacctgcaagccaaggtcggcttcttcccggtcatccacacggatgtagccgcggctgttcatgttagcaacataagcgctgagaatttcctgggcattctcatctttccagtattcggcgttttccttatcaccgatgaccagaatgctgtccggcaagtaataagtttcgaaggttttgaaatccgccttcttgtcatagttggtataaaccagataattattgtccagcttatccatgtcagggtctttttcgcaagatgcaagcgtcactgcaaagaccgctaataataggggaataaatttcttcatacttttataattgtttaggtttaatataaattcctgccctatggtaccttaggcttttgtgagaaaaaacaagataggatataaaaggttcacgtagaggtatgttaaaagtgataaaggaatagggtgacagcacttttaacgtaactgtcaccctattgcacttatcatgtcattactttatcaccctatcatcttttccatatccgtgctgtccatcctcctccgggtgccatgtgtatgttcagcttgtctcccgaggtcacggtgcgtacttctttcttgtagtcggttgcttcccggtcggcattgatgccgtcggaaaagatttcggcttcgtaacttccttctccgaggaaggaaaggtcgatggtacagtcgcgtggtgtccagtcggtcatggaggcgatgtaccagacgtctcccttgcggcgtgccagtgtaaggtattcgcctacttcaccgtccagtgccacggtctcgtcgaaaacggtaggcactttggcaatgaagtccgtgcattcctgctccttcatatatttgctggggctgtcggcaagcatttgcagcggggcttcgaagagggtgtacatcgccatctggtggacgcgcgtaccctggctcatcggatggtcgttgacggcacggaaggtttcgcgggttgcgttcattgtggctcccggtgtgtagtccatcgggcctataagcatacgcaggtagggagcagtcacgtcatagcgtgggaagttgtggaggggggctccgttcactatcggttcccatttggcgttctccaatccctttacaccttcaaagttcaggacgttgggataggtgcgctgtataccgtatggcttgaggccatgcaggtccaataccaggcggtgctcggcggcgcaggctacaatacgttctacagactgtaccagtggctggtcgtcacggtcgaagaagtctatcttgaagcctttgatacccatctgtgcatagtggctgaatgcagcttccgtatctttggcagagtttcgccagcttgcccagagaatgatgccgacgcccttctggtttccgtaggctaccagttcctttaagtcgatatccggattcaggtctttcaataaggattcgtttccgctccagccgtcatcgatgatgatatattccaggttgttgtcggcggcaaagtcgatgaatgccttataagtcggggtgttcatgccggctttgaagtctacgccagtcaagttgcaggtgttccaccagtcccaagccactttgccgggtttaatccaggaaatgtctttgatgcggcaggcgggggcaagacgctgtgccatgtcattgtcggcaagctgcgtgtccttttcggtgacgagcaccacacgccaggggagctcctgcttggcacaacgggcgatgtagtctgcacgttttgtcggtatcaggttcagccggttgtgtccgccgattgtttcttccagcggatagggggcaaatgctgcctgcactccttgacgtgtctggggatttgcagtgaggaacatgccgggatagttttccaatccggcttccatgataacggctttctttcctccgtccaggcaaaccatcagtggggtgatggagagtgagtcggtgtgcattttggacaacggggcttcgtcgtagtaagactcgaaagagaagcaatagcgctcaccgttgcggttgtcgtttatgtaaggtacaaatgcctggtaatccttgtcgaaattgaagtccgcagtttcgttgaggacgataaacggcttgttctgttcggaaatgaagcggtaggcagcgccgtcatcgtatgcgcggaactgtacgctgtagcctccgcggcatttcagtgtcagctggttgtagacatccttcacacttgcttttttatagaggggagtggggaaggaggactccacggacttgcgttctgcacggattacttttacatttttaccgaaagttattgctttcttggctgatttttcatctctgccttgcagggcgatggcagagggttgcagcaccgtggttccgtcgtgtgctatctgccaggtgagggcttctccggcatctaccgtaacggatagttttccgttgggtgatgcaagttggtattgctgtgcacggaccgtgcccaagcaaaggaataataaacaaaaggtttgaataaggaggcttttcatgttgatttatttttgaatgattttctttatcttctccagttcctcggcagagaagtctgtattttcagtcgctttcaagttatctgccagttgggcaacggagctcgctccgatgatgacgcttgtcaccaggtcgtccttcaacagccaggcaagtgacatctcggcaagggtttgcccgcgtgaggcagcaacttcgttgagtgccttgattttttgcagcgtctcgtcggtcagtgcttctttcttcaggaaagccccctttgccatgcgcgaatcttcgggaataccattcaggtagcggttggtcagcaggccctgcgccagcggggagaaggcgatgaagccggttccgttccctttggcttgctgcaggataccttcttcttccggttcgcggttgaagagattgtatctgccttgatagagcaggcagtgtacatcccgttcttccaggtatttgtaggcaaactcggccgcctctttgggatatttggagattcctacatagagtgctttgccttgccgtacgatatcaaccagtgcttgcagggtctcttcaagcggagtatccgggtcgtagcggtgggagtagaagatgtccacatactccaggttcatccgtttcagactttggttgaggctgctcatcaggtacttgcgtgagccccactccccgtaggggccgggccacatgtcgtgtccggccttggtggagatgaacagttcgtcccgatagggcatgaaggatttcttcataatcattccgaaagtctcttcggcggaaccgtaggaaggaccgtaattgttggcgaggtcgaaatgcgtgattccacggtcgaaggcatagtgcgccatggtctgggaattggcaaatgtgttcatgtcgccgaagttgtgccacaatccgagtgatatttccggcagcaggatgccgctttgcccgcaacggcggaatttcatgccgttgtcatagcgttcgggcgctggagaataaatagggtttatcatgatattgtattttgtgggttatcccattattacttctactgtatgcgtgcccggcagatggttcaccacattgccttctatcggctggccgtctactgtgacggacttgatgcctttgcacacaccatcgggattcttcacggtaatatgatattctgccccgcggaacctacgcttcacgttgaagcctttccagcctgccgggatacaaggattgatttccagaccttcatacgaaggcttgatgccgagtatgaattgcgtgatggcataccacatccaggcagccgttccagtcagccagctgttcttgccttcaccagggcgggcggcgtccttgccggccaccatctggcagcatacgtaaggttctactttatgcagggcactgtgctcttcggtgtacgacgggcatatcttgcggaaatactcccaggaacggtcaccccgtcccagtacggtttctccgatgatgacccacgggttgttgtggcagaagatacctgcgttctccttgtagccggcgggataggtggagatttctccatactccacaacatagcgggtgaagggtggattgttgagtacaataccgtgctcgcagtccaggcgttcctttacggagtccagcgctttttttaccatgccttcttccagtccgatgcctgccatggtgcaccagccttgcgattcgatgaagatttgtccttcttcgttctctttggagcctaccttgtggccgaagtaatcgtaggcgcgcagataccagtctccgtcccagccgtgtttttttacggcttccaccatattgtctatgtaggtttgcgctctgtttgcttcgtcgtctttacccaggcggcggcacagctccacgtagtcgcgtccgcataccacgaacaagccggcaatcatcagcgattctgcctggctgccttccgtctggttttccgtggtctggaaggattcattcggatcccaggagaagcagttcaggttcaggcagtcgttccagtcggcacggccgatgaggggcaacatgtgggggccgaggttctcgatgacgtggttgaaggagacgcgcaggtgctcgaacagagacacttccgaaccttctttgttgtcgaaggggacgggctcatccaggatactgaagtctcccgattccttgatgtatgccaccgtaccgaagataagccacatggggtcatcgttgaagccgccgccgatgtcgttgttgccgcgtttggtcagcggttggtattggtggtagcatcctccgtcggggaattgggtagaagctatgtcgatgattcgttcgcgggctcgttccggtatctgatgcacgaagcccacgaggtcctggttggagtcgcggaaacccattccacgaccgatgccgctctcgaagaaagaggcggaacgggacatgttgaaggtaatcatgcactgatactggttccagatgttcaccatgcggtccagtttttcttcgtcggtcttcacgacgtagatgtccagcaggcggtcccagtaggctttcagttcggcaaaggcagcatctactttggcggtagtgtcgaaggccgaaatcatcgccttagcctttaccttatttataataggtgaagagggtacactctgcttgaacgcttcatgcagagattcttcacgttcctcgaactttgcctcctgcttgttttccacatagcccagcaggaagatgaagtcgcggctttcgccgggttgcagttctacttccagatagtgcgaggcgatgggactccaaccgtgggcaatgctgttgcccggtctgccttctactacccgttccgggtcggcaaactcgttgtagagtcccacgaatgtttcgcggtcggtatcgaaaccgtctacgggtgtattgacactgtagaaggcgtagtgattgcggcgttccttgtattccgtcttgtggtagatgacagacccgtccacttccacctctcccgtggagaagttacgctggaagttctccatgtccgtagcggcattccacaagcaccattcggcaaaggagaatagtttgagttttctcactttggcagaagtattccgcaaggtcagcttctgcacctctccccaggtcttcagtgggacgaagaagagcaggctggcttcgatgccgtctttggatccggtgatgcgggtgtagctcatgccgtggcgacactcgtaactgtcgagtgcagtcttgcagggcttccaggtgggagaccatacgttgccgccttcattgatgtagaagtagcgtcccccgttgtccatcggcacgttgttgtagcggtagcgggtgatgcggcggaacttggcgtccttgtagaaggaatagcctccggcagtattggagatgagtgagaagaaatcttcattgcccaggtagttaatccatggccaaggtgtcttggggtcggtaatgacgtattcgcggttgtcgtcatcgaaatatccgaatcttttgtcttgcatattatttcttgtatttagtttgatacattcttcattagttgtgccatccggccattttcccggaagcacgcttcaaatttaaaaacttttctcctatcacccttgtttgcccggcgtgttttttcccctcggaaacatgaagtaccggaaaatgatacaaaagtatcaccgcacgaatctttttcgctctatctttgtaaacacattttatgattaaccgatatgaaacacttattcgcatttctgttccttcttggaattaccttttctctttctgcccaatccgtccgcgaacgtattttgctggacgacggctggcagtttgcttttggcaatgcttcctcaccggagaaagacttcggctgcggaacggagtacttcaactatctgaccaaggcagcctctatccataacgagggtccttactcccccaagttcaatccggagaagtggggcgtggactggaagacggtcaaccttccgcatgactgggtggttgatttgccttatgccaaagaggcgagccacagtcatggttataaagccgtcggctataaattccccgaaaactctgtgggatggtatcggaaaagtatcactgttccgcaagaggacctcggcaagcatctttatcttcagttcgacggtatcttccgtgatgcccgtatctggataaacggtttctacctgggacacgaacccagcggctatgccacgcaggtatacgacattacggaatacctgaattacggagaagagaatcttatctgcgtccgtgcggatgccacgctcgaggagggctggttttacgagggtgcgggcatctaccgccatgtatggctgaacaagacggcgccgttgcatgtagctcctttcggcgtatttgtatcttccacgctggaagctcctttcgacaaggctgtgctggtgaccgaagtgcagatgaagaattcgggaaaagaccccgtctccggcaaagtatggtgccgtctgcttgatgccgacggacaagtgcagatggaggacgaggcggaagagataaccctgctgccgcaagaaacgcgtagcgtaaaggtgcgtaccaaagtgctgaatccccagctatggagtacagaacatccttacctttataaaatggaaaccagcgtctggcaaaacggtaggcaggtggacgtggtggccaccccgattggtattcgcgacatccgcttcgatgccgacaagggcttcctcctgaacggacagcctctgaaactgaaaggtgtgaacatgcaccaagaccaccccggagtaggtgccggcattcccgatgccctgcaagtgtaccgactgaaggaactgaagaagttcggctgcaatgcctgccgttcttcccataacccgatgactcccgaaatgctcgatgcctgcgacagcctcggcattcttgtgatagaggaaaaccgtctgacgggcgtcaacgaggaacatacccgcctgctgaaacgtatgatagaccgcgaccgcaaccatccgtgcatcatcctttggagcgtaggcaacgaggagtggggcatcgagtggaaagaaagcggtacacgcattgctgccacgatgcgcgaatattgccaccgtttcgaccctacgcgcctcatgaccgttgcttcgagcagtggccctgccatcttgattcccgcagacgtggccggttataactacatccttcagaaccctgtggagcagcaccgcaaggattatcccggtcgccgggcgctcggttcggaagagaccacgggctgtggtacgcgcggcatctactttgatgcccacggcaaaggccacatggtggcgcacaaccgtaaaccgaacgggcctgacagcctgctgaactgcatcgagcgtggctggaaattctatgacgaacgcccctatctggcaggtcttttctattggacgggtttcgactaccgcggcgagcccaaccccatgaagttcccggctacgggctcacaattcggcattctggactactgtggcttccccaaggacgaagcctggtatctgaagtcctggtggacgaatgagccggtgctgcacatccttcctcactggaatctgcaaggtcacgaaggtgatagcatcgacatttgggtatacagcaactgcgatgaagtggaactgactgtgaacggcaagaaactggatcgcaaaccgatgccccgaaacggccatctttcctggaaagccgttttccagcccggtgcagtgaaggctgtaggctataagaacggcaaaaaaatattggcccgtactgtggagactaccggtgctcctgcccgtatctccctgacggcagaccgtcccgtcattcaggcagacaatcgggatgtggcagtgtgtaatattgagttgcaggacaaaaagaaacgttttgtccccactgcctgcaacgacttgacgataaccgtttccggtccggtacgcatccttggggtggggaatggagaccccgcttatcaggctacggaacgtccggccgacgccgatgcccgcacctatcaggtaaaggcattcaacggacttgcacaggtgctgttgcaaagtaccggcgaagcgggagaagccacactgacggtcgtttcggaaaacctgccggaaacttcctgtgtcttgaagttgcagaagtaagcggcttatcatttatatcatccggcgaagcggagacctttctcttgtctatggggcaagagagggatctccgcttctttcttcctcaaactatagtgtgtaagtgtacgagatgcgcatctcatacatccttacattagagcctgagggggagaagaacggaagttttgcttttccgggtgggactttcccgggtatctgctcatatataacaattattacctctaaatgtaacaaatggtactgttgtgggattaaaaagaatgagtatatttgtggcatgatatttttttaaccaatgcctatggaaaaccagaactatatcatgagggaaataacccctctgtcggaacgtgactgtttctatattgccgatcgtcgcaaaacagaatttacctaccccatccattgtcacgcagagtatgaactgaacttcacggaacatgcttccggcgtacgtcgtgtggtgggcgattctgccgagattatcggtgattatgacctggtgctgataaccggtaaggagttggagcatgtatgggagcaacatgaatgtacctccggggatattcgggagattaccattcagttctctcccgacttgttcttcgggaacgttgtcaacaagaaccagttcgacagtatccgtcggatgctggagcgtgcacagtgcggacttagtttccccatgcaggccatcatgaaggtgtacaactggctggataagctggcttccgaggagcagggcttttatgccgtgatgaactttctccgtatcctttacgaactttccctctatgacaatgcccgggtgttgtccagttcttcgtttgccaagatagagactttctctgacagccgccgggtacagaaggtgcagaaatacatttccacccattatcaggaggatatccggttggcttcattggccgatatggtgggcatgaccccggtctctttcagccgtttctttcgcctgcgcaccggcaagacgctttccgactacattattgatatccgtctgggctttgccacgcgtatgttggtagattccacgcgtaccattgcagaggtgtgctatgactgcggcttcaacaatctgtccaatttcaatcgtatgttcaagcggaagaagggatgctcgccgaaggaattccgtgagaattatcggaaaaagaagctggtgatatgataaaaaagtattggtattcttcattgaaagtgcctatttttgcaccaatgattaatactaatatctgatatcatgaaaagagttttttccttatttttatgtctgctgtgtgtatgtgctgtgacggcgcagatacgcggcaatgaaatccgtgtagtcgtttcacctgaccatagcgattgggtgtatcgtctgaatgagaagtgtacgtttaccgtccgggtgctgaaggcacagaacctcttgtccgatgtcaagattgactatgaactgggccccgagatgtatcctactgaagtaaagaaagacgtggtgctgaaagatggtaccttgaagttgcaaggcacgatgaagactgcaggcttcttgcgttgcaaggtcaaggcgcatgtggacggccggacttatgaagggctggctacatcggcctatgctcccgagcagctgcaacctgtgacgaaacttcctgccgattttcgggattattgggccaagaccttggaagaggcgcgcaagactccgttgaatccccttatgacgctgcttcccgaacgctgtacggaaacggataatgtatatcaggtcagcttccagacaaaagcttggggaggacgtttttacggtattctcagtattcccaagaaagaagggaagtatccggctttgctgcgtgtgcccggtgcgggtgtccgcccttatgcgggagatacgtatacggctcctggaaaggtgattacattggaggtgggtatccacggcattcccgtcacgatgcagcagtctgtatatgatgcgctggcaggtggggcgctgagcaattactggacgttcggccgcgacagccgggatgcttcttactataaccgtgtggtggtaggcgctttgcgtgctgtggattttatctgttcgctgccgcagtacaacgggaaggcgctgggcgttacgggctccagccagggcggtgccttgtctgtgattacggcggctcttgattcgcgcgttactttcctggcggctgttcatcctgccttatgcgaccacgaagcgttcttcaagaagcgcgcttgcggctggccccattatttctattattacggtgctcccgatgaaaagcagcttgaaacggtgcgctattatgatacggaaaactttgcccgcctgctgaatgtgcccggttggttcagttgggggtataacgatgaggtctgtcctcccacttccatgtatgcagcctacaatgtgatttcttctccgaaggaactgcatccttatctggaaaccgggcattactggtatcaggaacagtgggatgaatggctggactggatacggagacaacttaatgtgccaatgtgattaatcacattggcacattaatctgataatatagtatcattttttatgatatgagccgcgtatctttgtgtatcgcttaaaaactgataatatgaagaaacaattccttttgctgacagtacttttattccttttgggggcatgtgcccctaagcctgcggagcattcgtttattaaggtcaatgccgatggacagttcgttcgcgacggaaaaccctattattttgtaggtgccaatttctggtacggtgccattcttggttccgaaggtgaaggcggcaatcgtgaacggttgcataaggagctggactttctgaaaagtattggcatcaacaacctgcgcgtattggtgggtgctgacggtgaaaatggcataaagacgcgggtagagccctctttacaagtggcaccgggcgtctataatgatactattttagccggattggattattttatgaatgaactgcgtgaacgtgatatgacagctgtcctctatttgaacaattcctgggaatggagcggtggctattccgtttacctgcaatggtccggacacggtgatgccgtggtacctgccgtagacggatggcccgcctatatggagtatgtcaagcagttcccccaatcggacagcgcgaaggccttgtttgccaatcatgtcaattatattgtttcacgcaccaataggtataatcagataaaatatgtggatgaccccactattatgtcttggcagattggtaacgagcctcgcgctttctctgacgagaacaaggaaccgtttgcccgctggatggccgatgtggctgcacaaatcaagtcacttgacccgaaccacatggtgtcttccggcagtgagggctcgtggggatgcgaaatggatatgaatcttttcgagaagattcatgccgaccccaacatcaattatctgaatatccacatctggccttacaactggagttgggtgaaggcggacagcctgaaggaacttcttccgcgtgccaaggaaaatactaagaagtatatagatgaccacatggtcattgctcggaagtacagcaagccgattgttttggaggagttcggttttccccgtgacggtttcagcttttccaaagaggcaccgaccactgcccgcgatgaatattaccgttatgtattcgacctcatccgccaggaccgtgagagcggcggactctttgccggatgcaacttctgggcatggggtggttttgccggacaaaatcccgaccatgtattctgggaaaagggagatgactataccggtgacccggctcaagaacaacaaggactgaactctgtctttgccacagacagcactattgaaataattaaagcggaaaaccggaagctgcaaaattgaacctatctgtgcttttccgtgtaatccctgcctgaaaattagaatgtaagcgtgtacaaagcgtttgtaccgttatataagaaagattattactctaaatactaagtatgatatgaaaagcatatggaaagttatgttggcggtttgttgcctaggtatgaccattggttgtggaacaaacccgtcgaagaatgaaaatgtaaaggaaacgctaccggcattggtggtcaatggtacgcagttgatgaataccgaaggagacacggtggtattgcacggtgtcagctatggctggcatcagttctggccccgtttctacaatgcctcttcggttgcttatctggtcaatgactggggcgcacaagtgcttcgggcctctatgggagtggatttggatagcgcctgctatgtgaacaagcccgagttcggtattgagtgtgttacgaaagtggtggatgctgctatcgagaacggcgtttacgtcatcatcgactggcatagccacaatctgcggcaggaagaagcaaaggagttcttcacccaaatggctacccgttacaaaggggttcctaatgtcatctatgaggttttcaacgaaccggtggaagacagttgggagcaggtgaagtcatactctgtggaggttatcaagacgattcgtgccatagaaccggatgccgttatcctcgttggttgtccgcattgggaccaggacatccatttggcagcggacgatcctattaccggatatagcaatataatgtatacactccacttttatgccaacacccacggacagtggctgcgcgaccgcgccgactatgctctgggcaagggcttgccgattttcgtttccgaatgcgccggtatggaagcaagtggggacggccccatcagtaaagaagagtgggggaattggctggactggatgcagcggcattccatcagctgggtggcctggtctttgtctgacaaggatgagacttgctccatgttctatccgtcggcttcttccgagggaaactggaaagatgcagatatgaaggaatggggaagaatggtacgggacgaactgaagaaatgaccctttcgggaaaaagcaatatgatttaaccattaataatttaagaaaaaaagaattgtgcctatgggaaaaaaggaaaaacggaactatgaagacatggactgtttggaagtaaacctaaatgtcaaggctgtgatagtatatcagggctttttgactcagtctcatttttgttaactaaaaaaatcttcttttgggaggttttgtgtttgttttaaatctaagaaatacagtatgaatttgaattttagaaagacagcgctgcttgcggggatatgctcggtgttcagtctgggttatgctcctcagcttttcgcagtatcatcgacggataccgttgaggcagtgcagcaaacaaagaaaattacgggtgtcgtcagtgatgctatgggccctattatcggtgccaatgtattggaaaaaggtacaacgaatggtgtaattaccgacattgacggtaactttgccttgaatgtgaaaccgggagctaccattgtagtctcctttataggctatgtcagccaggaaataaagataacgaaccagacaacagtgaacatcacgctgaaggaagactccgagatgttggacgaagtggtggttgtggggtacggtacgatgaagaaaagcgacctttccggtgcttccgtttccatgagtgaagacaagattaagggttctattatcaccaatctcgaccagtcccttcaagggcgtgctgccggtgtgacggcagtcagcacttccggtgctccgggttcttcctcctctatccgcgtacgtggtcaggccactatcaatgctaatgccgagccgttgtatgtaattgacggtgtgattgtacagagtcagggacaaagcggttcatcttatggtttgggcgatgcactgggtaatggctcggtttccaccatttctccgctttccaccatcaaccctgctgatatcgtcagtatggaaattctgaaagatgcttcggcaaccgccatttacggtgcgcaaggttccaatggtgtggttttgattacgaccaaacgtggtaaggcgggtgaggctaagtttacttatgacggtatgtttgccgttcaacgccagacaaagcgtctggatatgatgaatctgcgtgagtatgccacttattataatgatttggcaaacatgggtgaaatctctgaccctagtaattattatgccgatccttctctgctgggagtaggtacaaactggcaggacgccatcttccagactgctttgcagcatcagcaccagatttcggcacaaggtggtacagagaagatacaatactacgtatcagcttcctatatggatcaggacggtaccatcatcggttcaaactttaaccgttacagcttccgtgccaacttggatgcccaactgaagaagtggttgaaactcggtttgaccgccacctatacagcaacgggtgatgacctgaaactggcagacagtgatgaaggtttgattaactactcgttgaccactcttcctgatatacctatctataatctggatggcagctatgccaccgttgttcgcgaaggctacacgaatcctaacccgattgcccttgccatgatggatgacattctgctggaccgtcagaaactgacgggtaatattttctttgaggttactccgattaaaaatctggtatggcatgccgaattgggttatgacatcagttccagcaaaggtgagcgctacaagccgatggttgatttgggtggatgggtacgttccagtaatgaaagcaatatccagaaaaacagcagtacattctggcaattgaagaactatgtgacctattccggaaacataggcgacaagcatcattatacagccatggtgggtcaggagtgctgggagtccagctatgacttcacgagtgtgttcaatagcggtctgccttcggatgaagtgcacaatcctgccttgggtacgggaaccccgactatcaatgcaggttttggaagctcgtctatggcatctttctttacacgtctgacttataactatgccgaccgttactgggtacttatacctatcgttatgacggctcttcaaacttcggtcccgagaaccgttgggcaggcttccattcattggctacttcctggcgcttttccaacgaaacgttctttgaaccgttgaagaaggtcatcagtaacggtaagttgcgtctgggatggggacaaactggtaatgccaacatcggtggttatgcttggggtacatccatgagtcgtatgccttccggtctgggtatggggtatcgcccctccaatataccgaatacttccatcaaatgggagtcccaggagcaatggaacgtcggtgtggatttgggattcctgcacgaccgtatcaacctgacggtagagtggtacaagaaaacttccagtgatatgttgatgccgttgcagttgccttcttatatgggtacttccggtaatgcctcttctgcattggctgctccgaaaggtaactatggtgacatagagaataccggttttgaaatctctctgaacacacatcctattacgggtaagtttgaatgggattctgacttccagatttctttcaacaagaacaaactgaaaggattggctggtacagccaatgcgcagattgtgggttacggacagtggaccgatgtagtcagtgtatccagtgtaggcgaatcactttataacttctatggatttgtttgtgatggtgtttacaaggacctggaggatcttcagacttctccgaaacctgccaagtatccggcaaacggtgtattcgaccgtaccaataccgtatgggtgggtgatgtgaaatataaggatatcagtggtcctgacggtgtgcccgatggcgttatcgacgactatgacaagaccaatatcggttctccgatgcctaagtttacttttggctggactaatactttccgttacaagaacttcgacttgtctgttttcatcaacggttcctatggcaacaaggtgtacaactacctttccatgaagctgacacatatgaactctccctggactaaccagctgaatgctgtaaacggacgtgcacagcttgttcctatcaatccgaacaaggtctacgaagatggaacgatgtggtataatgatgtgtctaacgtcatggtggcaaacccgggagcttccattccacgcgccactatcaatgacccgaatgacaacgaccgtatcagtgaccgttatattgaagatggttcttatatccgtctgaagaacatctctttgggatatactttcccgaaaaagacgattgataaactgggactgagcaacttgcgtatctatgccaatatccagaacctgctgaccattaccggttatgacggctatgaccctgaaattggtgccagcacttcaagcgtcaatgtctatggtttggacaacggacgttatccgtctcctacagtttattcattcggcttgaatgtttcattctaacactttaaattgaagaaaacatgaaaatcagatatattaaatattgggcgtttgcagctgtactcggtatgggaacagtttcatgcgaggatttcctgaaccgtcctaccgaagacaattataacgaatcgaacttctatcagaatgacgaacaatgtgtgcagggggttaattatctttataactcaccttggtatgactttcagcgcggttttattaaagtcggtgaaatcttgtccggaaacgtatacgagggaaacagcccttacttgaattttacggtgaatggtacggatgaaaaccttgtgaacatgtcctattctctatgggcagtgattggccatgccaatactgtatatactcgtttgaagacggcaaatgcgtcagaagcagtgaaaaatcagtgtatgggcgagtgtctggcatggaaagccatggcttacttctatttggtacgtagttttggcgcagtacccattatccatgataatacggacgaattgaattccggtaattataactccaaattcaaagtggaggcagcagatgtgtacgaatatatcattatgactctggagaaagctatggagttgcttccggccagaggtgaaacgggacgtattgaccgctattgtgccgaaggtcttttggctaaggtgtatctaactaagagtggcctttccggtacccgcaatgcggatgatttggcgaaagcggcagaatattccaaggatgtaattaataattccggccgtaacttgctggctaactattccgatgttttccgtttggcaaacaacaagaatgaagagtgtctcttctcctggcactggtcggcaggacgtgacccctggacacagcagaatacgttgcagtcggacttggcaatggtgggattcgatgaatttggtgattgctggggcggctatgcaggtccgtcggttgatttgcaggatgcatttggaatttccgctttggaaagtcctgagacgcgttcggatacggatacccgtcgtaaggctactatgatgatggcaggtgatgtatacgattatttctggcaggacaagggcggatttgattatctgcggtttatttatgatgccgaatatggtaagggaggacctaatggcgattaccagtctcctaccggtgccaatcacgtgaagcatctctatggtaacaataatgaccatgtattgggcttgggcgtatcggctggtaatatgtacagcggcctggcaacccatatcctgcgcctgtccgatatctatctggtatatgccgaggcgaaaatgggactggctacctctactacagaccagagtgcactggatgctttcaatgcagtacgtggccgtgccattccgggagttactccgaaaacctccattacttgggaggacgtctggaaggaacgccggctggaactggcttgcgaaggcgaccgttggtatgattatgtacgtttggcatattatgattcccagcgtgctatcaatgagctgaaggcacagcgccgtgatgtttattatagtctgggtactacttataaggcttattatgaaaacggcagttggacggtgaatccggacgagacccgttacaatccggatgcaaaggcgccgaatgtgacagtctccagctttacattgccgttcccgacagaagacgtggtgttcaatcctaatttgatgaaagacccggtacacgtagatgtacgttctgaattcagttattaatttaatgcttgaaaagatgaaaaataatagatatacgaattggttcttcgcggcagctgttgttgtagcaggcttttccatggcggcttgtgaggatgaaccggataaatatgaagtggcagggggaaagcctaccttgaaatatgttcgtgtccctgatccggcagcggcagactctttgctgacgggggcttatatggcgaatacgatttgtctggtcggtgagaatctgcggagtgtttacgagctctatttcaatgaccagaaggcgatacttaataccagttacatcactgaccatacacttatggtagatgttccgaaagagattccttcggtagtgactgataagatttatatggtgaccaaagcaaaggataccatagattatgatttcaaggtgttggttccggctcctaccgtgaactccatttcttgtgagtttgcaaagccgggtagtgaggtgacactgattggtgactatttcattgatgacccgaatgtgccgctgaccattacgatggccggtaatgtggaagtgactaatattacgaacataaccaagactgcggtcagctttattcttccggacaatgctcctgcaggctatatcaacgtgaagtccatttatggtaccggacgttccaagttccgctattatgatacacgtaacattctctttgactgggacggttctcatggcggtatggctattgcccacggttggcgtgatggtagcaaggtgttgagagaagccgatgaaaacagtattgacggtgcttatatctgtctcaccggagcacttgacggtgctatcggagctacttgggcagaagatgagttctcgttcaactattggccggaaccgtctgccggttatcccgaactttctgcacgtcctgagtttgcagaactgctcgaggagtatggcgtcaatggcttgcaactgaaattcgaggtgaatattccttcttccaatccgtggcagtcttgcgctctacaagtgatgtttacgggtaatgatgtggtgacttatgcgacgggaactaatgcttattttagtgatacgaatgtgccgcgcggtttgtggttgccttggaagaatacgggttcgtatgatacgggtggtaaatggacaaccgtttccatgaatctgtccgagttcaacaagacgcatgaaggtaataagtgtgatagaacttttgacaagactatgctgaccggattgacattctttgtctgggcaggtggtgtggaaggtaaggattgcaatccggtgattatgattgacaacatccgtgtggtacctattgaataaccttttaaatagaatactgatatgaataaaacatataaatttccggcactgtggatgatgtgcctgatgctcttcagttgcttgacgtttacggcctgcgacaatggggatgatgaagataccaaccaatataaagggggaatcagtctgaatgtattcggaccgagtcccgtatcccgcggcggtgtactccgtttcctaggcagtggcatggataaagtgactgcggtcgctattcccggttgcgacgatataacagacatcgaagtagtcagtgatacggaaatccgtgtcactgtacctcagacagcccagccggggttggttgtcttgaagactccgaaaggggatattacaacaaaaaccgagttgacatttacggagccgattgctttggaggcttttgcaccggcagaagtaaagcctggtagtgaattgaccattactggtgaatatttgaatttgattaaagaagtgatatttgctgacgaggtaacagtgcctgctgatgagtttgtcagtcaaagccgtcaggagattaaagttattgttcctgattctgctcagaccggtaagttcatcttgtctgatggagctgaaatccccaattggatttattctgaaggggaactggaggttactttgccatcggtagaggctccactcgacctggtagataagaagccgggggatgtcattcgagtttctggtgaaaactttgatttggtgaagaaagtgcagatgccgaatggggatgaagttgaatttacgatgactgcctcttccgaaggagatgaacttacttttacattgccggataatgtctcggacggagaagttacggtacttcctgcttcggatgtaaaagttgtggttgctactgttgtagtagctacgccttcgaacgtagtggctgttcctgctgtaaacttgcgtggtggagatatgattaccttgaaaggtaccaatatggatttggtgactgatgtaacgttccctggtgtagaagaagcagtaagattggaatcacaaaactcgactgaaataaaggtcttgatgccggctgcggctattagtggtgatttgcaattgaatacaaatagtggaaaagcaactgccgtatctattgcaacggcaaagccggaaaacatttcttatagtgcggcgacggtcccggcaggagaggctttgactgtcaaaggagtaaatatggatgtagtttcggctgttgtattcagtggtaatgtggaggttaccgtatccgatgccaccgctactgccatttccttgactgtacccacaactgctgaaaccggggccttactcttgaagatggccaatggtgaatctgtggaagcaccgtctttgacaatagagaaaccggtatgtgcctatttgccggcattgcctgacaaattggttcggggacgaattgtggaacttgagattgttaatgctgataagctgacaaatgtattgctgaatgaggctgctgttcagtatatcaatgatgcagctaaaggggtattgatgttgaatgtaccggctgagctggatggaacttatagcctaaaactgatttcttcaaatggtgaaattgcttatgatgttcttgtagttgccaatgaagaaacagtttgggctggtccgctcgatattagttggggtgatggaggacgtgtgttggtaccggctgtatcttttgccaaggtaacggcaggcactgtcatgaaagtctattttgatcagaaagaccagacttgggcacaggctcagtttaactatggcgattggagtggcatagctttctctttgtttgatacgactatggtaccgacagacatttacggctggagtttcgagagccgtgtgatggagttgacgttgactcaggagatacttgataatattcaagctaaacaaggagattgtgaagaccagacaaatgtaggtatcattattcagggcagtgatttgacgtttacaaaaataacgattgtaaattgatgaattgtggcttgaagaatgtgactatggatgccctgattaagaatgaaataaaatcataattaagatgaagaaactgaatataaaatggatgctttcgttgatagcagcttttacttttgcctcctgcgatactgatgtcgatcatgatatcccagcagtggatgcaccggtattggtgtctactactcctgaaagtggagcagccaaagtgaaaacgggagaaatcactattgaggtgaaatatgacaagaatatattctttgcaacagacaatctgagcgaaatcaagtttaccggtggtgaactgataagtgccgatgtacttggcgcaagcaatatactgactgtaaaagtgaatgttcccgggagagagacggcttgttctctctctatccccgagggaatagtaaccggaccgaaccagatgcctgctccggctgtatcggttcagttctctactgttgctttggacaagacgctggttgctgccacttcggccaaagctgtgaaactgtacaattatctactggataattttgagacgaagacactttcagctatgatggccaatgttgcctggaatacggaaatgtccgaaaaggtgtatggatggactggaaaatatccggctatcaactgtttcgactatgttcatctgccggcatctgtagctggagcagactggattaattacggtgacattactcctgttaaggattggtctgacaaaggtggcatcgtagctgccatgtggcattggaatgtacccaagaaagctgtaggcgaggcttcttctacccaaatatgggaaggagagatagtaatgccgggtgattggagtggaaatgtacagatgacggatgatgctgcaaaagctgtctttgctgatgcacaagtgggtcaggtgatacgcgtggctgtgaaggatgtggcagcgggtgcacaaggttcgttcaaaaacagtggttggagcgagattgcttcaggaactgattattttgacatatccggggactatacattggtgattaccgaagatgttttgaaatccctgcaagaaggtggtctcatcattggtggacatgattatacagcagttgctgtttatcttgaaaataacggtacagctctcgacccgaataaggattatgccttttataaggcagatacggagtttgatgctaccaatgccacagtggaaggcacttgggaaaacaaggtgtttaccgaagatttgaaaaatgctgccgcttacttgaagctattgagagatgcggatattccggtattgtggcgtccattccacgaggcagccggtggctggttctggtggggtaaggatgctgccagttttaaatctctgtggattgctatgttcaattacttcaagactgaaggattggataatcttatctgggtttggactaccgagggcaatgatgccgattggtatccgggagatcaatatgtagacatcgtgggacgtgatgtttataataaggaaactgcagattgtgtttcagaatatacttccattgccgaaaattatggaaacaagattgtttcgctgagtgaatgtggtacggtcggacttatttccgaacaatgggcatctggtgcacgttggagttggttcatgccgtggtatgacgggacaaatgaggatggtagcccggtagtccatgctgatgaagcatggtggaaggatgctatgagccaggaatttgttgtttcccgtgaagatcttccttctatggaatagcatttttaataataaaatgggaagggttgtctctggttagtatcggggcaaccctttctgtcttttatagcttttagttgttggttatagaattcatgctttatactttttaggaaaaatagtaatggatgttaaatgagtgtcgttatttgataaaatagtattataaggtttgctgctaaaagtctacttttgtcaagcctaattaaaatttgataataatcatataatgtttaaccgctaatgaaatgaaaaatgcctatgagaaaggagtgatatgtataccaaccactttatagaataaggtatatttaatttttcctcaaaaagagaagtttaaccttatattaaacggtagatgccgccaggcaataccaattcattaatctaagaaaaatacaagtatgaatttaaatttcagaagaaccgcgctgctcgtgggtatctgttcggctgtcagcctgacttatactccgcaacttttcgccgcatcggtcgatgcaatagatgctgtgcagcaagcaaaaaaaatcacaggtactgtaacagatgcaatgggaccggtcatcggtgccaatgtattggagaaaggaaccacaaatggtgtcattaccgacattgacggtaatttcacattgaatgttcagccgggagcaacgattgttgtgtcttttatcggttatcagccgcaagaaatagtggtaggtaaccagactagtttcaagattcagctaaaggaagatacggaattgttggatgaagtagtcgtagtgggttacggtgtacagaagaagaaactggtgacaggtgctacggttgaggtaaaaggcgaagacatcgcaaaattaaatactacgcaggcattgggcgctttacaaagccagtctccgggtgtaaatattcaggccgtttccggtcagccgggtgatgggtttaaaattaatattcgtggtgctggtactaacggaaatacagctccagtttacgttattgatggtgtagccggtggcgatattaacgccttgaatcctgccgatattgaacgtattgacgtgttgaaagatgctgcatcttgtgcaatttacggttcgagcggtgccaacggtgttatccttattactacgaagcagggtaaggtaggaaaggtttctgtatcttatgatggaaacataggttgggcaaatatatataagatgcctgatatgttgaatgccaaagaatatatggcggtaatggatcaagtggcctataataatggaggccaaccgtatgattggtcaaaattcgtagatgctgatttgctgactgcttatcagaatggtaccaatcctggtacagattgggtaaaagaattccggaataaaaatgctgtggttactaatcatgcgttgaatgtaacaggtggttctgaattctccaaattttcgacaggtataggctatcagtatcaggatggtgcattcggtggtccggtgaagactgactatcgtcgttttactttccgcattaattctgagcatgtgatatatcgtaagggagatgtggatgtgataaagtttggtgagaatatatattatcagcacaaacagaatcaaggtgtgcagttaggtaatcaatattcgaatgacctttctaatgctttgcgtgctattcctctgattcctgtatataatgaaaatggtgatttcttcatgtatgatgatttgaagaattttggaacgagtgctaatggtatacttgattatactgcatatgcttctaatccgatggctcacatggtatataatcaggctgggaataataagaataagaattttaatctgaacacagcggcatatctggaagtacaaccacttaagaatcttatttataaaggtcaggttagttacaaacaatggtcaagttcatggcgttcatatcttcccgtttaccaaattaataatcagggagatagccgtgataaagaccaaacgataaataacgtgtctttgggttggaactggagtttgactaatacgttgagttatcggtttgatattacagacttacatcattttgatgttttggctggtacagagtattctaaatcaagaccaacttatggcgaatcagtagaggcaaccggttataatagtgcttttggtgactttacacatgcttatttgcataatacagaacgtaaagctactgctacagtaaatggttatccctcggattatggttctaagatgtcttattttggacgtttgaattatgactttaaggaaacttatatgttttctgctatcattcgtgccgatggctcgtctaagtttgcgaaaggcaatcaatggggatatttcccatcattctctgctggttgggttatttcaaacgaggcttttatgaagaatactgcttcttggcttggtttcttgaaagtccgtgctggttggggacagaatggtaatgacaatatccctaattcaaattggcgtgccggttacgagtttggcgattatggtctttatacatttggctcggataagaatggaggtacaaccggagcttacccgaatcgtttggctaaccccgatttgacatgggaaacttcagaacagaccaatatcggtattgatgcccgtttcttggataaccgtctgagttttaccatggactggtatagcaagcagacgaaagacttgttagtggaagtgggtaccaatgcggcttccggtttcgctactcaatatcaaaatgctggtacggtaaagaatactggccttgaactttcaatgggctggagagatcagattggtaaggagttcaagtatggggtgaatgtcaatatggcctataataagaatgaagtaacggaggttaataacgccaatcattttattgaaggcggtaatgatttgttggctcaaagtacgggtcggtttgtccgtatggaagaaggacatcctattggctatttttatggttataagacggatggtgtcattcagaaccagaatgacttgcaggcatatcttgaccagaattgtaaaggaaatgcggcaaactctaagcaaggtgcaagtattaaaccgggtgatttgaagtttgtggatgttgatggaaatggggtgattaatgatgacgataagactgatttgggtaatcctcatcctgacgtgacaatgggtcttacgttaagtgcggaatataaaggatttgatttctctgtaacaacctatggcgcttttggtgcacaggtagctcgctcttggcgaaagttctcagatggacagtatgaaaactatacgacagaagtttacgattactggcatggcgaaggaacctcaaacagatatccgctgcttgcgccgggaaatagtggacagaatttccaggccatttcagatatttatattgatgatgccgactatgttcgcattcaaaatctgactataggatacgatttcaagagaatttggaagaactgtccgttccagcaacttcgtgtgtatgctgctgcacagaatctatttacttttaccggttataaagggatggatccggagaatggtagagccctcaatgacaaagaaccgtgggtaaccggtgttgatgtaggtaactatcctcaacctcgtacttatatggtaggtgttaatgttaaattctaaaattgatacacgatgaaaaaaatagcatatttaataggtgcagctttgatgatagcaggaatgtttgcttcttgtagcttggactcgatgagtctgacggaaaaagatacgaccaattttcctaaaacggctgaagatgccaatcaggctttagctgccatatatcagaacctgaataatgtcaatgcttttccacagcagtctttcttgtataattctctgctggcttgcgatgatatgttgggtggtggtggtcccaatgataagttgatgcaatctttggaccttatttgtaatacgggtacaaatgctacgcaggattactgggtggctcgctatcaaggaatcaaccgtgccaatacgttgttggaggctcttgctggtattgaaatggatccggaagtaagagcgcaggctgagggcgaagccaagttccttcgtgctttttattactacgagttggcttccatgtatgggcgcgtacctttggtgattactgctttgttgcccgaagatactacccctccgactgccgctgttatctgggggcagattctgcaggatcttcgcgatgcggctgcaaatatgccggctgttcgcaagtcggatgggcatgttgataaatatacggctgaagctatgttaggacgtgcctggttgtattatactggtatgtatggcaatggtgaaactctgaacgatttggttagtacgaactatagtccgttgacttcagttgatttgcctgatgggacaactttgaccaagcaggatgtggttgggtatattgatgattgtgtgaataattctggttatagtcttgttcctgagtttcgtaatttgtgggcatataccaataaatgtacggtagaagattttccgtttactgccggtcagggattgaagtgggtagaagatgatgcagcggtaaatcccgaatccatgtttgccattaaatataataaacttgcatcttggagcactactatcggttatggtaacggttatgctctgcattttggtgtacgtggcaatgatcaggccaattctttccccttcggacaaggatggggtgccggtcctgtagctcccaatctttataatgattggagtgtggcagaacaagatgatgcccgtcgtccggcctccgtattcaagacggaggatatgccgagttataataaaggtggtggtgacggctttatccaagaaacggattattatcagatgaaaataggttctatcatggcttatagtacggatgcggctggaaataaaacgattgaaccggtatttgagaagataatgtatggtgccgacggctggattaatgataatctgatgcaaaccggttctattcatgatttggttttgattcgttttgcggatgtattgttgatgcagtctgaattgaaggaagatgtttccggtataaacagagtgcgtagtcgtgccggacttgaacctattggtacatattcgttggctgcattgcagaatgaacgccgttgggaactatgttttgaaggtactcgctggaacgatattcgccgttggcatattgctgccgatgcccttgaaagacagacgggagcaaaggtttatacaaatggggctgaaagccgtaatgtggcgcagaacggtggttatgccgcacgttataaggctacggcaggtttccagaagattcccgaaaaccaagtcctcttgaatgaaggaaaggtagaacaaaatgaaggttatacggatgcaagtgctgagtataatggttggcaagaatagaatatgaatttaaaatgaaaaaagatatgaaaaagatattattcgcaatacctttgtttgcaatgctgctggtggcttgcgatccgatagtggatgaaatcagtccggatcccaatgtcacaccggaaaatcttacttttgaacttgtggccaagaaccagggaaacaacaacattcagattgttcctactccgtcacgttatgtgaaggtttatgatgctacgtctgataccaagttggcagaaggtacggctccgtcggttcaagtagctcctcctaataaagaattgcaagtatatgtaacaaccattaattcggacggctccataacaaaatcggcttccaaatcaatagcagtaacggagtatacagatcttcccgctatttatgcagatatctttggtacaactccggatggtggttatggcacaacaacttggacttggaatacagaagccgaagacggctgctggggtaatggtggatttctgtcaaatacaggtcccggttggtgggttatccgtagtggagaaattgatggacaggttacaggtgcgggactacctgatgacggattgaacggttggttctcgcttagcctgtcaggtgtccagacaagtcgtggtgaaagtggctctgtaaaagtttcagaagatatggtacaatccggatgggatgtaggtacaattgaattttctggtactattcctttgttgggtatacaacctaatcaaggaaatgcacgtcagtatgtatatcacattttgaaaatcacagaggatgaacttcggctttgtgcacctgagccaggggtgacttctggaggtggtactgcatggttctggaatttcaagagaaaatagtcaatattggatgtgcgggcgggtaatatccgcccgtattcctcaattaataatcacataaaaatcaaaagatgaaacgaactttttggtgtatt

SEQ ID NO: 4401 - DNA, 146321 bp, Unknown
  gut microbiota DNA sequence
acattaaatattacattttaccctttccaaccagccgatatgcttccctgaccacttcctgcggatagccgcacatctcgataatccggatggcattacgttccgtcaccggtcccggcttcaacttataatcaaaagacaatgtattgtcggcaacacactcacaaaaatgaaacaattcatattcgtcctcaagtaaggaagccagttcgacatcgtgagtggaagcaaacacaatactgttcttgtgcgccaaagcagacagcacagctttggctatagctatccgttccaccgtattcgtccccttgaacaactcgtccagcaggaaaaaccgccaacactcctttccggcttccagcatctctcgaacaatttgcacctcctgcagaaagaaactttttccttccatcagactatcctccagatggatagcagaatataatgcagtatccataggaaaacggaaactgcgggcaaaacaagtatggagcacttgtgcggaaagcaggttaagtccgatggcacggataaaagttgtcttaccggacatattggagccggcaacaaggacagatttgccacagagtgtaatgtcattagggatacaacgttctataagcggatgataaagcccttctgcatgaaacgtttcaccctcgctgcaagcttccggtaaaacataataaggcagcccatcccggagttcggaaacagagcaaagcacatccaccaatccgaaatagcggaaaacctcttcaatctgttcctgtctaccccgcaatagaaagaaagccttggaaaccggaataacttcccgcagaaaaaacacattcactatctcggtgaagaaataagcgaaaatggcgatgtcgctctccagtctgatactgaaacggaaagtggaaagtttctttcgcaacggatgcaatgcctgcaaagtcttttggatatcccgatgcacggatgcacacaacggaatctgtgccaacttctccgcttgcctgagcaactgccataactgaggaatggaaaagaaatagccctgaatccgcgccttgctgcgatagtgcagtaccatgttcaccaataccgatgtgcacaaaatccccagaacataaagcgaagacgtaatgtaaactattcccaacaaaacaaaaggcgcgaattgcaagatagtcagcaaacggtaaaagcggcgggaatacacgggatgggaaatggagaatagcgatgcaatggtataagcatccggcgtatccagtttccgcaactccgaccggatttctgcacgcaactccttgtcagcagaaagcttacgaatcacttcctcttgttccgaaatctccgaaagacggttgtaatgcaacacgtcgtagaggtactgtcggcccacacaagaagaggtacggtcagcccattcgaaaaaatcatccagattgaggtcatcccaggttttctgcgacaccaaatgttctgtctccctcgccgaccggtactcgtggtatagcgatatatccgaaaatgactgttccatcaaagaattatttggaatgatgcacaaaaataatgaaaagattgcattctatctaatttccttgctgctttccctatattatgtttactttgcgaatacaaacacttttcattacttcaccattaaaattataacaagatgaaacacacttttttcacattgacactgtttttactggccttactgtcaacatcatgcggaaacaagaaagtagcatatcagaatcccctgcccatggccttcggagacccgttcctactgaaagcctccgacggcaaatactatatgtacggaacgggcggagtatcgaacggttttaaagtatactcctccgatgacctggtgacatggacagacgagggtcccatctatcaaggcggcacctccgactcatggaccaccgactgtttctgggcacccgaagtgtatgaacgggacggcaaatactacctatggttcagcgccaactggaaggaaaatcccactaaggagcaagagaacttccgtatcggtgtagccgtagccgataagcctaccggccctttcaaagacctgttcaaccaaccggtattcgaccccggctatcctatcatcgacgcaaacatactctttgacgatgcttccggaaagacctacctctactactcccgctgctgctacaaacatgccgttgaaagcgaagtttcagcatgggctaaagaaaagggctggtttgacgagattgaggaaagttggatttacggcgtggaactgaaaccagatttctctggtatcatcggagaaccggtagcactgctttgcccgccccagacaatggacgaccctcaagcggaatgggagaaccgctcggtgacttcacatgaagtcaacagacgctggacagaaggttcgtatatcgtgaagcacaaaaatctttactatatgctgtactctgcaaactttttcggagggaaaaattatgcggtgggttatgctacctcccagaaccccttaggaccattcacaaaagctgccaacaatccagtgctgcaaaaggatacagagcaaggcggcatcgtgaccggaaccggacattgtatgctcatcgatattcacaaccgcctctactgtgtctatcatggacgcaccgaaaccactggtgacgaacgaatggtattcatcgacctcatagacatccaaccagacgggaaactggtggtctacggaccgaatacggatttacagaaaatcacatattaaagctatcaggcgcagactgtacagcatttcacggttcattattccctgtggctctcctatacattccgcgcctgatgaaaattaaaaaggacatatccatacacaacaatccgctccatatttgttcctgacttcaattctattttcaccggtatccaatacaatgcctttccattccagtacatttacggaatcaggttttgcagtcccatatgctttgccattgatatacaatttggcagctccgctattgctgaatacttgcacaccaacgattttgcgggttctgtttaccaatcgttttcctgcgatatatacaaacttatcttcttgattccagtttgccttataaaagtaaaaggcatctttctttattttccggtcgtaagtcaccagccccttatcgttgcgtcccataatggatccctccctacggcctgccgccgaaaagtcgaacatgcaccagatgaagttgcaccacaagaattcgcgttcctgaagctgtttccaattctccacatgataataagtctgccagttttcgggatgccattgcccccacggttccggatgcctcagcgagtcctcctgctggaatacgcatgccccggcaccatactcgctgatgcccatcttccgctccggatgtgctgcatgctcgcggtctatccagcgccccatgtcatccatgttgtcgccataccagccgaaatacttgttgaaagcaatcaggtcggtgaatccgttgaagtcgtcatcctgattactggctcccatagtgggacggctcgggtccaactgacgggccaaagcatgaagctctgccgccatacgcgaaggacggtccagccaaccggaatttatctcattgaacagcccccagaacaaaatgcaggggtgattgtagttctgtaaaatcagttccttcaattgcaggcgcaagttttcatcataagcaggattattcacataaacattgacaaaaggaatctcaacccatgccaccagtccccgcttgtccatctgttgatgcatgtatttggcttgcggatagtggcaaagacgcacggcattgcatcccatttcctgcatcaagtccaaatcttcgtcatggtcttgcggataaaatgccgaagcgcgttccgccctgtcctgatgccggttcacgccattcaaacgataaggctttccattcagaaagaaacctttttccgcatcggcatgaaagtagcggaaacctatctcttcttcgcggcggtctatctctttcccatccttacgcaatatcaccactcctttatataaataggggtccttcactccatcccacaaatgaggcctttcaagcaccatgtccatcaccacctttttatcctcacccacctctgcactggcaacacggcaaagcaacttttccttgtcatatagttgaaactccacctcgcaaccggtcacagtagtttcccttgccgaaagcagtgcttcaattttcaaatgggcctttttctccgatacatcggactgagtgaagaatacacctgaagaggcataataagcaggttctatgcagacatcctccgttaccagcagctccactccccgatacaacccgccaaacatattgaagtcaccgcaaatgggagcgatatccatagtctgagcattgctgacacgaatttccaatacactttcttttcccggaaccaagaaatcagtcagttctgctacaaatgccgtataaccacctttatgttgcatcacaaaataatggtcgataaaaatgtcggcaaccgtctgtgcagccatcactttcaagaaaaaacgtttgccccgataatgggcaggaacagacaacttacgactgtaattgcataatcccctataataatcggcattgccaaacatgccatcgcccgcattccaagtgtgaggcaaagtaaccttcactatttccgaagcaggtgcctgaaaaccccggtggaaattccatccttcattcagtggaatcacctctacggcaaatacacatgttgacaatattcccaaagagaataaaaataaaatgatgaatctgttcattttcgataaagtattagaaggttaatcatattggcaggaaccagtccttccctgcaaaggtatgaaataaatgttgaataataaatgagaaaaacacttcaagacacgcaagacaacaaacggatgacatgtttaagacttatacgaccgcgatgcaacattacagacctattaatgcaacatatttacgtttatttaaataagatattgctatctttgagaattcaatttcagattatatagtatgtcttttacaaactatttacacaaattagtgttccccctcattattctgttactggcttatctgccgttagcaggacaaactccgtatgtatttcgccatctgaaagtagaaaacgggctttcaaacaataacgtaaaaaccatattgaaagactgtgaaggctttttatggatagggaccgccaatggattgaaccgatacgacggatatagctttaaagtgtatcaacccaaagaaaaagacatccattctttattgtctaacgacatctggaacttacaggaagacggtttgggcaatttgtggattggaagcgaggcaagatattgtatatacgaccgagacaaagacaacttcattaccgatattccctcatacctccttaaaataggcatccagataaatggtacctacaaagtacatgttgacaaaagacacaatttatgggtactgcaaggccaaaatgctttttacttcaatttttctcataaaacccttaaaacattcaaaatagaaaactttccagaagaaactccggaactgagtatcagcgatgatggtgaaaacctatatcttctttggaattcgaccttattgaaactagagaacaacgcaaagaaatgtaaacgggtagataacatcagcttaccctccaactctattatcgaaaagcacatatacattgattatcatggaggcatctggctatattcatataccgatgaacaaatattctataagaaaaacataaaatcggaatggaaccaaatcaatctccattctaaaatagagacaaaaagtaatgcggtaaggagcatactggatgactcgaacggacatgtctggataggaacggaccataaaggagtattcatttatgactacgtaaatgataaccttgtcaacctcctgaatacccctatgtcttccacatcccttgcttccaacagaataaatacaatctaccgtgatgattcaggcgtcatttggttaggaaatttcaaaaaaggagtttcttattatcacgaaagcttccatgaatttattgatacccagcataaagaatgtggtgatatagcctccattttagaggataaggccggaaacatttggctgggaacagatgggaacggactttatgtaaaagaaaagcaaaaaggatttgccattcgcaaactatccatccccgacatagccatcatcagtcttctcgaagaccataaaggacggatttgggcaggaagttatcaagacggattgttctgctatgagaacaacagtattcgccattttactccagagaacagccaactgccatacagtggcgtatggagtatgaaggaagaccgatatggaaacttatggataggttatgtactggaaactttggtttgttttaatccggacgcaaatactgcgacaagttatctactacctgatgggaataatatcaatgtactcaatatctgttatgactatggagacaaaatgtatattgggactacatacggactctgtgtaatggacatcgtgacgagaaaacccgaaatgatttatgccaatcgaaaagagacacagccattcaagcagctcttcatttccactgtattcaaggacgacagagatatattgtggttagcccataaacaaggattgactgcctgggacttaaaaaatgattcactacactggttcgacgtaaacaacggattgtgtgacaatctcattaacagtataacccaagacaatcatggtaacatgtggcttgcaacaagtaacggattgtctatattggaagtaaccccagacacccaggaaggagtagacttttctttcaagaatctttctaccagagacggattgccagaaaatcatttcaactcccattccgcttgtaaattgtccagcggagatttactgctgggaggcaccagtggctatacatctataaatccgaacaagctgaccgaaaagagccgaccgctggcaaaggtgtattttacaaatctgaccattggcaatcaacatatagaagtagactcaatatatgaagggcgtaaactattaacaactgtacttggcagaaccccatcattgtctgtcagatatgacgattatttaatctccatcgaatttgccgcaggcgatttgctgaatgctgataaaataagatatgcctataaactggaaggattaaatacccaatggtactatacaaacgagaacaaaatagctttcaccacccttcctcctggcaattacaaactattgattaaagcttgtaacagtgacggtatatggaatgacgaagctagtgagttgaatataaccgtttcatctccaatatatttatgtaatgttgctatcatcttatacatattgtttgccattggtataatatcctatgtaatataccgattcaaaaagcatcacaacataagactggagcaacaacgagcaaaactggagcaagaacaaaagttgctcctgaatgagatgaagctaaagttctttacaaatataagccatgatttacgtacaccactgacgcttatcattagcccgttacaaatgttattgtcagaaaccctggatgacggaatacgcaaaaaactaaatacaatcaataaaaatgcacaacaattacttacatcgataaactctctgcttgatttccggaaactggatgtaggagccgagacagctcattacaaatcgggagatattgtcaactttatccgcgagatttgcagtacttttcaagagtatgctcttgaccataccatcagcttctgtttcatgtgcgaagtagaaaacctgaacatgtccttcgatccggttaaaataaaaaaagtaatgaacaacttgttgtccaatgccttcaaatacactcctgataaaggagaaatcaatgtacatctttatcgcgaagatgacaatgtatgcatctgtgtggcagacaacggacaaggtatcatagacaaagacaagaaacatatcttcgaacgtttttatcaggtgcaacaaacttcggaaaaaaccggcagtggaatcggcctgcatattgcaaacgaatatgtacatctacacaaaggaacaatctccgttacagacaattttcctaaaggttccgtatttaccgttaaattgcctatcgtcacatatgccagtgaaaaggaggaattacttccggaactgctaaacaatgacaaagctccgaatgaacttcccgttccaaatgcggaagaattgcggtataccatcttgttggtggacgacaacaaggatttctgtagtttcatgtctgaatacctgtccgatgaatacgccatacaggttgcctacaatggagcagaggcattgaagatattagaaaaaaacagtgtcaatattgtaataagcgacatcatgatgccagtgatgaatggaacagagctatgtcggcaaatcaaaacaaacatgcaatggtcccacattcccgttatattgcttacagcccgtatggcagaagaatacaaaagtgaaggatttgagcaaggagccgatgactatatcgtaaagccttttgacttcaaattactaaagctgcgcatcaggaaatttattgaatggacagaaaaaagccatcgtaaattcagtcagaaaatagaagtgacacctaatgaaataacaatcactccactagacgaacaatttattgaaaaagctatcaaaatagtagaagagcgcatgagtgattccgacttctctgtggaaatgttaggagcagaattggggttgagtcgtagccatctctacaaaaagctgatgtgtatcaccggtaaaggtccggcagaattcatccggattatccgtttgaagcgcagtaagcaacttctaaaggaaagccagaaacaaattgcagaaattgcctatgaggtgggattcagttctccaaaaaggttcactgtaaacttcaagaatgaatttggaatatcaccatctgattacatccgcagtctaaaatgataacttgaaacataaaggtacactatttaaaacataacaagcctacattattgccaaaacagttcatatttgcagtgactttcaaatcagtcatttcttatatttttaaatcttaaattaaagtattatgaagttacgcgcaaatgtacgtccacaatggcaatgggcaaaattaaagcaattgcttgccattgtgctgatgttttggggtacaatctccatgtacggacaaagtaaaatgatttccggtatcgttcagtcagaatcggacggtgaaccacttgtaggagccaccgttatagtaaaagagaccaaagccggtggtaccaccgacctcaacggacgttattccgtccaagcaggacaagggcagactttgattgtttcctacatcggctaccgttccaaagaaataaaggtcggaaaaaacagccgtatagacgtgcaattacaagaggacaacgaaatgttggacgaagtagtagttgtaggttacggtacgatgaaacgcagtgacttgaccggttccgtggtcagcgtgacgggtgacgaactgaaaaaatccgtagtcacctcgctcgaccaagctttgcaaggacgcgccgccggtgtacaagtaacgcagaactccggtactccgggtggcggtatctccgtcagtatccgtggcatcaactccctgaacggcaacgaaccgctctacgtcatcgacggtgtagccatatcgggtaacaataacggtaacagtagtgtactcagttccatcaacccatcggacatcgtatctatggaggttttgaaggacgcttctgccactgccatctacggtagccgcgcctccaatggtgtggtacttatcactacccgtcagggcgaaacgggcaagaccaaagtttcctacgaaggttactatgccctccagcaacttcccaagaagttgaaaacattgtcgcttcccgaatatgccgtttatcagaacctccgcgctgccacaatcggtttcggtgaacgcgaggagtttaaagatcccacactccttggtgaaggaaccaattggcaggacgaaatcttccgcacagcaccgatgcacaaccatcaaataaacatttccggcggttcgcaaaacatgaaatactccttatcgggcggttacctgcaacaagacggtatcgtgttcggttccgatttcgaacgtttctctttccgtgtcaacatggacaacgatattaacaaatggctcactaccggcttgcgtgcttcagtggcacgtaccaaacaaaccaacagcgtagacggttcgggtgccatctataatgccctgaaccagcttcccgaggtacccgcccgcaatccggacggaagtttcggtatgcagacggagaatatgtatggaacttacttctccaatcccctctccgaccttatccaaaacgaaaactacagccgcagtacacaggtttacgtcaatgcttttgctgacatcaaattatggaaaggattggtgttccgcacagagtatgcagccaactacaactacaacaccggttatcggttcactccttcctacgactatgaattcttcaaacaacaatcttcggcaagccgctcggcaggtaacggaagtaactggactttgaagacctaccttacttacaatggtactttcggcaagcacaacgtttcggtcatggccggtcacgaagcgcaagaaaacaactgggaatctttggacggaagccgtaccaacttcctcttcaactcggttcacgaattgaatgccggagacgccactaccgccaaagccaacagctcacgcggttcatccgccatcgagtcttacttcggccgtctgaactataactttgccgaccgctacttgctgaccgccaccctccgtgccgatggttcttcatcctttgccaaggaaagccgctggggttggtttccctctgtagcattggcatggaaagtcaacaacgaagccttccttaaagacgtggaagccatcaactccctaaaacttcgcttagggtggggtgtggtaggtaaccaatgggcaggctcttatgcctacggtgtaaccatggcttcggcagcttccatctggggaaccggattctatgccggaaactaccccaaccgtagcttgaaatgggaagaaaccaactcctataacatcggcctagacctcgccctcttcgacaaccgcgtggaattgattgccgacgcttattacaagaagaccgacaacctcttgatgcaagcctcattgcccacctatgtaagtggactcatcggtgcaccgtgggtcaacgccggtgccatgaccaacaagggtgtggaatttacactgaatacacgcaacatcctgacccacgactttacctggacttccggactcaccttctccatcaaccgcaacgaagtaacaaaactctactccgagtcatcggcaatctcgggcatcaacggaaatgaaacgctgacctacactatggtgggcgaaccggtcgggcagttctacggttataaagtcatcggtatgttcaaagaagagagcgacttctacaagaaagatgctgacggcaacttccagctcgacgaagcgggcaatcgcatacgtatagcaattcccaagggtcaacaaataagcaaaaatggtatctgggtaggtgactacatttacgaagaccttcacgaagatggtgtaatcgatgaaaaagaccgtacattcttgggtaatccagctcctaagttcaccttcggattcaacaactatttcgcatataaaggattcgacctcaacatcttccttaacggttcggtaggcaataaagccgtcaacctaatccgccgcacgtttaccgaccccatgcgaaacagcaacttgctgaaagaagccaccgacattgctttgattggaatgcacgaccccgaagtgggcgatgaagagctctccaacgtctatatcgtcaatgccgaccgagccaaagtacagcgtgtcaccaccagtagcgccaatgacaacaaccgtatctccagccgttttatcgaagatgcctcttatctccgtataaagaacatctcattgggttatacattcccccgaaagtggctgcgccatttacaaatagacaatatacggctctacgtcaatattcagaacctttgcaccatcagtggctacaaaggatacgaccctgaaataggcgcattgaattacaatgtcctcttgcggggtgtggacgatgcccgttacccctctcagcgtatctatacgttcggacttaattttaatttttaatgagtttggcaaatatcactaaaaaagacaaataacatgaaatacagatttctcacccttatatcgtcgctcctcctgctcacagcgtgcagcgactcttttctggaacgtgctcccgaaggcaactacgtggatgtaaccttctacacttccgataaagctttacaagcggctacagccccgctctacaatcgtgcctggttcgacctcaaccagcgttccatcgtgccgctgggcagtaaccgggctaacgacaacttcagccgctggggttccccagaatttaccaacttcaaggtaacggcattgaacgacaatcttgccgctgcctggaaaggattctattcggtcatcaccatggcaaacgccgccatcagtgacgtgaagaccaaatgcagcagcaacgtaagcgaacaggctaaactgaccgccattgccgaagcgcgcctgatgcgtgcctgtgcctacttctacatggtgcgtctttggggaccagtcattatcattgaagataacgacaaagtggtagccaaccccatccaacccctccatcgcgaagaggatgtgtttgaattggtgattcgcgacctgaccttcgcagctgagaacctccccgaagtgccgatggccaaaggccgcgtcagcagttggggagccaaaggaatgttggccaaagcctaccttgcccgttctggatggaaaggaggtacacgagacaatacagacctggaactggcaaaaaagatagcagccgacgtgatagagaacagcggaatcgccctttacgaccgctacgaagacctcttcaaatacaaacataacaacaatccggaatcactcatcgccatgcaatgggtaccgttaggtgattggggagtatgcaacaccctgcttgccgaccttgcgggtaacagcacgatgactggtggcattaacgtctggagtagttaccaagccagcattgatatgcttcagcaatatgaagtaggcgataccatacgccgcaacgcaacgttctgcactccgggaacatattatccctatatttgtattgccaatggtggatacacctacgacggcaacacctccagcatcaagaaaggcgtgcccggcggtcccgatgatgacaacgatggctatatccagtcaatgaattctccgcttaacacctacatcttgcgtttggccgatgtttatctcacctatgccgaagcttgtctcggcaacaatgaagaattgaccggcggccccggtctggaagcattgaatcttgtccgcgaccgtgcctgtattccacgtaagaaaagcatcacctttgaagacattatccgtgaacgtcgcgtcgaattttctatggagtattgcaactggtatgacatggtgtcgtggtatcattggagacccgactacatgctcaattatttccagaaccagcaccgaggttatacagttgacaacattgtgaaagatgaggacggctatctgcacttcggtaaatacgacggtgatgtcttcctcgaaggtgtggaaaattggcaggaaccgggcgaaaatgtcgaaattacccacaacaacatcatgatgccctatccggaaagcgacatcatccagaacccgctgctgaatgaagaaccggtagcctatgagttcagtgaataagtcaaacgatacattcattatctaattttactattataacatgaaacatatccattttcccttaaaattgctgaccattatgctggcatgcaatctcttcaccgcttgtaacgacgatgaaggcggcggtatccccgtcatccaccacattcgcctgacagaccccgagaaagccgacagtacctttactgacgtaaatccaggtaccatgattgtggctatcggtgaaaacttgaacggtgtgaaaaaagtattcatcaatcaacaagaagtttcattcaacagtaactacagcacatctaccaatctcatcctcaccattcccgcagatttaccgctggttggcgccaatcccgatttgaaggatgaactacgtatagaaactacgcacggcacagccatctactcgatgcacgtgctctcgcctgcaccctatattacccgcatcgccactactttccccgtagaggtaggaacaccattacgcgtaataggaggcaatttctacgaaatccagcgtatctacttcaccacagccgaaggtgacattaccgatgctcccgtatcaacagaaataacagaatttacagtaaacaaagatttcagtgaaatttccttcaaggcaccggcaggactgattgatgaaggaagtctggtagtagaatgctatacggcagcggcattcactcccttccgccgtacagctcttccaccgagcatcaacaaggtaagttccatgatgcctatcacgggtactactgttaccgtactgggacagaatttcatggacatcgcctccatcacaatgggcaaccgctccgtagacctctctactgttactataagcgaagccaacgatgtgcttaccttcaccatgccgcgcccaccacaaggcacttgctcactcgccatcaccacaatgggcggcactgccgaagttccgggcttctatcctctggagaatatcgtgctcaactacgatgacatcggttccttctcatggggcggatttgccacagccatcacagccgacggttcggtacccccctacttctccgacgggcaatgctatcagctggccggtgaactttctgcatggaactggtggtggggacaattgcagaacaccgctgtatggaatattgatgccgccttcttgcctgccgctacaccgacttccgaactagctttacagttcgagtgttttgtagcgcaagaatatggcgaaggtcctgtcttccgtatctacctcaaaggaaacgaggcacacaactacacggactatcgtcctatgagcgatttcactggaaagaccgaagtaggccagtggatgcaatgcagcattccgctctctgcactcgtggatgaagctacctggggcaaattccaaagccggagtggcgaagagctggcactccagatgaccaaccccagcggtaatggtccatacaacatcgaaatgtattttgataatttccgaattgtcaagatacaataattcaataaattgaattcagacacagaattaacataaagtgacaccgctcttttaaacttttagacgctgattcagctgaatcagcgtctaaaaaatgaatacaccgcaattattaaagagaaaatcaatgaatatcatggtacaaatcttcaaggaaaccctattgaccagcctgattctgtttctgatgacggcttgctctgacgataaaaaagaactgaaaatcatcgtagagcctacttccttccattttgaacaaacgggtggtagcaagaaattcggtatcacccccaatgaaccagccactttccaaagttcggaagcatggtgcaaagtaacctcggaaagcagcactcccgtacaggcaatctataacataaccgtagaacccaacactacgcccgacgtgcgcaacgccatcatcaccgtcagcgtaaaggagcatgtacaagaaatcaacgtggagcaggcggcctatatccaaagcgatgaaccggaaaaatacactgtacgcgagaatctcacaacccaccaactgattaacgaaatgggactgggcatcaacctaggcaacacgctggatgccgtgggcgactggatagacccaagcaacattctcaattacgaacaagcatggggaagccctattatcacacaagaaatcattgaaggatatgccaaagcgggctactcatctctgcgcataccggtcagctggggcaatctgctgtccgacgacttcaaagtgcatcctgacctgatggaccgcgtagagaaaatcctaaactggaccctcgactgtggcatggtggctatcatcaatatccaccacgaaaacgaatggattaaacaagtacccaccgacagcaaagcaaaagaaaaattcacttccatctggaaacagatatgtgaacgcttcgaaaagtacggtgaccacttactgttcgagccaatgaatgaaatcggatacgatgagatttggactccgtggagcggtagtgaagccgacaaggcaaaggcactgggatacgtgaacgacctcaaccagctctttgtcgacatagtaagaaacagtggcggcaacaacgccaaacgtcatctgttggtggaaatctacaacaccaacttggagtatgcttacgaccccttgttcaagatgccgaatgatcccgcaaaccgacttgctcttacagtgcattactatactcccgcaaactttgccatactgggtggaggcgaggttgtcgattggggtgtaggccgggaaagctggggaacggaagctgacttcaaggaactgaacgacaatatggacctactgaagaagaattgcgtagacaaaggaatccccgtcatcataggcgaatattgcgccgactccagaaacagaacaaaggaagtgataagactcttctgtgtttccgtaaccgaagccatctactcgcgcggcatgtgcccaatgctatgggacactccggggggacaatacaaccgacagacttgccagttcgacgaccctctcttcttagaagaaatgatggctattccggttaaatatccacggaattaaacaaatattcataatcaataatcaaataaaaatgaacagaatcagcacttgtttcgccagcctattgctttcttgtgcattgacggcacaagcacagcaatatcaactgaattcaccggacggaaaactaattgtcaacatcgaagccggacaaaccctcaactgggcgattgcccacgacggtaccaccgttcttttgccttcagacattgccatgcaatgcaccgaagctgagggaaagcccattgctttcaccttcggcaaaaatgtgaaggtgaccaaagctacccgtacttccgtcgacacttccttccccactcctttctacaaaaaggcgaatgtgaaggacacttataaccaactcacgctgaaatgccgtaacggctatagcatacagttccgcgcctacgacgacggagccgcctatcgttttgtttccgaactgcgcaaacctttctgcgtgaaggacgagattgccgagttcaacttcgaccgcgattaccacgctttcgtgccctatattaacgacaatcgcgccggcgagcgttactgctactccttcgagtcctactacgatgaggcccccctctctcgcatgtacaaagactcgcttgccattactccgctgatggtagaactggagaacggaaagaaagccgtcattatggaagccggattgtccaactatcccggcatgttcctcactgccaacccacagatgccccacggagtgaaggcagaattcgccccctatccacaggaaacagtcatcggaggctatgaccgcttgaacctcgtccctaccaaacgtgccgacgttatcagcaagcccaacaatgccccctacttctgccccaacgggcgtcccacagggaaacagacctatccttggcgtgccgtgcttgttgttacccacgacacacaactcgccaacaacgacatgatgcaacgcctcgcacccgaatgccgcatcgctgacacatcctggattaaacccggaaaagtggcatgggactggtggaatacttgtaacctgaccggcgtggacttcaaggcaggcatgaatacgcccacctataagaaatacatcgactttgccgccgaaaaccagctggagtatatcatcatcgacgaaggttggagcggaaaggaatcattaatggaagacatcagtcccgaaatcaatctcgaagaactggtggcatacggcaaccaaaagggcataggcatcatcctctgggcaagctggcgcaatcttacgggaggaggcgacatctcccctgccgtggaacaagttatcagccactacgcacaaatgggaatcaaaggtttcaaaattgacttcttcgaccgcgacgatcaaatcgccatctcttctaccgaacagctcgcagcatgcgccgccaaacatcacatgttgcttgacctacacggactgaaaccctttggtatccagcgcgcctatcccaacatcctcaactttgaaggtgtgaaaggactggaaaacagcaagtgggagcccatcgtgaacggtgcgcccttgcatgactttccacgctacgacgttaccgctccctatctgcgccaactcgtcggtccgatggactatacgccgggagctatggtaaatgccacccgttccttgttccgctccgtcaacgatcaccccatgagccaaggtacgcgtgtacaccagatggctatgtacaccgtcttcgaggcacccttgcagatgcttgccgacagtcccagcaaatacataaaggaacaggaatgcaccgacttcatcgccaaggttcccactaccttcgacgaaaccattgcccttgatggtaaaatagccgaatacatcacgatagcacgccgcaaaggaaacacttggtttgtaggcagcatgaccaactggactccgcgcagctgcaccatcgacctctccttcctcggcgaaggaaactatgaagctgaaatctttgccgacggcgtcaatgccgaccgtgaagctaccgactataaaaaagaagtacgcatcgtcactgccaaagacaaactcaatgtacaactggcacccggcggtggatggacagcacgaattacaaaaaaatgaatctgagaaaactgtttctgccattgtgttcagtagccttgtgcctgcaatcctatgcacaagacaaatccttccttaaggatatgctctggtatatagacaacccttctgtatttgaaaaaggacaagaggaaggacacgcttggcatatgcccgaaaagagcatgctactgaatgggacatggaagtttttctggtgcgatacaccggaagggatacttgcacacttttttaaccccgaattcccggataagcaatggggcgacatcaaagttccctcaaactgggaaatgcaaggttatggtgacaagctgttcagaaatgtatctgctcccttcggggtgaatccaccacatgctcccaaagagtataaccctaccggactataccggcgaacattcaaggtacctgcaagttgggcagcaaaagaccagatatttttaaggttcgagaaagtggcatccgcttcttttgtatgggtcaacggtcatgaagtgggctacaatgaaggagcacaagaacctgccgaatacaacatcactccttatttgaagccgggcgaaaacacgctggctgtctgtgtactaaagtattcggacggctattacctggaaggacaagattattggcgactggccggaatctttgacgacgtatggttgtacgccacacctgctgtcaggatattcgactggcaagtaatcacagagtttgataatacgtataccgattcgcagttaagtattcaggtaaaaatcaaggactaccaaaagaagccaaatgagaattatggattgaaagcttacttaaaggataaaaacggcaagattatctgtaacttttccgcagctccatttgaaatggacgctgcggaaaagacaatacagttgcataccttggtacaagaaccccggaaatggacagccgagacacccgagctttatacgctcggtctggaattatccaatccggccggtctgcagaaagacaagatagaaacggtcatcggattcaaaaagacggaaatcaaagacggtgttttttatcttaacggtatcccactgaaagtcaatgcacaaaattcgcacatgcagcatcccgaagagggacatgtcatggacgaagccaccatacgcaaggattttgaattgttgaaacagtttaatttcaatgccgtacgtacctctcactatcctccggtgaataagtatttggaactggccaatgaatacgggctttatatcatagacgaggtgggcgatgaagcccatgcctcggaatggatttcaagtctcccggaatacgaagagatgtatcgcaagcgatgccgcagaatggtgttacgggacagaaaccatccctgcgtcttgttctggagcgcaggaaacgaaagcggtgaaggtatcaacattacccacaccattgaagaagggaaatcgctggaccccacccgcttctggatgtatggcggaaatgcattctcccatccggcagaagatattatcggaccccgttaccctactcctatggaactggaaatgcaggtaggcataggagaggattcccgaccatcgtttatggatgaatacttatcggttgcaggcaatgccggcggtgccctggacgattattgggaagccatctaccgacatccccgcctgatgggaggggccatctgggattttgtaagtccgggactgaccgaacggataaggcaagtggacgacctttcgcccttccatactcccgcccatctgatgggaaatgcccgcttagtgaaggaaggaaagaacacggtgctggacttgaacggtcacgaccaatgggtagaggtctatcgtgcagacaatgtggagttgaacagtaatgaactgacactcacttgcagaatctacccccggaaactagtaagcagttgcggctcattcatcacaaaaggcaattatcagttcgggctgcaacaacgcggtaaagacaaactggaattttatatctatactgataaaaagcattccgtatgcgcctccttgcctactgactgggaatacaactggcatcaagtgacgtgcgtctacgacggacagaaaatgtccatctatatagacggagcagaaaaggcctccacacaagcatcgggcaatatccggaacttcccctaccccgtcaacatcggtcggaatgcagaaacacacggccaagagacttcggtctacatctgcgatgctcaaatggacgaagtcggcattttcgccaaggcactgacttcctcttttcacccggaagaagccgctctgtggctagattttgagcaagagacggaaaatggtacattctacagttacggcatcggtgcacgtacgtacggcagcatctggcccgaccgtagcgtacagcccgaaatgtggcaaatgaagaaaaccggacaacctctttctttttccatgtcggatgtgacagagggagtcgttgagttatggaatcgcaatcattatacaaatgcttcccgatatgccatacgatgggaattgaaagaagatgacaaggttattcaatcgggcgacttggcactctcaacagcgccgcttagccaagagctggtgcacataccttataagaagccagccctgattcccggcaaagaataccgcctgatgcttcatgccgtcctgaaaaaagatgaattgtgggcaaaagccggacatgaggtggcatgggaagaacttgaactgccttggagcctgccatgctcttcggaagaaaaggctcaaggcgtaccttcctattcactttcggagaaagaattggttgtctccggagatggcttcaaatatgtattcaaccgtaccgacggacaactgacgtcgatggttattcaagatatggaactgctggaatcaccgctccggctgaatctttggcgtgccccgctggccaatgagctggacaactggaatgcctccagcgcccgctcctccaactggaaagaaggttacggatacacggtagccacagaaatgtattctgcagggattgaccgcctgacacatcagcccctctctttttcggtgtccgaaaccaccgaaggcgtacatatacacatcattgatgcggaattgatgggcaaaggagaaaaagagaaaaaagacctctacatcgaaggaatacagaacaacggcatcatcaaccactatgagtatattatcaatagtgaagggacgatagagatacgccatgtattgaagcctgaagggaaaatgccgctttggtttcctcgcataggacttacgctgaccgtaagcgatgcgctcgaccaagtgaaatggtacggccgaggaccgcaagagaactatccggaccggaaaaccggctatccgacggggatatatgcctctaccgtacaagctatgtacgagccctatctaatgccacaagattacggattgcggacagatgtacgctggctgcaactgaccacggacaaaggcatcggccttcaattcaagatgaacgaatggttcaacttcaacatttatccgtacagcacagacaatctgacgaaagcgatgtatacctaccaattgcagaagcagaaaggcatgaccctgaatctcgattatgccactaccggggtcggctgtacggcccgcggtgtattcggtgcttacaaggcgatgccgcaggaatatcggagaaccatcagcataagacctatgatgaaataaaaatattgtatcggactggtaagattatgaaaaacaaaaattactttattctattagtgttgtttttaagcgctttacaaataaaagcgcagtattcattcgacaacgtgctttatggtgcagcctactatcatgaatatatgccctatgagcgactggatgaagatatccggctgatgaaaagagccggcctgacagtagtgcgcgttggagaatctgcctggggagtatttgagccgcaagaaggaaattttgaatttgaatggatggaccgcattctggacaagatgcatgcagcaggaatcaaagtcatcttgggaactcccacctattccattcctgcatggctggcatacaaacacccggaagtgctggcagaacacgccaaaggaaacaaagcctattatggaatcagacagaacatggattttacaaacccgacctaccaattctattgcgaacggattatccgcaagatgctggaaagatatgcacagcatccggcagtcatcgggtatcaagtggacaacgaaacagaagcgcgcggagtaaacaacagagactatttcttcggattcaggaactacatcaaacagaaattcaacaatgacctgaatctgcttgccaaggaatggggaatgaactactggggaatgaacatcaacacctgggaagagttctatccgcgcgatggagtgacaagcccctcgtacaagaatgaatgggaacgctataaccggaaggaagtggccgattttctgaattggcagtgcgaccttgtaaatgaatacaagcgtaaagaccaatttgtcacccactgctttatgcccgacttccataatatagaccaagtggaaagtttcaggcagatgcaatatcctgccatcaatgtctatcacgatgtacaggataaacaagacggccagcgcatcgcttatgccggtgacttcgtgcgcaccgtggccgacaacaattacatcgtcatggaaaccaacgcacaaggcatcggctgggatgcccgcacccagtttcctccctacgacaaccagttgcggcagaatgtgtacgcacattatgcttccggagccaatatggtggaatactggcactggtctaccctgcactacgggcaggagacatactggcgaggcgtgctgggccatgacctccagcccaaccgcatatacaaggaattcaccaccaccgccaaagagttggaaagaataggcagccacatcgtgaacttgaaaaagaaaaaccgggcagctatcctctacagtcatgattcttatcatgctctcggcttcatgccctacacttacaagagcaattatcccattgatatggtgcataaagccctctatttccaaaacatagaaacggacatcatcccttgtgacaagacaaccgatttcagcggatatgacatgcttgtcattccccctttgtatgtggctaccgaccaattgctattagccattgatgaattcgtacagtccggcggacacgtggtaatgatgcacaaaagcggttactgcaatgagcactccgcagttcgggccaccttggctcccgggccgctacgcaaagcctgcggcttccattaccaggaattctccactatcggtgacttatcattaaaggataacccctttcaattagagggaaagaaccagataagcgactggtatgaattcctgattcccgagacagccaccccgttggcttatgcagagcatccgttcttcggcaaatggcccgttgtcaccgaaaacaagtatggcaaaggcaaactgacctacataggagcctacccttcgcaggaattgctgaatgccatcgtgcgaaaggcagccatccatgccggtatcatctcttcagagagcgacgtgttccccatcatacagcgttcgggaataaacaaagccggaaaagccatccgttacttcttcaattacagcagcgagagcaaagaaatcactcataactatccgacgtccaaagagctgatttccggcaagactgtaaaagaaggagaccatgtaacattgcccccctggggagttctcatcatggaagtttattgaccatcagaaaacatgagaaaaaatgagaaaaaagatatttgcctttctattgctaagtgccctatatgccggcgcccaagaagttccggactgggagaatcctattgtagtcggcatcaacaaagagccgtatcatgccacactgacattgccttcgcaaaaagccgattgcaaagaaatcatatccctgaacggcaagtggcgattccaatggtctgccgacccgggaaagcgcccggccgacttctacaagaatgatttcaataccgacacatgggataccatcatagtaccgggagcatggcaattgcaaggttatgggaaacctatctattccaacgtaaactatcccttccagaaggatgcacccaaagtgacaagcgagcctcccgccgaatattacagttacgggcacagaaatcccacaggctcttatgtcaccacgttcgaagtgacgctcgatatgaaagacaagtgcctataccttcactttgaaggagtaaaatcggccatgtatgtctgggtaaacggagagcgggtaggctacagccagaattcgatgtcgcctgccgagtttgacataaccgaatttgtgaagaacggaaccaatcgtctggcagtggaagtgtatcggtggtcggacggcagttatctggaagaccaggacatgtggcggcttagtggaatactcaggccggtagagctatgggtacgtccccggacaaatatccgggactataggttcagcagcgacttgtcggacgacatgcgttcagctacattcggaaccgaaatttggataagaaaccagaccgaccgcaaagtaaaagacctgaccgtagaaataaacctggtggggaaagacaatagaggaaataaactcgacaaaaaaatggtggctcccgtaggtactattcaggccttttctgaaacgagcgtcacactgtccgaaatgctccgggagcctcaactatggtctgccgaaaaaccgcatctatatgacatccacatcaagcttcgcaggaagaatgaacttttggaatcgttcgaataccattggggcatacggaaaatagaaatcgcgggagacgtcttcaaagtcaacgggaaagccgtcaagctgaaaggagtgaaccgtcacgatttccatccccgtatgggattctttgtcgacagccggacgatggagagagatatccggctgattaaacaagccaacatcaacatgatacgcacgtcccactatccacatctgccattgctgtacgagctatgtgacaagtatggaatctacgtaatggacgaagcgaaccacgaaagtcatgcctacggcttggggaacaaagtattaggggacaacccgcaatggacactggcccatgtggacagagcagcggccgtggtggaaagggacaagaaccatccgtgcatcctgttctggtcattgggcaacgagggcggaagcggtgccaatttgcgagccatggcagacacagtccgcgccttagattccaccaggccgatatacgacgatacagaccgcaccgtatccgacgtctatgacgaagcctatctgcatcccgacgctttgaaggaacttggcgagaaaataaccgaccgccccgtattcatgagagagtatgcctacgccatgggaaattccatcggcaacctcaaggagtattgggatgtgattgaaaaagacgagagtatcatcggagctgccatttggtgctgggtagaccaaggcattcctaaaaagcttaacggtgcaccgttaagtttcggcgagagcccctcgtcactcccattactgcctgatgaattctgggcgtatggaggagatttcggggactatcccaacgacggtcccaccggcattaacgggctggtatctcccgaccgggtgcctcacccccactactatgaggtacaaaaagtatatcaatacatcaagtttgaaaagaagggaacgcggcaaatcaaattgaccaacgggtatgcgttttccgatttggatgagttcgattacagctatgagtggatatgtaacggaaaggcagtaagcagcggcgacctccagttgtccgaagggaatctgctggaggtaccttcaagaccggataagtgtggggaactttgcctcaatgtatatgccacgttgaaggaatccacgacgtgggcagagaagggcttcaaagttgccaaggaacaacttacgtatcatgactatgaattcccacaattgaaggatgacggcgggaaggccacgtttaaggagacacccgaagcggtggaaattatagccgccgatgccttgttcaccatagaaaaaggtaccggtgctttggtgagttggcgagtcaagggagaagagttgttgtacagtgccttggaaccctatttttggaaaccggcaaatgacattcaggtccgcaacggctacaatgaacgtttgagcgcttggaaaaatgcagagcaaaaacgtatcgtaaaggcataccaagcaaccgtaaacgatggtatggtgatagtggatgccagtctctccctcccccggataggagccggttaccatctccgctacactgtggacggcaaaggccgcatacaagtagaagcaacctatcagcctgaaaaggaagatattccgctgatgcccaaattcggtatgcgcatgagaatgccctcggcgctgaatcggatagcctggtacggacgcggcaagttcgagaactatcccgaccgcaagagctccgctttcctgggagtctacgagtgtggcatacacgaatttatcacgaactacatcgtaccgcaagacaatgccaaccggtgcgatacacgctggttcatgctgggagacagtgagcgatggaaaatacaagtcaaaggcctgcaacccctatgtttccgtatatggccctacggggaagaagacctggaagggaaagaacatgcgcacgaactgcccgaacgcgacttcatcaacctgaatatcgactccaacatacacggagtaggtggaaacgacggatggggcgcacagaccatgaagccatacaccattgacggcaatcgctcctaccgatatgggtttatcatggagtatatggacaaaacagaataatccgttcatcaatgtattcaaaaaggaaataaacattttgtaaacaacaataaaggtatgaaaagaaacatctttaaaacaattctcctatctgcctgcatcctgcaagggggcagtgcattggcacaacaagagaaagcagaaccgggcaagttctcacccacctgggagtcattgtcccaatacgaagtgcccgaatggttccgcaacgccaaattcggcatatgggcacactggggtccgcaatgccaacccgaagccggcgactggtacggtcgtggcatgtacgaagagggcggtgctgcctacaagtggcacttggagcattacggacatccttcggaattcggcttcaaggatgtaatcaacgaatggaaagccgagaaatggaatccggagaggctggtagcccttttcaagaaaaccggtgcccgatatttctttgccatgggtaatcatcacgacaacatggacttgtgggatagtaaataccaatcatggaactccgtcaacatgggccccaagcgaaacgtactgggcgaatgggagaaagcggcccgcaaaaacaaactgcccttcggtgtcagcatccactcctcccatgcttggacatggtatgaaactgcacaaggagccgacaagaaaggcccatacgcaggaatctcctacgatgcccgcgtagtgactaaggaagacggcaagggaaaatggtgggaaggctacgacccgcaagagctatacgtacagaatcatgccctgagcggacatgcttgggtggcatgggactggcccgaaggaacctctgtccccccgcagagttactacgacaacttcttcgaccgcacagtggacatgataaacaaatatcatcccgacctggtctatttcgatgacagcgtactccccttctggcccatcaacgatacggggctgaaagtcgtgtcgcactactataaccagaacatgaagcttcacaagggcaatctcaatgctgtagtcttcggaaagaagctggaagctaaacataaagaggccatcgtatgggatgtagaaaaaggggttccatcggaatgccaggacaaggcgtggcaaacctgtagttgcctcggtacttggcactataaccgctctgcttacgaagacaactggtataaatcagccgggaccgtcatccacatgctcattgacatcgtcagtaaaaatggcaacctattactaagcgtaccaatgaaaggaaacggcaccatcgacgacaaggaagaaaaaattctggaagacatagccgcctggatggaggtgaacggagaaggaatattcgacacacgtccctggtgtatttatggtgaaggtccctccacagaaacagcaatacctttggacggagcaggattcaacgaaggcaagaacgcaccctacacttctgccgacatccggtttgtgaaaaaagggaaatacttgtatgcccatatcatgaaatggccctcagacggaaaaatacagataaaatcactggctaccggcagtccctactgcaaaggagaaatcgaaaaggtagaattattaggaggcggaaaggcaaagttcagaagaacttccaaaggcttgcttattgaccttcccaaagacaagacacccaatcctatttctttggtactgaaaatcactaaccgttaaactgctgatattgtatgaaaaagggattttttttaagattatttgtcctgctgatgctgacatttttcatagcagaacaaggcagagcacaaacctaccaacgcacctcacaaggcataaaaagcactgtgcaaggtataaatatagatattagcttcttctctcctgtcacagtgagaatcttaaaatcgcctgacggctggaagtataccaaagaaagcttgtcggtcatcgggcaaccggaaaaagtaaaactatccgtctcttcgaaagggggcatattgactatcaaaagccatcagcttacagtccatctcaacgaagagaccggacaaataacttttgcctcttccgatggaaaatcgctgttgcaagaacaaaataaaggtgcacgttttgatgatttcaacgatgccggcacaaaaaccttcagcgtttatcaatcgttcaccttagagaaagacgaagctatttatggattgggacaattgcaaaacggcaaaatgtcgcaacgtaaccagaccaaacgccttatccaagacaatcttgaagatgtgattcccttcttccagtccgtcaaaggctacggtctcttttgggacaactattcgccaaccatcttcaaagacaatcaagaagagacatccttcctttctgaagtcggcgactgcattgactactatttcatgtacggcgaaaatgccgatggagtagttgcccagatgcgctacctcacaggacaagtgcccatgtttccattatggacatatggattctggcaaagccgtgaacgctacaaaagccaaaaagagattgttggcgtagtgcaaaaataccgcgaactgggtgtgcccctcgatggaattatccaggattggagatactggggaagcaactacctgtggaacgcaatggattttttgaacgaagaattctccgacccccaaaaaatgatggaagacatacacggaatgaacgcccacattattatctccatttggtcagctttcggaccacataccaaaccctatcgcgagttagacaaagggaacatgctcttcaacttccgcacatggcccgaatccggttccgagaagtggcctcccaatatggactatccatccggtgcccgcgtgtacgatgcctaccatccgcaagcacgcgacatctattggaagtacctgaacgagaacctacgttctgtgggtatagacggctggtggatggactctaccgaacccgaccattttcaccccattcctgaagattttgacacgcccacctatttggggtcattccgtaaagtacgcaatgcctaccctttaatgagtgtaggtggagtgtacgaccaccagcgtgccgtaacttcagataaacgcgtatttatccttacccgctcagcctttgccggccagcaacgttatggtgccaatacatggacaggagatatcacagcatcatgggaagttttggagaagcaaatacctgcgggattaaacttctcactatgtggcattccccattggaacagcgatatcggcggattcttcctatggcaatatcccttgatgctggatgacccggattatcgcgagctttatgcccgttggatacagttcggtacattctgtcccatgatgcggtcacatggggaaggtgctcccagagaaatctatcaattcggcaaaaaaggcgagccaatatacgatgcgattgagaaatacattcggttacgctacagtttgttaccatacatctacacaactgcctgggaggtaactgccaatcagtccagcttcatgcgtgccttggcaatggattttgcccacgatcgcaacgtgtggaacatccacaatcagtatatgtttggcaaatccctattggtatgccctgtaacccaacccatgtatacccaaacagtttcggacaccatccgtgtagaagatttcagtaccgttaagtctatacgaatatatctgcctaaaaatacggaatggtatgatttttggaccaatcagaaacactccggcggacaatatatcgtgaaagatacccctattgacattttaccactttatgtgaaagcaggttccatcctgccaataggtcccgaagtgcagtatagcaccgaaaaatcatgggacaacttggagataaaagtgtatcccggttgtaacggcgaattcacactttacgaagacgagaatgacaactacaattatgaaaaaggaatgtacagcaccattacgatgaaatggaatgaccgtactcgcatgctcactattgaaaatcggaaaggagagttttccggtatgttgaaagaacggaaattcaacatagtaactgctgatggcgcaaaaaaggcagtggcttataatgggaaaaaagtaacggttaaaatgtaatggtttctaaaaacagctattaatttgcattatggaaataaatactcgtatgaaaaaataccatcattatcttacccttttaagtttatttatgctgctcggcatcctgaaattgcaagcagcgatacaactccctgccatattttccaaccatatggtgctacaacgtaactcagaacttactttctggggatggggtattccgggagaaacaatttccatcgcccccgaatggatgaaaggagaaataatcaaaacccaagtcaataatacggggaaatggtcagcccgtgtaccttccggcgaagccggcggaccttatgagattcgtttcagcggctcgtcagaagtaaccttgaccgatgtcatgctaggcgaagtttggctgtgcagcggacaatccaatatggaatggagcgccaaccacggcataaagaacggagacgaggaaacggcaaatgcccattgtcccaatctccgaatttttcacgtggccagaatagccgccccgttccctcaagaaaactgtttctcgcaatggacacagtgcacgcccgaaacgatgcgcagcacgagtgccctggcctacttcttcggccgcaacatccaggaagagctggacgtgccggtaggaatcatcgtagccgcatggggcggaaccaccgccgagacatggacgccccgcgaatgcgtaatgagcgacccggtcttgtgcgactatccgtatgaatccaatccttggtttccggctgaaacaggcacgttgtacaacagcatgatttatcccgtgatgccctacggcattgccggatgcatctggtatcagggagaagccaaccaaggccgtgccagctcctacgcccgggtgatgcagcggctgataggctcgtggcgtaccggatttaacaaggaattcccattctatctggtccagatagcccccttccaataccactccaaagacaacggaccggcactgctacgcgagcagcaggccatgttgcccgaaatgctggacaaggtcaagatgattaccgtgtcagatttggtggacaatgtgcaggacatccatccacgtgacaaaagaagcgtaggcaaacgtctcgccaatcttgcactggacgatacataccatatatatgtaggcccctataaaagcccggtctttgaaagcgcctgccgcaaaggcaaccatgtgacaatctctttcaaagacataaagaacggactggccgtacacgggaaaaggatagaggggctgatgatggccgcagccggccaggaatggcaagaggcccgggccaggatagacgggggaaagctgattgtcccggtaaaaggaatcgaaagcccggtttccattcgctactgcttcagtgacgctgctcaaggcaaccttttttcaacggaaggcatccccttagcccccttccgggcagacagcattgcctcttctgaaaacattccggtttctacagacagcgctttggaagaatcttttgaattctcgcccaagttctctaccggcaatgccaatccccttctcgacttccaatacatggccgaccccacagcagtggtgcacgacggccgcatttatgtgtacggtactaacgaccaccagcaatatgatgtagtgggccgtaacgggaaaaacacctatcagcacatccattcgctgacgatggtctcttctgacgacatggtgaactggacttatcacggagtaatcaatgtaaaggctctggctccctggggaatggcttcgtgggcaccttccatcgcttcgcgcaaggaggccgacggcaaaacccacttctatctgtactactccaacagcggttccggtgtaggtatgctgactgccacttcccccgtggggccctggacagacccattgggcaaatgtgtggtagacggtaatactccaggactcggcaagtgtaaagctcccttcgatccgggagtagtcatcgacgacaagggcatcggctggctctcctttggcgggggcgacagcgacgactacattcccggagacgcacgcatcgtgcggctggcaaatgacatgaagacgctggacagcgaaatagttgaaataaaagcgccataccactttgaagcaaacgaactgaactatctgaacggcacttggatttacacctacaacaccaactggaagaaccgggatgcatggccccacaaggatatagacaagccgagccggtgctgcatgagctacatgacgagtcgcacgccacttgagacagacagctggacctatcgggacaactacttcaaaaatcccggcgactatggcatgtccgacagcaacaaccatacacatctggtaaaatttcaagggaagtactatctcttctaccactcactgggcttgcaggacagccgcgacctcaaagtgggcgtccgcagtatctgcgtggaagaaatagaggtggacgaaaaggacctcactatccacatgggcacagccacagccaagggcgtttcacaaatcaagcctctcgacccgtttgcgcagcaacaggccgagactacagccgccacacgcggcgttgcctttgaacctaccggacagacaggcaacatgtctgccgtaggaaacaagagcggacaggccatctgtgtccgcggtgcggaattcccgcaatcacctcaagccatacagatgaagataaaagggaaaggctccatcgaaatacacatggacagtccagacggtccgctcctatccaccttgacctttgataccgatacgtggcaaacattgacaaagccgttggacaaacggataaaaggcaaacacgacatttacttcgtattcgggaacggaaagttcttatttgacgaatggaaattcacaaaataatgaatccgtcggcagaatctgcccagtatctcttcacccttgtgatgatatcgctgcacaattcgagccaacacacaacaagccagcaagttactttgccagcgttttgccaccatattggcaaagttttgccatacctttggcaaagctttgccaatgtggtggcaaaaccttgccaacttgtcggcaagaaagacaaaagcaacatcgctgtccgcaaagaggcggaagcacgtcctcaatataattccgctaacgggaaagagacagattggttccattaacgggcagaagttttaaaaaatgggaaggatttggcacaatagttccgcgcaaattctcatttatcgaacaaaaattgtatttttgcctgcaactgaaaaatcagtaatatcatagaatagacaattcccgaacaaatatgagcgaagattttgaagcaccgaaagatgatttggacaaggaactcccggccgggagcgaagaacactcggattacaaacctgcggacgcaaaggatgccaatataaagcaccaactgagcggcatgtaccagaattggtttctggactacgcctcatacgttatattggaacgtgccgtaccccatatcatggatggtctgaaacccgtacagcggcgtatcctccactccatgcgccgcatggaagacgggcgctacaacaaggtggcgaacatcgtaggacataccatgcagttccatccgcacggtgatgcttctatcggcgatgctctggtacaactgggacaaaaggacttgctcgtggattgccagggaaactggggtaacattctgacgggtgacagcgccgctgccccccgttatatcgaagcacgtctctccaagttcgcactggacgtggtattcaaccccaagaccaccgaatggaaactctcttatgacgggcgaaacaaagaaccggttacactaccggtaaaattcccactgctgcttgcacaaggtgtggaaggtattgccgtaggcctgtcatccaaaatattaccacataacttcaatgagctgtgcgatgcttccatcagctatctgcacaacgaagaattcaagctgtaccccgacttccagacgggaggcagtatcgatgtatccaaatacaacgacggtgaacgtggcggtgcgatacgcgtgcgctccaaaatagaaaagatagacaacaagacacttgccattaaggaaattccttacgggaaaacggtggccagtgtatgcgactccatcgtaaaggccagcgaaaaaggaaaaatcaagatacgtaaggtagaggacctaacatccggcagtgtggaaatattagtgcatctagccccgggtgtatcatccgacaagaccatcgatgccctctatgccttcaccgactgtgaagtgagcatctctcccaactgctgtgtcatcgacgaccaaaagccccacttcctcaccgtgagtgatgtattgcgcaaatcagtcgacaacacattggcactgctacgccaggaactggaaatccgtaagggagagatactggaaagcctgcatttcgcttcactcgaaaagatattcattgaagaacgtatttacaaggataaggagtttgaacaagccaaaaacatggatgccgcctgcgaacatatcgatgagcgcctgactccctactacccgacttttatccgcgaagtgaccaaggaagacatcctccggctgatggagataaagatggcacgtatcctcaaattcaactccgacaaggcagaggaactgatagcacgcatgcgaaaggacatagaggagatagactgccatctggcaaacatcgtggaatataccgtcgactggttccgtatgttgaaggacaagtacggcaaagccttcccccgccgcacggaactgcgtaacttcgacaccatcgaagcaaccaaagtcatcgaagccaacgaaaagctgtacatcaaccgcgaagagggtttcatcggaactggattgaagaaagacgaattcataggcaactgctcgcccatagatgacgtgattatcttcttccgcgatggaaaatatatcatcacaccggtggccgacaagaagttcgtgggcaagaatatactttatgccaacatttttaagaagaacgacaaacgtaccatctacaatgtctgctaccgtgacggcaaggaggggacaagctatatcaagcgttttgccgtcacttccgtggtgcgtgaccgcgagtacgacgtgacccaaggcactcccgattcccgcatcacctattttaccgccaatcccaacggtgaagctgaaatcatcaaggtaaccctgaaacccaatccccgtgtacgccgtattatcttcgaggaggatttcagcaacatcaatatcaagggacggcaggccatgggaaatatactcacgaaactccccgtacacaagatagccttgaaacaacgtggaggctccacgctgggcggacggaaagtctggttcgaccgtgatgtgctacgtctcaactacgacgggcgcggagaatatctcggagaattccagagcgaagacaccatccttgtcgtacagaacagcggagagttctatgccaccaacttcgacttgaacaatcactatgacgatggcatacgcgtattggagaaatacgatccgaacaaagtatggactgccgtactctacgatgccgaccagcagaactatccttacatcaagcgtttctgcttcgaggcaaccgcccgcaagcaaaactacttgggagaaaacaagaacagcagcctcattctgctgacagacgagtgctacccgcgtttagaggtggtgtttggcggccacgacaatttccgagagccgatggtggtggaagccgacgaattcatcgccgtgaaaggcttcaaagcaaaaggtaagcgcctgaccacctatactatagaaaccatcaacgagctggagcctacccgtcaaccggaaccctcgcagaaaaccgaagagcaggaaacggatgaagaaccggaaattctggaccccgaccacggtaaaagcgaaggggacatactggacgagatgacaggacagatgaaactcttttgatgaaggacggaaatgaagtattagtggctaacgattactaatttgtaattgataatttaatatgtacatatacaagataataatcctatgcggactgctcttgggaagtgtcggactgaaagcacaagaagcacaatgcagcatcgaccggaagctacgggctgactccaccaaccgtaaccgtattatcacccgtgccaccatgtatggtgtcggcttcaccaacgtgttcgacacttatctttcacctcaggagtataagggaatcgatttccgtatctcccgcgaaagcatgcggatgacacggttgatggacggcaacgtgtctctgcaaactttcttccaggcagacttgggatatacacacaacaaagtagacaataacaatacattctccggactggccaactggaactacggcctgcattataattttccaatcacgggcaatttcaaactgcttgccggaggagtcggcgacttcaacggtggctttgtctataatctgcgcaacggaaacaaccccgcccaagcacgtgcctatatcaaccttgccgcatcgggaatggctatttgggacttgcgcatcaagaaccgtcccatcacactacgctatcaggtaaatcttcccttggcaggtatcatgttcatgcccaactatggacagtcctactacgagatatttacgttaggacattgggacggagtagtgaacttcacctccctgcacaaccagccctctctgagacaaatgctgaccgcagactttccggtgggacgtgcccggatgcgtttcgcttacatatgggacgcacaacagtccaaagtaaatgaaataaagacacatacttactcgcacgtattcatggtggggttcgtaaaggaactctatctgtttcctaacaagagaaagtaaaaagtgacaaggtgataaacgataagatgataaggataatgtgcatgaaaagaagatatattttaataatttggagtatcctactcacgttattgcccctattgaacggatgtattcgtgaggaagagttcgacaataccccacaaggcaatttcgaagccttgtggaaaataataaacgaacagtactgcttcctggactacaagcaaatagactgggatgccatccatgacaagtaccagccactcattaccccgggaatgagttacgacggtctatttgaaatattaggtaacatgcttgccgagttaaaagacggacatgtcaacttgtactcttcttccaacatggcgcgctactgggactggtatctggattatcctcgtaacttcaacgaaagtatcattgaaaagtacctgggaagagactaccgcattgctggaggcgccaaatataccatattggaggacaacataggatatatctattacggtgatttctccagcggcatcggaaacggcaacctggatgagattctgttatacctttccgcttgtaacggcctgattatcgacgtgcgcaacaatggtggcggcaacctgacaaacgccacccgaatggcacaacgcttcacgaatgaaaaagtactgacgggatatattcagcacaagaccggcaaaggccatagcgatttttcagatccgactcccatttatgtggaaccttccaacagtatccgctggcaaaaaaaggtaattgtcctgaccaaccgtcattcctatagtgcaaccaatgattttgtcaactccatgcgctgttttcccaatgtcaccctggttggtgacaaaaccggcggcgggtcgggcctgccattctcttcggaactgcccaacggatggggggtacgcttttctgccagcccgcacctcgatgcccaaaaacagcatatcgagttcggcatcgacccggacaagaaagtggatatgagcaaagaagatgagaacaatgacttggacaccatcattgaggaagcaagaaaaatactgaaagtgactttctaaaacgactttatctacaaaacaatttgccaaaacgaaaattctttctatctttgctcccgctaatcggaattattccgcggatgtggcgtaattggcagccgcgccagacttaggatctggtgccgtgaggcgtgtaggttcgagtcctatcatccgcacaatccctataataaatttcaaaagacaaacaactaagaggggaggatattcattaagaagcatcctccctaaccgcttcaagtaccttttttatctcatcaaaacacaatatttagaatacttattgtatctttgcttccaagaaacacttcgattaacctgaaaaaatgaaacaaaatacgataagaccgatgcttttcaagtattgggtagtgtgccttctattgttcatcctcttcatccaggccagggcttcttccttcatgcccgccgtcaccaactatcttgccaaagactatgaagccggttatcagaactgggcatgtgcgcaaggcagcaacggcgaaatgtatttcggcaacagccaggggctcctggtatatgacggttatcgctggactctccacaaagtgccggggaaccatattgtccgttcggtgtatgtgaaagaagaccgtatctatgtgggggcattcgaggaattcggctatttcaagtattcggaggcaggcactctccggtaccattctttgagcaaattcctgaaaaatttccccatggagaacaacgagatatggaacattgtagagctggacggccgcatctacttccagtcgttcagcgcctggttctcctacgacgggaagatggtacacgctttccgcaacagacagcaacagccgctctacttctacacccaaaacggacatatctacacacagatgattgatgaggacttctatgaattcgacggcaaggatttccttcatctcttcccccgcagccaagtgaacgatgacaatgtagtggcattactgcccgacggggacgacagcttcctgatggtcacagagaataacggattgttccgctacaacggtgacatcaccccctggaaaacagacattgatgcagagctgaagaaacagcgggtgaaccgcgccgtcatgaccaatgattccatattcatgataggtacagtcttgaatggcatatacgccatcgaccgcaaaggacattgcctctggcacttcaatctggataaccgtctggacaacaacacagtcctgggcttgttctgtgacaaagacaacaacgtatgggcagcattggacgacggcatcgcatacatccaccacaactcacccgtcatgctgctgactcctgccaaccatgaaaccaaactgggcatggtgtacgacatagcccaccggggcgactgtttctatctggccaccaaccagggcttgtacgaataccaccaggttaccgagaatctgcgcctgcttccccatactgaaggacagaactggtatgtgaaggacattgacgggcaactctttgcaggcaacaatgcccataccttattaataggcgaaaaagggaatgtttccgtcataagcaataccaacagcagtacgtgtctgataaagtgcaccctctatggcgaagagatactgttggaatcatcctacgccaatttgcgtatctataaaaagaagaacgggcaatggaccttttcgcatgtcatagacggcttcattgcaccggtcatgcacttggaggtggaccaaagcggtgtcatctgggcttcacacatgtatcagggagtctataaaatagtcttgagcgatgacttgtcggctgtaaaaagcgtacggcacatctcccatttaggctcggaatatatcatcggccctatccaagtaatgaaaatgcgaggacgtatcgtcttttccagtcccaacggcttctatacctatgacgacatcacccggcagattatccccttccaaaagctgaatgccattctgccttacatcaggaatgctcattctgtggtatccgtcacgaacgaccgcttctggctgtccggttcacatgagtacgtactggtagagtacgcagaaggagagtacatcgtgaagcagcgcatcctcatcgaactgtttgattctccatgcatagagaactacaacaatgtgttcgtcgacaatgacgttgtctattttaatctgaacaacggaatcgccagttacagcaaaaacacagacagcctcagtcctactctggagtccgccctctcactgagctcggtcactgcttcctcttccgataaaaaggagaaacgcctgcctctgtctggaaatgtcgaactggaaagcaattaccgggatttgctgttctcagtaagcctgccgcattacaataaattgtccgtacatttccattatgtcctgcaaggaggacaaggcatggcgctgacatcggacctgaaagagcccgaaatccgctacggtagcctggattacggagaatacacattccaggcagaagcctataatgatttgggacagaaaatcggtgaggtggaatatcattttgccatagcccgccctttctacctctcctattatgcctttgcgctctatctcatagttctcacagcgcttgtctactttttctccaagtggcgcgccaaccgtgccatggaaaagaaacggaaggagtatgaggcagagcaggtgcagcagaacatcaagatgcgcgagcaggagcatctgataactctgcagcaacagcaattgctggaagccgagttgtcggcaaagagtaaagaccttgccagcatggcactgggtgtatttgccaagaacgaggtcctggagaaacttcgtactgtcgtacaagagtccctggtgaaagggcaatatggacgcaagaacctcgaatctctgctgaagctcatcaacgaaaacatcgagacacaggaattttgggatgtattccagaacaatttcgacctgattcatgagaaattcttccgtaatttgcgcgaacgttatcccagtcttaccgctaccgacctccgtttttgtgcgctgctgcgcctgaatctttctacgaaagacattgcgcaaatgaccaacctcactatccggggagtagaggcagcacgctaccgtttgcgcaagaaactggatatccccgacggaacgggattagtggattttctcatcgacttgaaataaagcggctacaaatcattcaatcacaacaaactgattattagaaacaagtaacacgaaaacgtagtaaaacggtacccatttttaccctaaacgtattatcgtggtagtgtttttttttgccttacttaccgtaattacttcctttgccggcagaattattaactcttaaatttagtttatgagaaggcaaactttatttcttctattcatgattttgttctcattgccactgacagttttggcacaaggaacaaagacagttaaaggaactgttgttgatcagaacaacgaaccgattattggagccacggttgtagtaaaaggctctactattggagcagctaccgacctcgacggtaactatgtactgaacggcgtccccgaagacgcaactctcgtattcaactatttgggcatgttgccgcaggaaataagcgctgcgggacaatccgtcattaatgtaaagctacgtgaagatgcacaactactggaagaagttgttgttatcggttacggttcggccaaggcgaaagacctgacggccccgattgacgttgtcaaagagaaagaacttatcaatgttcctacctcctccccgatggcagcattgcagggaaaggtaccgggtgttaacatcatcaattcgggaacgccgggcgaaggtcctaaagtgaccatccgtggtatgggttccttcggtgacacctctcctctctatgtagtggacggaatgttctacgacaacatcaacttcctgaacaattccgacattcaggacatgaccatcttgaaagacgcatccgcatctgccatctacggtgtacgcgccgccaacggtgttgtaatcatcaccaccaagaaaggaagccgcaaccaggatgccaagattacctataacggttatgtaggtattcagaaagccaccaacctgctggagatgtgtaactctcacgagtatgccaccatgatgttggaagccaacccggaagcttaccggtcgattttcgaaaagtcagtagccgaattcggaggcaatatggaaaacctgcaattcaatgccgataccaactggtatgacgaactgttgcgcacagccatgatgaccaatcacagcttgaatatctccggtggtacggaaaaagcgacctactctgccggcatgagctatctggcacaagacggtatcatggacgtggaaaactactaccgccgcttgaacttccgtgccgcccttgactacgaagcccgcaaatggctgaaagtaggcttcaacggcgtattcagcaactcgcagcagcagcttcccaagaatgccgcatggcaacaggcatacaacacaccgtctatcatcccggtgtatgatgaccgccgcgacgatgccgtattccctaagaagtacacatcacccgagcaggtgggcttgaccaacaacttcaacaatccggtagccactgccaactattacgacaaccggaacgagacctaccaagtgctgaccaacttctatgcacagctcaacctcatccccgacaagctgaatatacgcagtagctacagctacgactactcaatgattcgcggttctgagttcactcctacctactatgtaggcaccaaccagaagaaagaggttaccgaactcactaaaaagaacactaactactacaaatatatatgggacaacgtggccacttatactgacaagtggggcaaacactcctttaccggtatgctgggtgcatccatgcgtcaagagcaataccgcctgctcgaaggtaccgccaccaacgtgcccgaaggtgaggacgtgtggaaatacatcgcactgggcaacaaggaaggcgctacggtgaaagacgacggctggaaataccgcggtctctcctatttcacccgactgaattacaactacaacgacaagtacatgttgatgttcaccttccgtgccgacggctcgtccaagtacaacgacaaatggggctacttcccctccatcggtgccgcatgggtcatctcccaagaaccgtttatgaagaaccagaatatcttcgaatacatgaagctgcgtgccagctggggtaagctgggtaacgacaagattgctgccagtgcaggcttcgcaagcatacagaacgtacagtccgtattcggtcccaataccgccatcgacggattcatcaacaccaccaacttcagctggctgggttgggaagtagtgaacgaaaccaacgtgggcgtcaacttcagtacactgaagaaccgcttgaacgccgacatcgactggtactaccgtctgactgacaacgccgtgatttcacccaagctcccgatgagtggcgagctgctggccggcaacaacggacagattctgaataccggtatcgacctctccttgaactggaacgacaagattggccaggacttcaattacaacatcggcgtcaatctctcttatctgcataacgaagtgaaaagcctaaaaggaaacatgaaaatcatcaaaggcggaaagaccgtgaatatggtgggcgagacgatgaactcattctatggctacaaggtcatcggcatctaccagactcctgaacaatgtgctgccgaccccatcgccgtggccaacggactggaacccggcgacttcatctacgaggacgtgaacggcgaccatgtgatagacggaaacgacaagcaggtgttgggctcatacgtgcccagctttacttatggcttcaatgccggattctcttataagaacttcgacttcagcctcactacctacggacaagcaggcggcgaactgtggaaccgtaagcgtgccctgcgctatgcagccgactactataactttgaccgtgcacagtatgagaaccgctggacgggtgcaggctctaccaacgaacatccgtcggccaaggctcttctcaaaacctggaacaaatcagacagtaacaacgcttcctatttcgtagaaagctccgattacttccgcatccagaacatcacgctgggctactcgttcaagaacttgaagataggcagctacgtgatgccgggactccgcctctcattgacggccgaccgccccttcactaccttcaaggccaacagcttcacacctgaagtgtcggatgccgaaggttgggataccgaagtataccctctgacttcaacctatactttcggagtgcaaatagatttctaaaccctaaaacgtaaaacaatgaaattcttaaagaaaacattcgcatatatacttccggccatgatggtactgggaggagctaccgcttgcaccgatttcatagaaatcgatccggagaacaaagttcccgaacaaggcgtggactttaccaacaagaacaatatgtaccaacccgtagtgggtgcctactccaaagtacgcacacagggcatgcactggtgcaacgcactattgatgttcacccgcgacggtgacgtgtggtcgggccgtaccgatgaccagggcgatgccgtggccttcggacgcaagttcaactacaacaactcattctgggcactgaaccaggtatggatgaacttctacgacatcatccgcatcaccaatgccgccctgcaaagcctcgacggttatgccgaatatcttgctgcaggaagcgaagattacaaaacctacgaatcctattgcggcgaagtacgtaccatccgtgcatgggcttactattgtctggtgaccaatttcggtcccaccgtcatctaccgtgacaacctgcagaccgattttcgccgttctaccgtagaggccgtatataattatatgctggaagatttgaactacgccatcgacaaactgccccgcatgcgtcccaaccagatggaacacaagggagccgtgacagccttcaccgcccaagcattggccgcccgcatctatctgctgaaaggagactatgcacaagtggagacactgaccgatgacatcatcaagaacggtggattccgtctctacgacgacttctaccagctgttcaaaattcccggaaagttgtgtgacgaatctttgttcgaatgccaggtaacagactacggcaatggttctggcgattacctgggcgtagaccaatggttcaatttccagggtccgaacatggcagagaggtatgatgaagtagtgaacgcagacggtaccatcagctacaagcaagccgaaggcaccaagtccataggcggctggaatttcataggctatgaacccgagttcgtggcatgggccgaagcccgtggcgaaggtgtgcgtgccgaaacttctttcctgaaagccctgagcaagacgcgcgagggttggcaggtaggtcccacatcggccaccaagaccgactgttggaacggcaaaggttaccttccctacaatcagatgactcttccacgtacgacctacggagccaacaacaatgtgcgtatcatccgctatgccgaagtgctgctgatgaactccgaagccaaagtcagactgggcaaggatggagacgcaggctacaacgaagtgcgccggcgtgcaggcatgagcaccaaaaccggtgttaccctgaaagacgtgatggacgaacgccggatggagctttgcggcgaatggtgtgcccgttatgtggacttggtgcgtaccggcgatgccgccaccgtactcggtcccaaaggatggacagcagaaaagacttattggcccataccagccaaccagttggacgaccttcccgacctgaagctggaacccattgacggaattgccgaataaatccgctccaatatggtaaaaagattcctaatcagttgtggaatagcctttgccgctctgacggcaaaggcaacccctgacgattccatcaaagtggtgaaggggcaagtcagtgactattatatcactgtaacccaagaccgtatcgtaaaaggacacgtactggacaccaaccgccagccactcgcaggcgccacagtcatgttcttcgcaagtcccatgcacaataccactgcccacgacggcagctttgccatcaaaggagcgaagaacgacgtgcacctgtatgtctactatcccgggaaaaagatagtgaacagaatcctggcactggatgaaaccgatattgaggtagtgatggaaaaagaggtacacaaggcaaccgcaatccgccgtcccgcccaggcgacccggtggtatgacccacaggcgcctctgtcgcgcaccttctgcaatccgatgaacatcagttacaatttcgagcctttcaacaacaatgtgcgtcccaacggttcgttccgttcctctgccgacccgatggcggtggaatacaagggagaatactttctgttctccaccaaccagggcggttttcactattccaagaacctggtggattgggatttcgttcctgccggcttccaacgcaagcctacggacgacgaccagtgcgcaccggcagcctatgtaagcggtgacacgctgttctataccggctccacctacgaaggccttgccgtgtggtacagtacacaccccaaaacgggacgtttcaaacgtgccatcgaaaagaatgtgcttcccacatgggacccctgcatgtttctggacgatgacggcagactgtatatgtattatggctccagcaatgaatatccgctaaaggcggtggaactggaccggaatgatttctatcccatcagcaagattcacgaagtgatgatgctccgccccgaagaacacggctgggaacgtttcggcatgaacaatgacgatgaagtgacactccgcccattcacagagggcgcttacatgaccaaacacaatggcaaatattatttccaatatggtgctccgggcactgaattcaaagtctatgccgatggcgtatatgtttcggattccccgctgggcccgtttgtctaccagaagcataacccgatgtgctacaagccgggcggttatgtgcaaggtgccggtcatggaggcacgttctgcgacgtgaaaggcaattactggcacgtggccacctgcatgctctccctgaagtacaagttcgaacgccgcatcggtctttatccggtggctttcgacaaggatggtgtcatgtattcgtccactgccttcggcgattatcccaactgggcagaaccgatggacgtaaagaaccctgcagagcgtttcacgggatggatgcttctgtcctacggcaaaccggtggaggtatcatctacggatagcatccatgcagcttccaacctgacggacgaaagtatgcgcacctactgggcagcccgttccggcaaccctggcgaatgggccgggatagacctgggcagcacaaagaatgtacgtgccgtgcagttgaacttctacgaccataaagcggttcaatacaaccgtgccatggatatttatcaccaataccgtatttttgcttccgaagacggaaaagaatggacattggtcatagacaagagcgacagtgacaaggattgtccgcacgactacatcgagctcaacgagccgttgcgtgcccgttatctgaaatacgagaatgtgcacatgcctacgggaaatgtcgccttgtccggcttccgcgtcttcgggaacggtgacggcgatgtcccgcaagccgtgaaaggactgactgtgaaacgtgacaggaaagaccgccggaatgcccttatctcctggcaacccgaagcaagcgcctatggctacaacatctactacggcaccgccgaaggcaagatgtacaatgccatcacggtactgggacagacggaatatgacttccgcggactggatgcggacacggactattacttcaccatcgaggcgctgaacgaaaacggccgctcgccattgtgcaagacgacaaaaaattaaacacaagaaataaagatatgaaaaaaccaataatgatacatgtgctggctttgttcctgatttccacattggcgagctgtgcatcctgctcttccgacttgaaggaaaacgggaaagagaacggaaaagaggaaaagcccgacacagaggaagtacgtcccgaatcattcgcttcggatgacgaaatgcttgattacatccagaaggtacatttgaactacatgtgggacggtgcggaaccgacctccggactggcacgcgaacgcatccacctggatggggattatcccgaaaaggaccagaatgttgtcaccaccggcggcagcggatttggtatagccggactgctggtaggcatcgaacgcggcttcatccccagggaagaaggcgtgaagcgcctgaccaagattgccgattacctgaaacgcgccgaccgcttccacggcgtatggccccattggttgtacggccctaccggcaaggtgaaacctttcggacaaaaagataacggcggagacttggtggaaagctgcttcctgatgcaaagcttgctttgcgtacgccaatacttccgcgacggcaacgagcaggaaaaggcgctggcagagaagattaaccaattgtggaaagagatggagttcagctggtatcagaatggcaaggatgtcatctactggcactggtctcctgaatacaactgggaaatgaacttcccgctggaaggctacaacgaagcattgattgtgtatgtgctcgcagcctcctcccccacttatcccgttccggcttcagcctaccacaacggctgggcacgcggcggcggcatcaagtccgactctgccccctacggcctgcctttggaattgaaacacaacggagccgagaaactgggcggtcccttgttctgggcacaatactcgcacatcggtctggacccgcgcaacctgagcgaccgctatgccaactactggaacgtggtgcgcaaccatgccctctccaactaccgctactgcgtggagaatcccaaacaatacaaaggttacggcgaggactgctggggactgaccgccagctactctaccaaaggctatgcagcccactgcccgggcgacaacgaccatggtgtcatcacaccgacagcagccttgtccagttttccctacacaccggaggaatccatgcgtgcactgaagtatttctattccaaaggcgactggatttggggcaagtacggattctacgatgccttctccgagggaagtgactggacggtgccccgctatcttgccatcgaccaatgcaccattgccccgatgattgagaactatcgttccggcttgttgtggaaactcttcatgagctgtcccgaggttcaggaaggattgcagaagctgggatttaaggcttagggatttacgattgaagttagtatgcgacatgatggagcagctaagcttaagttgaatttctatatcactattcccctcccccttcagggggccggaggggataatcaaaattatatcatatgaagaaatacacattattagcagccttggctttctctgccctcaccgtgacggcaacgcccaaagaaaacacatcccaaggcaatccgcaggagatggataaattcattacggagctgatgggcaaaatgacgctgcacgagaaaatcggtcagctcaacctgccggtaacgggaaacatcgtcaccggacaagccaagagcagcgacgttgccggtaaaatccgcaacggtgaagtcggaggtctgttcaacctgaaaggcgtgaagaacatccgcgaagtgcagaaacttgccgtagagaacagccgcctgggcatccccttgctgttcggtatggacgtgattcacggttacgaaacggtattccccatccccttggcactctcgtgcagttgggacatggaggctatagagaaatcggcccgtatcgccgccattgagtcgagtgcagacggtatctgctggacgttcagcccgatggtggacatctgccgcgatgcccgttggggacgtgtatcagaaggcaacggtgaagaccccttcctgggttcagccattgcacaagccatgattcgcggttatcagggcaaggatatgagtgccaacaacgagataatggcttgcgtaaagcacttcgcactgtatggcgccggagaagccggccgcgactacaacacggtggatatgagccgcaaccgtatgttcaacgaatacttccctccctacaaggctgccgtagaagccggtgtgggtagcgcaatgacctccttcaatgaaattgacggagtacccgccactgccaaccactggctgctgaccgacgtactgcgcaaccaatggggcttcgacggcttcgtggtgacagactatacagccatctccgaaatgatagaccacggaatcggcgacctgcaggaagtatccgcacgtgccttgaccgccggaacagacatggacatggtagccgacggatttatcggcacactggaaaaatccctgaaagaaggcaaagtgactgaggccgacattgacaaagcctgccgacgcatcctagaagccaaatacaagctgggactgtttgccaatccgtataaatactgcgacgtgaagcgtgccgaaaaagaagtgttcactcccgaacaccgttccatcgcccgccagattgccacagagacattcgtactgctgaagaaccaggacaatctgctgcccttgcaacgcaaaggcaatatcgccttgattggcccgcttgccaacacccgtgccaacatgccgggcacttggagtgtggcagccacagcagacaaatacagcaccctgctggaaggtttcaagaattctgtcggctccaaggccaacattctctatgcacaaggcagcaacctgatgtacgatgccgactaccagacacgcgccacgatgttcggccgtgaactgccccgtggcaatgaccaagaactgctggacgaagccctgaaagtagccgcacaagccgatgtcattgtagccgccctcggcgagtcctccgagatgagtggtgagagcagtagccgttccgaactggaaatgccggacgcacagcgccacctgctggaagcattgctgaaaacgggcaaacccgtagtattggtattgttctccggacgtcccgtagtgctgacttgggagaatgaaaatgttcctgccatcctgaatgtatggttcggaggtagtgaagctgcagacgccattgccgacgtagtgttcggagacgtttgccccagcggtaagctgaccaccactttcccgcagaatgtgggccagttgcctatggcatacaaccacaagaataccggccgtcctctgaaagaaggcaaatggttcgagaagttccgcagcaactacctggatgtgagcaacgacccgctgtatcctttcggctatggcttgagctacaccaccttccagtacagtgacatcacgctcagctccaagcaactgaatgcggacggcaagctgaccgcttccgtaaccgtaaccaatacgggtaactacgatgcagatgaaatcgtacagctctatatccgcgacttggtgggcagcattacccgccccgtgaaagagctgaaaggcttcgagcgcatccacctgaaaaaaggcgaaagcaagcaggtgaccttcaccattacccccgaattgctgaagttctacaactacgacatacagtatgtatacgaacccggcgagttccatgtaatgattggacccaacagccgcgatgtaaagactacgagttttgagttgaaataggtatagttttgcttttaggtaagagggcagtccgcgaaaaccgggctgcccttttttaacaccgtcaccaaatcttttttgcattttgattgttcagaggagaaactgaatgatttatccactaaaaaatcaatgtaatgaagaagaacctaaaccttcccaagaagaaaaccggaagactgagaaacctatttctgacggtgtgcctgctggcaagtgtcgccgcatcggcgcaggagaaaacagtaaccggtaccgtgaccgatgccctgggtgacccgctgattggtgccaccgtattggtgcagggaacctccaatggcgtgattaccgacatagacggccggtactccatccaggccaccccggagaacacattggatttttcctatgtaggcatggtgaagcaagctgtcaaggtaggcagccagtcggtaatcaacgtccagatgaaagacgactcgcagatgctggccgaaaccgttgtcatcggttatggcagcgccaagaagcgagaccttacgggctccatcaccaacattaaaggcgacgaaatcgccaacaagccggtggtcaaccccgtatccgcactgcaaggaaagattgccggcgtgcaggtgataaactccggcaaggcaggctccgacccggaaatccgtgtacgcggaacaaactccatcaacggctacaagccactctatgtggtggacggactgttcaacgacaacatcaacttcctgaatccgcaggacatcgaatccatggagatactaaaagacccgtcgtcgctcgccatcttcggtgtgcgcggtgccaacggcgtgattatcatcaccaccaagaaggcgaaagagggacagacacgcgtcaatatcaacggctcgttcggtttcaagtccgtcaccgacaaaattgcactgacggatgccgaaggcttcaaactgctgtacaacgaacagttgaggaatgaaggcaacccggaatacaacttctcggactggacgggaaacaccaactggcaggatgaaatcttccagactgggttcatcaccaacaacaacatcagcatcacgggtgcctcggacaagaacagcttctatctcggtgcgggctatgcctacgaacaaggcaacatcaagcacgagaagtacagcaagattacgctgaacatcagcaacgactataaagtgacggacaacctcaaggtaggttttcaattcaacggggcacgcatgctgcccgccgacacgaagagtgtggctacagccctgcgcgcagctccggtggcgcatgtattcaactccgagtacggcctctacacctcactgcccggattccagaaggcacagatgaacaacccgatggtggacgtagacctgaaggcgaataccacgaaagccgagaactaccgtggctcgggcaacgtgtacgggcaatgggatttcctgaaacacttccagttcaaggccatgttctccctggactatgcctcgaacagcacacggacatacaccccggttatccaggtatatgacgcaagcgtcgagggagacatagccacgctgggcaacggcaagaccggagtgtcccaagccaaagaaacggaaatgaaggtacagagcgactatctgctgacctacaccaactcctggggagaccacagcgtgacggccacagccggtttcaccacctactacaacaagctcgagaatctgaacggcgcccgtacccaaggggtaggcctggtcattccggacaatcccgacaaatggtacgtaagtatcggcgacgcagccaccgccaccaacggcagtacgcagtgggaacgctccaccgtgtccgtgctggcacgcgtgctctacaactacaagggcaagtacctgttcaacggctcctaccgccgcgacggttcttccgccttctcctacaccggcaaccagtggcagaacttctactccgtcggcctgggctggctgatgagcgaggaagcatggatgaaggacatcacctggctggatatgctgaaactgaaaggctcatggggcacactgggcaaccagaacctggaccgcgcctatcccgccgaaccgttgctgacgaatgcctactccgccgtgttcggcaccccgtctgccatctatccgggctaccagcttgcctacctgcccaaccccaaactgcgctgggagaaggtggaagcctgggaagccggtgcagaagccaacttcctccgcaaccgcctgcactttgaaggggtgtactacaagaagaaaaccaaagacctgctggccgaagtgccgggcatctcgggcaccgtaccgggtatcggaaaccttggctccatcgagaattcgggcgtagagcttgccttgagctggcgcgaccggataggcgactggaactacaacatcggaatgaaccttgccaccatcaagaacaaggtactgagcctcgtgcaggaaggctactccatcatagccggagacaagcagcagagctacacaatggcaggataccccatcggctacttctacggctacaaggtggaaggcgtctaccagacccaggaggagattgagcactctcccaagaacacactggcaaccgtcaccccgggcgacctgaaattccgcgacgtgaacggtgacggtgaaatcaccacggcagaccgtacgatgattggtaatcctacacccgatgtcacctacggcttcacgctcggcctgggctacaagaactgggagcttgccgttgacatgatgggacaaggcggcaatcagatttaccgtacctgggacaactacaactggagccagttcaactttatggagcaacgcatggaccgctggcacggtgaagggaccagcaacacccagccgctgctgaacaccaagcataccatcaacaatctgaactccgagtattacatagaggacggctcgttcttccgcatccgtaacgtgtcgctggcatacaacttcgacaaggcgctgatttcgaagataggcatgcaggcgctgaaactctacgtgaacatacagaacctgaagacgtggaagcacaacaccggatataccccggaactgggcggaagcgccatcgccttcggggtggacgacggcagttatccgatgccggcgatttatacgttcggatttaatctgacgttctaaaagcctctcccctaaaaaagagtaacttcaaacctcccccgactccttcaaagggaacggggaatgaaaaatataaatttatgaaactgataaaatacatatttacattgctggtgggtgcaacagccctctcactgacatcctgcaacgacttcctggaccgcgatccgctggggcagttcacggaagatgactctcccaacgcccttgtaggcgggaagatattcaacgtctactacctgatgcgctcgtacgacatcactgccggtattcctgcttttatggtgcacatggtgcgcagcgaggactccgagaaaggcagtgatgccggcgacggcagcaacgaggccgccatgtgggacgacttcgaatacactgcctccaacgggccgctcagcgcctattggggacagaactacaaaatcatctaccagtgcaacgaaatcctggacgacattgagaagagcggacacaaggacgacaccgaagccatccgcaaccgcggcgaagcgctcttcttccgtgcctggtgctacttcaacctggtacgcgcctttggcgaagtgccgctggtcaccatcaaggtagtggaagcctccgatgccaacgtgcccaagaccacggcggaaaagatatacgaacagattgacaaagacctgaccgaagccgaagaatgcctgcccctgcggtgggacagcgactatacgggacggctgacctggggcgccgcacgctccctgcacgcacgcacctatatgatgcggaacgattgggacaatatgtacacagcctccaccgaagtgataaagtcgggcatctacaacctgaatacaccggtcgacaaagtcttcaccgtagaaggggagaattgcggtgagagcatcttcgaactgcaatgcgaagccaccgatgccatgaaagaggatgctagcatcggcagccagttctgccaggtgcaaggggtgcgcggagccggcgagtgggacctgggatggggctggcacatggccaccaaactgatgggagaagcttttgaaccgggcgacccgcgccggaacgccacattgctctacttccgtcacagcacggacgagcccattacaccggagaataccaaccagccttatggcgagtcacccgtatccaccgccatgggtacctacttcaacaagaaggcctacacggacccgacactgcgccgcaagtacagccgtatgggtttctgggtaaacatccgcctcatccgctatccggacgtgctgctgatggctgccgaagccgccaacgagaaagggctgacaggcgaagccgccgggtatctggaacaagtacgcgcccatgcccgcggcacactggcagacgtgcttccgaaggtagaatctgccagccagtctgtgctgcgtgacgccattcgccacgaacgccgcgtagagctggcactggaacccgaccgcttctacgacctcgtgcgctggggcattgccaaagaagtgctgcaagctgccggaaagaattaccaggacaagaatgcactactgcctctgccccagacagagatagacaaatcgaacggagtactggtacagaaccccgactattgatacccggccaaaggaaacagccgacccaatcaatggcaaaaggtctgttttataacttgctctcaatcaaagcattgctactgcaaagagctgcaaactttttgcagtggcactgcacaacagttgcagtgtcgctgcaaagcagttgcagtagcgctgcaaattgtttgcagtatcactgcagagatattgcagcaccgttgcaaagaagtcatagcgccactgcaatagagtgacggcaatctaaaaacaatgaagggaacatacttacaaacaattaattcaatatgaatatgaagaaaattttcaagagaacaagtctgctgctcgcaaccgctttaataggtggcaccgccaccgtgcaggcgcagaaatctccgcaggacatggaccgcttcatcgacgcactgatgcgccggatgactgtggaagagaaaatcggccagctcaacctgcccgtgaccggagaaatcaccaccggtcaggcaaagagcagtgacgtggccaagaagattgagcaggggctcgtgggagggcttttcaatctgaaaggagtggccaagatacgcgacgtacagaaactggccgtagagaactcccgcctgggcatccccctgctgttcggcatggatgtgatacatggctatgagaccatcttccccatccccctcggcctctcctgcacgtgggatatggcagccatcaggcagtctgcccgcatagccgctacagaagccagtgccgacggcatctcatggaccttcagcccgatggtggacatcagccgtgacccgcgctggggacgtgtatccgaaggttcgggcgaagacccgttcctcggaggcgccatcgcccgcgccatggtgttggggtatcagggaaaagacctgaacgaccaactgacacggaacgacgaaatcatggcatgcgtcaagcacttcgcactgtacggtgccggagaagccggacgcgactacaacaccgtagacatgagccgcaaccgcatgttcaacgaatacatgtacccctatgaagcagccgtccgcgccggagtgggtagtgtgatggcctccttcaacgaagtggacggcgtgcccgccaccgccaaccactggctgatgacaaacgtgctacgcaaacaatggggcttcaacggttttgtggtgaccgactttaccggtatctccgaaatggtggaacacggaatcggcaacctgcagaccgtttccgctcgtgcgctcaacgccggtgtggacatggatatggtgagcgaaggtttcgtgggcacgttgaaaaagtcgctcatcgaaggcaaaataaccatgaagacactagatgcagcctgccgccgcatccttgaagcgaaatacaagttagggctgttcgatgacccttacaaatactgcgacctcagccgtcccgcacgcgacatcttcacccgcgagcaccgcgccgctgcccgccggattgccgccgaaagctttgtactgctgaagaacgaaccttttgagggacaaggcaagcagtcttctcgtcccgtccttcccttagagaagcaaggcaccgtcgccgtcatcggccccctgggcaatacccgcagcaacatgcccggcacctggagcgttgccgcacgcctggacgactatccctctctgtacgaaggattgaaagaaatgacagccggccgggtgaacatcacctacgccaaaggcagcaacctcatcggtgatgcagcctacgaggaacgcgccaccctattcggccgatcgctgggccgggacaaccgtacggataaggaactgctggacgaagctttgaaggtggtctccggtgccgacgtgattgtagccgccctgggcgagtcttccgaaatgagcggtgaaagctcgagccgtaccgacctcgacatccccgacgtgcaacgcaccctgctggaggccttgctgaagaccggaaagcccgttgtactaaccctcttcaccggccggccgctgacgctcacctgggagcaggaacatgtgcccgccatcttgaacgtatggttcggtggcagtgaagcggcatacgccatcggcgacgtactgttcggcgacgtgaacccaagcggtaagctgaccatgactttcccgaagaacgtggggcagatacctttattctataaccacaagaataccggtcgcccgctggctgccggcaattggttcgagaagttccgcagcaactatctggatgtggacaatgaaccgctgtatcccttcggatacggactctcatacaccactttccagtacagcgacatcgccctcagtaccccggtcatgggacaaaatggctccaccactgccgtagtcaccgtgaccaataccggcaagcgtgacggcgcagaagtcgtgcagctctatatccgcgacctcgtaggcagcattacccgccccgtacgcgagctgaaaggctttgaaaaggtgttcctgaaagcgggcgaaagcaagaccgtatccttcaagattacccctgagctgctccgcttctacgactacgacctcaaccacgtggccgagccgggagatttcgatgtgatgataggtggcagcagccaggcagaaaagacagcccgactgacactgaaataaaataaaatatttaatattgcactctaaaaacaagaaaacatgagatatactactttactcctttgtttttgcagcattctgctccttggcagctgcaagagccagccctccgcacagaacggacagccgctggaagtgatgacgttcaatgtccgcctggatattccttcggacagtgtaaacaactggaattaccgcaagggtgacgcctgccgtatgatagcctactacagccccgacttgctgggcatgcaggaagtgcttcacaaccaaatggaaggcctaaaacgcgggctgccgcaatacacagcactcggtgtggggcgcgacgacggcaaggaagcaggcgaatactgcccgatattcttccggaccgaccggtttacactggtggaatacggcaatttctccctcagcgagcaacccgaaactatcggcatcaagggctgggacgcttcctacaaccgtgtcaccacctgggcgatactgcaggaaaagaacaacggacaaaagtttgtatatttcaacacccatctggacaacgacggaaagacagcccgcaaagagggcgtgcaactcattctcgacaaaatcaaggagatagcaccggacatgcccgccatcatcaccggtgactttaactgtacgcccggtgaagaacctctgcaaacgctggaaaagggaggaatggaaaatgccgcaaagacagctgccgtcacctacggtccgtcctggtctttccatgacttcggccgtctgccggtggaggaacgcgtactgctggactatgtcttcgtgaccaaaggcgcaaagatagaccgctaccgcgttatccaagacaaaccggagaacagctacctttccgaccactgtcctatacttgttgaattgaccgtgcaatgaatatagataagtaaatgataaaaaaacaagtaagcattggtacaatgaaaatacaatactgtttattattgttcctgctgttgctcggtttcacgcaatgcaaaagccccgccgccaaagaagaccggctgagcgacgatgccctgatggacaccgtacagcgccgtaccttcaactacttctgggaaggtgccgagcccaacagcggactggcacgcgaacgcatccacatggacggtgtctatccggagaacgaccagaacgtaatcacgtccggtggaagcggcttcggcatcatggctatacttgccggtatagaccgcggctatgtcacccgccaggaagggctggaacgaatggagaaaatcgtctccttcctcgaaaccgctgaccgtttccacggtgcctacccacactggtggtatggcgatacgggcaaggtgaaacccttcgggcagaaagacaatggcggcgacctggtagaaacagccttcatcatgcaggcgctgctctccgtccaccagtactacatcgacggttcgcccgccgagcaagccctcgccgcccgcatcgacaagctgtggcgcgaagtggactggaacttctaccgccagaacggccagaacgtgctctattggcactggagtccggaatacggttgggaaatgaactttcccgtacacggttacaacgaatgcctcatcatgtatatccttgccgccgcctcgcctacccacggcgtgcctgcagcagtctatcacgagggctgggcgcagaacggggccattgtagaccctcataaagtggagaatatcgagttgcatctgcgctatcaaggcacagaagccggaccgctcttctgggcacaatactcgtttctcggcctcgaccccatcgggctgaaggatgaatactgcgccaactacttcgacgagatgcgtaacctgacgcttgtgaaccgtgcctactgtgtccgcaaccccaagcactacaaaggtttcgggcccgactgctggggactgacagccagctactccgtcaacggatatgccgcccacgctcccaacgaacgcgacgaccagggagtcatctctccaactgccgccttgtcatccatcgtctataccccggaacagtcgttgcaagtgatgcgccacctctacgagatgggagataaggtcttcggcccctatggcttctacgatgctttcagcgaaacggacaactggtatccgcagcgctacctcgccattgaccagggcccgatagccgtcatgctcgagaattatcggtcgggactgctgtggaagctcttcatgagtcatccggatgtgcagaaagggttgaaggagttggggttctcaacagtcagcaagtaacttactatcataaaaaatccccttctgaaacttgtattctctgatgaatagcgaggtacaagtttcagaaggggatgtatttacaacctattcaccgccgccaccggaaccactgccaccgctcttcacatcatcattgctgatagtgcgcgcagcctttttcacgcttgccttcaactcaccgatacggtagctgacgcttatgccgaagcgttggcggctgtacttataattgctttcccgtataaaaccgctgccttcggtggtggagctttggtccatatacttcttgaagaagttgctggcaaaggcagacaaggtgaggcgcttgtccaggaaggacttgttgacgctcaagccataatcaaagaagctgctacccttaccttgcagcataatccacggcgtctgtccgaagacattcagactgatgcgccagtcatggggcagcgtctgctgtgcaccgccgtaggcaaagaggctccagccatcgttacgcatgccttcactgccctccagataagagtaattgccgctcatgttcatgtagatacgtgtacgtggagtggcattccagttgacgtagccgttcacactggcataacgggtcttgccgatgttggcataggtagaataaagcacatccttgcccgtgggattcttcaatccctcaatctccgtatcaggcatgagccttgtcacattctcaatactgttgttggtaaacgagtaacgggccgagatattgatgttgaacttctgtgtgaagttactgtaactcaagttgaaagcatggctcttctcgctgtccagctccggattaccctggctgatgtaggaggggtccgtatcattcagataaggattcagagaccagattcccggacgatagatacgcatgttgtatcctaaacgcagattggacatatccgtcagcttgtagccgatggaagcggaaggcactacgtcgtcaaagttctttgtgaaatcctcaccgcggcccaccagatacttcacatcttggatggtatgctcgtagcgtaatcccaaacggcccgaaagtctcttcaccttcagtccatatcccagataggcggcgataatatcgttcaaatgcttgtagtgtgagctctggtccttgttgtattcatactttccggtatcgtccgcatcaaaacggtcgtcttcggaggagttgttgcgcagaatgtacttggcacctgcctccaatgtatgcagcttgccgataggcgtggtatagtcggcctggaacgtatgctccgtggtattctgatcaccgtcgttatgctggttcttcaaacggttcagatagtctgcccaatcggggttatagccattgtctatttcatattccgtataggaatccgacgtttgcggacgggtgtttatcttgtaggagaacgtcaacatgcggtccttgaccttgaacagacgctggtagtcgatacctccgtcgatagaataccaggaagacttgctgcggttaaaggcagaataactgtaaatgggagcagcatttatgttctctggaaaggtggcgatgtagtccgtagagccgttactcttattcccaccgccccaaagtccgaaagacatggtaaccaagcgtaatgtatctatttcgtagctggcctccatgctgcccgactggaaagaaccgtgtcccttgttgctgccgtcatagtccagattggaagaattctccgtaacagcttccggtgtcacgtgctggctgccgctgctgtagttgcggggctggtcgttgtaattgtaattgtagcgggcgctgacggtcagctttccgctctttatggtaccgaatgccccgccgcctgcaccgcggttgctgacattggcactgaacgtagccgtatagccttcgagtccgctgcccacggtgacgatgttcagaataccgcccacaccctcggcgtcatacttggggccgggattggttatcacttcaatatgcttgatactgtttgcaggcatacttttcagcacttccgtcgggttgttgctcatcatgttgttgggctttccgttgacgtataccttgaagctgctgctcccgttcacctgaatattgtcctcgccatccaccgttaccaacggtaccttgcggagcatttccagcacggagttcgattgggcgtcagggtcatcctgcacattgtactctatcttgtcgatatctgccttcaccagaggcttctgagctacaatctccacttgtcccaactcattggaagcatctacgatatacagcgtaccgaagtccaccagcttctcccctgccttcacagaaaagtccttcacgatgggagtacgtcccacggaagtgatggtcatcacgaagttgcccgtaccgggtactttctcctggaactggcctttcatgtccgttaccagcattttcagcgcctttgcaggggcctctttcttcacgattttaatggtagcataaggttcaccttcctgggtgagtgagtcgagcaaaattcctttaacctggaaagaagtgtttgccgtgttttgcgctgcaagcagtcccgaaatcatcagcatccatagcagcacagtccattttgttctcattgcgtttttatatttagtgactattcatgtttattgtcttggtattagacgtttcccgttcgagttttgtcacaatgaattcggcaaaaatagcccctttttcatgcatttacgagactttcggagttaaaaaagcaaaaagaaagcaatttagagaaaatagaagaaaagtaacagacagatatttgcggcaataacagagccgaatccccccaatatccacggccgcaaagggctttttccaccggcaaagaataacgcgtagcacatgtttaccgctatattgctgacaatagcctgcatgctgcaagccgtaatcaccagcaccgccacactgcccgttccttgaagcaggttcaggatgaaaggagtaatgtcactgaaccccgaaatgaaagagagcaagttcagtccacccgtgccggcatacaccagcgtatagtgggtcaagatagtgaacaccacaaacagcatggcaaaaatcagcgctaccttgaactccaacggattactgctgtcctcgtcctccgtggtctgcgtgccgtcgtccacccgtttccgcttggaatgcagataccatgccacggcagccgttaccaccgacattatcagcaggtagggataaatggccagtagcgtctcccggctgaaaatacctatcaatatcaagaaacggaggaacatcatactgaccgccaacaacatggccgccacatattcgggagcatcctgcacagaagccttacggctctttcgcgccagtacggaaatggtagccgtgctgctgtacaagcctcccacgatgcccgaaaccagaatgcccgactcatggaaaacgtaacgcttcaacagataagaaaggtaggaaatgcccgatacaaccaccgtggccagccaaatactgtatggcgtcaggttgatgccgggaataagattctcattgggcagcatcggcaggataatgccgctgatggcaaggaacttggcaagcgtaatcatctcgtcgttcttcatgcgctgggccagttccgtgaaggtgtgtttcagctcggtgaagagcaggacggtcactatgaccatgacgtagaaccacgacggctgcgtggccacaatgggagcaatgcagtaggtgatgagtgcaataatgatggtggttactccgaacacatggtactgtgactgcttcacataatagttcagtccgagcagcagtcccagaatggctcctcctcccatgaacagacgatagcccgtagggtcgaggatatagagcagatagcccagaatgcctataaaagtgaaggtgcggtcggtaccgaaaagcgtagtttccccttcgcgcttcaagctgattttacgctgtgaaagcccgatgagtaaagagaatacggtgaccaaaaggaaggtgaccagttctcttggcaggtagtcgtaaagtttctccatgacgattaaacaagtacggcatacaattggtttgctaccacgtggtgaaagggtgtttcatcagttgcgagttatagtagcggacgtctcccgtcacctcccgtccgatgaatgcaggtttcacgaaaggctcgtcttccgaggagagttccacctcagccacagtcagcccttcgttctcgccatagaattcatccacctcaaagacgtgctgtccgctgcgcaccaggtaacgggtcttgtcgatgacacccggttcgcacagtttcagcaattcccgcgcttcgcacagcggaatttccttttcccactcgtagcggctcgttcccgattcattggatgcacccttgatggtgagaaatccccgttcatcgcggatgcgcacccgtactgtccgtccacgtgcactgctgatgtatccttgtacgatacggctgtgtgcatacgcttgtggcttgtattctcccgtcacgaggaatttccgttctatctcctgcggcatgtcgtttccagtgattttatcagccccagtaagagtaagccacaaacatggcgatgaccaatacaatggctattactcccatcgtcatcatcactttcttggcttgttgctcttccttctggctgtgcattgctttctttttactttttcccatggtgtgttttatagtttaaagttcaacgatgaacaaagtaagaagaaattcgggaagaatgcaaatgaaagggagaaaatttattcgccgcttcctgcaaactccatcaggtaagctttgataaagccgtctatctttccatccatcacgccattcacatcactggtctggaagttggtacggtggtccttcacgcggcggtcgtcgaagacgtagctacgaatctggctaccccattcgattttcttcttaccggcttccacctttgcctgctcggccatgcggtgttggagttccttgtcgtaaagcatggaacggagaaggcggagagcgttctcgcggttcttgggctggtctcgtgtctcggtattttcaatcaggatttcttcctcttcgcccgtatatggatccttatactgatagcgcagacggacaccggactctaccttattgacgttctgtccaccggcgccaccacttcggaaggtatcccatgacatgcgggcaggttcgatgttcacctcgatggtatcatctaccaagggagtgacaaacacggatgcaaaagaagtcatacgcttgccctgggcattgtagggcgaaacacgcaccaagcggtgtacaccgttctcacctttcaggtagccgtaggcataatcgccggaaatctcgatggtacaagtcttgatacctgcctcgtctccttcctgcaggttggcgatggtggccttatagccgtgagtctcggcatagcgcagatacatacgcatcagcatgcttgcccagtcctggctctccgtaccaccggcaccagagttaattttcagcacacagtccatctgatcggcttcctcgcgaagcatattcttgagttcgagggcctcgacagcagtgattgccttggcataggcatcgtccacttcctcttcagtcaccagttcgtctttgtaaaagtcgaaagccagttgtacctcatcggccaaggtctttacctcattgtagccggaaatccattgctgcaagcctttcactttcttcatctgagcctcggcagccttttggtcgtcccagaaaccgggagcctgggtgcggagctgctcttcttccacttgtatcttctttccttcaatgtccagatagcggttcaacgcctcggtacgttctttgatatctttcagttgttctgcggtaatcatatatgcatttacaatttaggaagtgcaaaggtataaaaaaacacataattccgcaattgtcaatccaataagtaatactaacagcaaatgatttcaccagaacaccctaaagatttattcaaaaaacaaggtgccgaaaaaggccggacagtgaaacatggggtgttccagccggataggactccaagaaaggaaatggggagtctggagcttgtcaccacacttgtagaaattccctctcattgttttcccatccagagaaccgacggaatgctggaagaaagcagaaacgggaataaccatgaccagttcccagctgcactcgcccaaacgttcctcgaaaggttcgccggccaacgagctccaacgtttcaccatgcccagcacctcctgactcgccgtaggacggcgctcattgactgcacctccctgaatcagcagcctgccggcgcagttacattcgaaattgtaatagcggtcgtcaccttcgggagatacgaagaattccacacaagcatcttcccatacccggccattgtctccggaggccactgcacgcacactggcttccttcactttgtagtggagcaggatttcgcgccccgtatgggctatgcggaaactcacttccggcttataggggtaatctttccagttgaccacatcaaggggctgaaactctatcccgttcccgtccagcaaggacggcacagccccaccttccggtgaagccgtacacattactttccttacgggcaaactctttccactctgagcattgcaataaaccatgcctaccatcgaaaacacaaagagcagaaagagtttgctcccgtaatctctcactatcataaaacgtcctttcatttcttagaagaatccttgtctgccactgtcacatcccatccggaaacgacatcgccgtaaagatagaacgtcacgtcaaaagtagtcttgctattattgtctaccacctgataacagcgcgttgcgtcgtaggaatccacctccttgtactcgcccaatgccagcggagccggctcttccttaccggcagccgtggctatgatttgctgcatgcgttcctgcatcagtttcataatgccttcgtgtttgaacggatccggttcggccaccttaggataggttgcctttatcactccaccgttggcggcacgcacggctctgacactgtccgtataagccttgaactgcttcttcacctccggagaacgcagaccgagcatcgtaaacacggcaattccctgggcgccgttgttcaaggcggcatccatgcactcaaacatcatcggcccgtccgtggcggtcatgccacaatacagcgtcgtcatgtcgttcttgtcgcgtgcattctccaccgtacagtcggaaatgaagctggcatcgcccgtatagaaagtatggtaaaccatcgggaatacaatgtcaagattccatttgccccagtcctgacgtaccatgcgcgaggacatcttcggagtagggaacggagaggcagccattgtcttgccgtaggagtgtaccacttcggcaatcatattggccacttcggttatctggtcgcaacggaactgacgccacttcacatcaagcgaagggtcttcctgttcgcgagggtcataaccatgctgctccttgaacttcttgagcatttccggatgatagccgtaatcccatgcagcgtattcacggtcctgcacaatgccgtagcgaggccacaaggtagtaggaagcaccacatccacaaaacggtggtagtcgatggcaatgccgttcaaaccttccacttcgcaataggccttgattttctccttgatgaactcacggacttcgggcagtgccgggcaaaggaatttgtaatagcctacgtaggcggtagtgtctgccaggctcttgccgttacggttcacactgaaccattcgggatgttctttcaatattttgtcacggtcgtgttccagattcatggtccatagccaggcatacacttcgattccgtgtttatgggcaatcggtatggctacccggtaatcgtcgggagtcggtgcattcagcatgattccgtccatgccgatgtcgttcatcacttggcaaatggagtcgaagttcataccgggacgatagtccagccacgtccagaacatgggatattctttgtttgtctctttagttccctgctggcacgaaaacaggcccagcgccaggaacagcaataagaatgcaggtaaaaagttctttttcattctatctaaattttaagtttaacgtgcagtttttccatcacccaggtaacgccgattaccacaaaggcaaagcagaggcaattgaccagtcccatgaatccatgcgtaaaccagtccggcaggataacaccggtcacatcggcgaatccataaaagacataaggcaccagataggtagtcagcgtagccgttccggcagggcgtatcagattgaaccagcccgtgacctgatgactgaccaagcagccaagcaccgtatagagtgccacggaaatggcagttacatagaacacccagggaggagtgccgcctatcttggctacaatccaaaaatgatgcgcccctatcccggccaacagaagcaggacagcagccgtcagcccgttgcgaagtttccaaccgtcacccttgtcggcatagcgggcactgagaatggaaaggatgatacctcccattgtaaatgcgggcaaagctccgttgccgatgtgcaggatgcccagcataccttgatagaagttacgttcgggaaaggtaagaatggcctcgccgccaaagctttcgcgcaaaggcgtgcccaacagacatatcagaatgaagactccccagatgggcagcagatatttcaaccggtcacggctgaagaaataaatcacggcacataccagataagtccagccgatggatcccaatattccccaataagccccgaatacaccttcctgcggattgcggaaggtaaaggcaaggtagagaagaaccaatacgccgattatcttgaaagcacggaaaaggttcttctgagtaccggaagccggtttcggatattggttccacacgccgataaagcctatggccatcaagaaccagtatacccctatcggatagggagcttccggtgaaagccggaactccgagtttgtgatgaatgcccccatcaccagcaaagcaaaggtgcgggaaaggatatgtcctaaggtggattctgccgaaaagcctttggcatatctgcgttcgatggcgtatggtatggacattcccactgcaaacaagaagcaggggaatacaatatccgccagtcccataaagtcttcaccataaacggcatgttccagccaatggggtacgtcatgcactttccagaagtcattgacgaaaatcatggtgaacatggtcaacgccctcagcatgtcaatggccggattgcgccgtgaataaacagtcttgtcactcatatcatcttgctttagaattcggaaaccaacatcagccatctggcagccgaagagccccagacttccttataagtagccgtattgaactgcgaccagtagggagcatcttcattgaaataagactgcatacctacgggtatctctcctaccgtttctccgggcagtgccgtatagagctgcggatagttgctgccctccccataaatcatggactgtccgaaaggattcctgcctacaacccagaagagctgctgttcggcaatgtctttcagttccttgtccttcaacactctggcgcaaatggctgcggcttttccggtagacaaatgtacggcaatatttcctttgaacgagaaccagacggggaatatacgcaagtaatgctccttatccagacggataccgttctcgagctgttctttgaaatccttcgcagcaccactgcgaatgcctacctggacggcgtagaagttgacggagtccttcacttcatccttgtgatagatgccgctgggcaccattccataaggatatacatacttcatgatgttcttcagataaccgccatagagtttcatggcacgaatccactgctcatactcggcatgacggggctgcgtttcgcagagggcggcaagggcttccatgtaggcataatcgcgagactgatgagtatagtgtacaatggacttctttgccaaatcgcgatagaagaagccgcaggtcttgtctttgtctttcaacggttcggtgcgctggcactgcaaggtgtagcggatggcttttacagcctcatcggcatactgctgttcgccggtcagcttatagagcatgctggccgcccatgagatgttggcgtgatactggctctcggatgccatggcggcatgtcccccacccttctttatcagctcggcaaagccaagttcgttgaagcgcttcatggcatagccgaagtcttcctttgcaatcttcttcagattacccttaagcgactcgtcattttcaatcctcatggaggcatacgcttcaattcctgcaagcaggaaattctccaaagctccgttatggacaagcagttcgcggcgaccggcatcatcgtcggtgcccaccttaccgtcggtccataggttggtgccccatgtctgtgcacggtagccatcgcccagacgggtcttcatcacatagtccattccccacaaagcctcttccatcaggcggttgtacaagtctatattgcctttttctttggcacgttcggccatcaagagcaaggaataggctatctctcccgtctgtaaggtctgttgggacatatcggcggcatcgtgccatcctccgtttataggaatgatatgtccgttgtaagtggcatgcaggtcattatgacaagccccgtgctttccgggaacgggataaccgcaacgctcgcagaacaggaagttcaccatacgccaggcagaatcatcccacacatcctgatggatatagaaaggcaaggtggtgacatcccctacctgaatgacgtaacggccttgtgtcttgaagtccgagaagtctattgtctcgaactctcccaggccggtcttttccttacgaacgggaccggtataaacaatggcctgcgtagcggcatccttcaactggaactgtccgccgtgcttttccacattgacaatggcgcttttggggctctctatactataaccggtagtagagaagatgatgcgattctgtgcaggcatccagcctttcacggtttccgggttctccaccttctgaagttccacggcatctacatcgaagcgaaggaagtcgcccatagtacgttctttgccgaacacttcgatggcaaatgaaatcttggttaccttgtcgcgcgccagtccggacatctcgacgaagcattcgttccattggttatttttcagattgatttcgtggtagccttcccgaccgtaaatgtcgggtacttttatttctccgtcattctccacataaaggttgaggtagatgctgcgtgctccttcgcacgtgggatagatatagaacttcaggcggttgtaaccttcccagttcacacctcctatatcataagaggccatgcaagtgccgcgtcccaaaccccagccaagaatcttctccggatgggcgggagcttccagacgcagactgtgcttgccggacttgctccgttcgtcagtcaaaccaatcttaccgatgcccttatgcgaccatttggagaaatcctccatatcacacagcatcacggtttccaacactttctttttcaagccgaatgtttcgaaagcctttgtctcgtcgagcggtaacggactgtgcacgtagcccgtgctgacgatgtcggctttcaacttttcatctacctgggcatgaagcaaaacgcagcaaccgataactaaatcaaaaagcaaaaagataagttttattacattcttcatcatattataattattaagttataaggtgattaaagcataaaggagaagaaaattagtacaaatatatgaggaactatgcctaatctcaattttcaacaagtctttgaatagttgtttgagtggcatactctctactaatacaataagtttctccatatacagtagtaacatatgccctaagttcagaagttacaggactaccaaaaataactttagcagcatctccttcggaagcaagcaaaaacatgcctgtagtcccccattcatatttcagaatagggtgattgccgacaacacgtaccatatacacgtcaactccaaagcgctttacctctgttgggtaattaacaaaatctccttcaaaaaatcgaggatacaaataacttatcgctgatttatctccctcactaaacccagaccattgatattcggcagttcctccattcatcacagaatagggatctgaatcaaaagttccagtaataccattggccacagattcacccaatgatttccaatttgtatgccttagtccgaagcaatgtcccaactcatgtaccatattatatatcttctgaagtcttggaatggttttgttataatcataatccaaatttatccaaatagaggaacctggttttccattcataggccaagagcctgccgcaatagtattgttcggtaaaggagcgctagcatcactacggatgagtatatccggattggcagctgtagtataagtcattttaaggttactaagaggattccacagattgatggcttcctgtatttcatctcgccaatcatccacacctgatgcaggtatcgagctatcaacaccaacggtaattgctctttgtttggggtgaccaattaaaccggtagtatgataagcctgccttgtttgtggttgactataagtgacaagtttacttttttcaaggtatatatcaccttgaataagataacctgacttcaactctaccacatctaaagtatcgaatccaagtgattggattatacacataccatcttctattgaaacgctttgctgttcttcttgttcttcaaagtcaacagtttccaactcattataacaagcgctcataaacattaaaaacatagaatagcataatataaacaagccattcacgagatattttgaattcataataatcaattattatattaaacaaaaaatacataaagggaaatatgaaatatgtttttcatacttccccttaaaaaaacatgcttcaaaaagtcctcatcacttaatctctatgataataatgcggattagaagttcggtttatctacatcccagaagatgcgagtaccgccattgtccggtccgcccaacatttcgacggctttggcataaccggtaggattattgcctttttcattgatggtgaagggtaaacggcgtgggccaagatctgtatcaatctcaccttgactgtagttcaccattaccgggaataatttgggataaccagtgcgacgtatctcagcccagccattcataccttcaggataaatagcaatccagcgttgtgtggcaatcttagcaaatttttcctcgttactcaaagactcgtcccatttagcagtcaccttgctctggccttcaatgctggcagcgggaataacggggtctacatacgctgcagcagtagtcgtactgcttaaataatcgcccacagcggctccccattgttcgaacgatgtccgtatacccttttcatacaagctctgagcggtgcccttaccatttacatcccaaccacgcaaagcagcttcggcttccaacaaaatggtttcggcagcagttgccaaaatagcaggagaggtttctgtcaagttgggtcgacttacaatcgccttataggcatccgaaaacccttcttcttccagtcctttaataccaagacgaataccaaaatattcactcttgctgttctgtgtagcatacttatcaagacgcgcatcgcccataccagacaagatagaaggaatattagcgcctaaaacaccatctccatagttgaatgcaataccgtaaagcggattgacataaccgtttcctgcaatgccgaaattagcatcattggtttcaatcaatccattactatcgttcatggcagcttccgcctcactttttgcccaagcagcatcatacttcacaatacgcatggccaaacgcaaacgaatggtgttacacaactgcgcccatttgttcaagttacctccataggcataatcaaacatcataaacgaagccacatccttttctttagcagtacgcagcacgtctgcagcttctttcaattcttcaaagaattttttataagcatcctgtcctgaatcatactcaccaccagtagccgattcgccatagtgagaatagataatacatccgtattggtcggcaagacgcgacatagctattacgcggcagatggtattgatagcctcgaaatgggcatacgtctccatatcgtctttgcacttgttggtgattttcaagctttccaccattacgtttctataagcataatcccaacagttgtcattccatcctgcattcatggcataggtcacattacttacattgccggcaaatgcagtagccgtactgatatagcctgaccacaaatcggcattcaaattttgaataagctgatattcccatacattgacacctgcatttttattataatagatagactgcatcatgggaatgaagtgcataccaatgtagttgttatcttgttttagttcttcatcgctcactcccttcggattagtgttcatatcctcgaacgctcccgtacatgccgagaataaggtagctgccagcagcgctacagctgtaagtctaaatatatttttcataatcatatctactgtttaaaaattaactttcaagttgaacccaatcgaacggttggtaggcataccaaacacatcaactccttgcagacggttgctggtagaaagcatgccatcaggatcatatggagcattgttcttgaagaagaacaggttgcggcctacaagtgaaacctgtgcgttcttaatgacaccagtctttgccaaccaagcctgaggcagactatagccaatggaaagttcgcgcaaacgtatgttggtagcactgtacatataatgctcggtcacacccgcacggccaccaacctgattatagaagccttccacatctgtaatttgacggccttccagcatcacgtaaccacggtcacgagcatcacccgttgccttgcttactccctgctgatcgaggtcggcttccgtcaaagacatcacttcacctccaaaacgtccatcaatcaagaagtaaagagagaagtccttccacgtgattgtattgctccaccccaagttaaaatcaggagtagaattacccagtttcaccggatttgtcttatccaccaatggaagtctatcactatctttttgtccttcttttgcaggttcatactgaatattgcctttttcgtcacgtacaaaagtagtaccgtaaatgtcaccaaacgaaccacctacttctaaacgactccatacattgttactttcgccaccgctaaatgtaaaataaccaaagtcatcaccagccagtgcctttgcttcgttcttattggttgcaaaattaacaccggttttccagcggaaatccttagtcatgacaggagttccattcaacataacttcgacaccggtattctgaatatcaccggcattgatgtaatatcgggcgtattgtgaacctgacggagcatccaacgtaaagagttgattctttgtattagtcttataataagtgaagtcgaactccaagcggctattgaaaaagcgccactcagtaccaaactcaatggaagtagtcatttccggtttcagttctgcaaacggagctgtactgttgaaattgatgctaccactctttgtaatggagttgagaggatttgaagtataagtattcaaaccgttacccacctttgaccatgcaccgcgaatcttacctaaatcaatccaagaaggtaatttcaatgtttcgttcagcaaccatgtcacacctactgacggatagaaaaagcctttgtttttgtatttggtaaatgccaatgttgaagtccagtcgttacgtgctgtcacgtccacataaatctgatctttgaagcctacctgaccggtgaagaacacactctggctttgagtatgggttttccaatcggtcaatgagcccttgttcaaggagcagttctgcatagtgaatacgttgggcacagagagtatacccggataggaatcgaaacctgtaccgtttcctgtataatcgttgatgctggcacctaccgaagcattgacactgaagttagtgaattgctgttgataagtaaacaaaacatccccataagaagaaaggctacttgattcaccgtagatgtaacgaccgttagttcctgttccagccggattcataccacacaacaccgggctggtacctgcatacatacgtgtattattcttgtctacaacatagtcggcactaccacgagcctgtatactgaacaggtcattgaacttatacttcacactcagattcaacaatgtacgataacgggtatcctcattcggaaccttattaatcaaccaatagggattctgctccatatcagtaccttgagatttataccagttctggtccattatgttacgaccggcattaagaatctgataattatctttgtagtagttaaagtcctttccaccttcaacaccaccacgcgggaagtgataaagacctaccaaaggattcatgtaataacctcccgaagtagtacggttattccccctttgatacatcgcattgatattggcatcaacagtcagtttgttattgaggaagttggcagtttcgcgaaaattgaaattatgcttcaccaagctattaccttccaccacgcccttgccgtaagtattagcataggaaaagtaagtttgcatagcttgcgaacccatgctcaacgagagcgagttgatagtagtgacacctgttttgaagaaatcgtctgtatagtcgggactacctttgatatcactgccccaactggttgacacacccgtatagtgattctggaattcgggaataccgtatgcagctatatcgaaagtggtgctggtattgaaactgatactggcgcgtccttccttgcccttcttagtggtaataatcaccacaccattggcagccgaactaccgtaaagtgcagcagcggcagggcctttcaatatgttcatgctctcaatatcatcgggattcagattggaaataccgtcgccacggtcgtagttaccactgtcgttgtctccgccgatagtagttgaggtattttcgttggtagatgaaccgaacggtacaccgtctattacatacaacggctggttacttccgcttaccgaacggttaccacggataatcactttggaagaacctcccaaaccggaagaactcttattaatctgcacacctgccgtcttaccggccaatgcattcatcatattggggtctttcacacgtgccagttcatcaccgtttaccacctgggtagagtacgtcagtgatttttctttctttgcgatacccaatgccgttaccaccacttcatccagcagcttggcatcattctttaatgtgactcttatcgtccccggagtgatgggaacttcttgtgttatcatacctacgaaagacacttgcaggattttcgcacctgcgggcgcatctgtaatagtgaatttgccgtctaagtctgttacggctccggtagtgcttccttttaccaatacggaagctccgataatcggttcattgtcctcagctgaaataacgataccggtaatgggggaattttgggctgctacccaaccgatggctgccagcaggcaaaccaaggtcagcataattctttttttcataagctgtttttcggaaaataaatattagattaaatgtgtgttaagttaataaacagattctgatggggtctgtctttccgattgacaagcagggttgaatgtcaatctcatttgtttctttttgtatgctacataggctattagaatgttacggttaatactcgagcttattaaaatgtctcttattctgcagatttctttttaagcttcgtatataaaaccgggtagagaaccgcaaccctatcgagaaacagaagtttctttgctaataaaagttaatcgggttcggaagaagaaggaaaaactaatacgattttcttaatgttgccctcaccgccctcactcacttcccgaaccgccctgttcatcggcattacatgggtgagtgagggcaaataaaaagggtgagggcaaattttgccctcaccggtgttcggtctgtcccgttcccttgctttctcttgtctcgtccccttctttctcttgttgtgtccgcttctttgtcttatagaggctttgagtttctgagcggctcactatagtggtctgactcgttcactatagtgaatggagttgttcaccatagtgagctgatttgttcacccgagtgagccgacaatgaacaaaggctgtttcggggacagacaccaagcgtttgagggataaagcaacggggaaagacggactgaacaaggggagcgttccggactacgtgcttgaatcccgtgacagatgacagacggttcttcccctttatctttgaagaagctgttttgaaatgataaatccccatttatctaccaggctgttttttaagcctaactaacgtgcacatactcgagagtcctatctgccaagggcaagtccatacataaaacaaaccgtccggcccggaatgaaaataattcactccaagtcggacggttcaaaaacaaacaaatggaaatctattcctcgtacatcttgtcaatcagccccttgtagttctttgccactacagagcgtttcagcttcagcgtgttcgtcagctcgccacgctccatgctgaacggttcggtcaggagcgtgaagcgcttcacttgctcataatgggcaaattgctgctgcaaggtatcgatacgggcacggaacaacgcctgtatcttgggatgttgcagtaactcatccatattgctgtatgcaatgcctttctccttggcataatccttcacaaagccataaacgggaactatcaaagcggaaacaaacttacgctcatcggcaatgacagcaatctggtcaatgtaacggtcaatagccagcttcgtttccaatgcctgcggcgaaatgtattttccgttggaggtcttgaacaagtctttgatacgctccgtcagatacagatggctatccttcaaataaccggcatcacccgtgtggaaccaaccgtcacggtcgatggcagcagccgttgcctccggtttcttgtagtagccggtagtgatagtcttaccacgaagaagtatctcgttgttctcgccaatcttcacctccacatcaggcatcaccgtacctacggaaccaatctcatagccttcgttgaggaagcaggaaacggtagccgtagattccgtcagaccatagcccaccaccatgtttatacctacagaatgcacaaactcgcagatttcatcgggcacagcagcacctgccgtaggaaagaaattaccgttctcaatacctatcgtcttcttcagcagagcataaatggtcttttcgtagaacttgtatttcagatgaagcatcatcggaggagtctttccttggcgcaaataatcaatgttatgcgtcctgcccaccttgatggcatccaacatcatcgccttacgcagaccggtttcctgggaaatcttctcctgcacaccggcatagactttctcccaaaaacggggtacactgcacatcagtgtagggcgtatctctttaatagtagtttggatatcttgtggacggagattgatgcagacctgcactccccgatgtatacaaaggtaggtccatgccttttcgaatacatgggtcagcggaaggaagttcatggaaacatcctggtctgtcatgaaaggcaatcggatatcatgaatgcggaaagcctctctataattgaaatgatggagcatgacacctttcggctcaccggtagtaccggaagtataaaggatattggcgaggtcatcatctgaggcagctgctgtacgttcttctacaatggcattgtgctgcaactcttcatccattgccataaattcatcaaaatagatggaagtcatgtcgcgcggatctttcaccacagcacggtcgaagatgatgagctgctgcagagactggcaaaatccgaacacgctgaaagcggcatcgtactggaactgctcgcctacaaacagataacgtatctgtgcatcgttgatgatatactgtgcctgggccggtgagctggtagcatacaaaggtatagtcaccgcccggttggcgaatgcaccgaaatcagtaaagagacattcgggtttattctgcgagaagataccgatattctcttgtggctctattcccaaagccaccattgcattggcagtccggcgtacagtctgtgagaactctttccaagagatgggtatccattgtgcagtttcatagtccctgtatttcagggctattttgtctccatacttctctgcctggcgatgcaccaggacagataaatgatgataagtcataacttttgatattggtaaatacggtacaaaggtagtggtttcatttgaaactaatttgatattagcgggtaattattcaaactttacctttaaagtatccgaccatccgttagcaaattatccacaaaagatactttctttaccattaaaacaatagaaatatattaaatatctatatatttgtggtgatatacaaactaaatcaaattcaatgaacatgaaaaaagtattgcttttaatggctatgctgaccataggtttagcaagcatcaatgctcaagacaacctcagatggggagcaacagtcggcatgaactccagtaacttctccattaccggtttcgacagtaaaataggctttcatgctggggtaaaggctgaagtaggattgcctcaaatttcagaaggagtctacctcgatatgggtgcattacttacgctgaaaggagccaaaatagacggaggctctgctgcttctatcaagttcaatccctactacctggaaattcctgtacacattggctataaatatgcagtgaatgagaactttgccatattcggcaatgccggtccttatttagccatcggtctttttggcaaagccaaggcagaaggagatattcttgacgaatatgagtttgatgataactccaccaatgtattcggggatgatgccatgaagcgttttgatttcggtctcggattaaaagccggagtcgaattcagtcagaaatatcagatttccatcggttatgactggggactggtagagaacattaaagattcaggcaacaaaaaccgcaacttgatgatatcactcagttgcttcttctaaacaatattgaaaaaacagaaaggacgtcggtttggcgtccttttcattttttatccgtaagtttgcggccagattatttatttaccgaatatgatttacgatataccgactttaacttccgaagcaatcggattgctcaaatcactgatagccattccttccttgagccgcgacgaggagaaggcggcagattatctgcagaactatatcgaaatgcaaggcatggcaacaggacgtaaaggcaacaatgtatggtgcctcagcccgatgttcgacttaaagaaaccgaccttgctgctgaattcccatatcgacaccgtaaaacccgtcaacgggtggcggaaagatcctttcaaaccaacgctggaaagtaatggaaagctctacgggctgggcagcaacgatgccggagccagtgtagtcagcctgctgcaagtattcctgacattgtgccgcaccactcaggcctacaatctgatatatcttgcctcgtgtgaggaggaagtatcaggcaaggggggaatagaatgcgtattgccggaactccctcccatacagtttgccattgtaggcgagccgacagagatgcaacctgccattgcagaaaaaggattgatggtgctggacgtaactgctaccggaaaatcgggacatgcagcccgaaacgagggagataatgctatatataaggtattggatgatattgcctggtttcgtgattaccgtttcccaaaagaatcttccctgctgggtcccgtgaagatgagcgtaaccatggtaaacgccggtacacagcataacgtcattcccgaccgttgtacttttgtcgtagacattcgcagcaacgagtgttatagcaatcaggagctattcgatgaaatacagaaacacatcacgtgtgaagccaaagcccgctccttccggctaagctcttcacacgtagctccggagcatccggtagtgcaaaaggctattgccatgaaacgtactcctttcggctcaccgaccttgtccgaccaggcactgatgccattctcttctctgaagatgggaccggggaaaagtgcccgttcacacactgccgatgaatttatctttgtcaaggagatagaggaggcgatagggatgtatctggagctgctggaagaagtaaaaatttaaattatcattatctgttcagccacggctccggattcagtttttccttctctttcctcaattggaagtgtagcaccgtacgaccattgtcggccccatccgagaagatttgtccgagagtctgtttggtggtaacatcatcgccctgcttcaccgaggccgatgacaagttgcaatagactgatatataattcccgtgacggacaaggatattgaacagtccgttcagtttaaagacagccgccactttaccattgaagatggcacgggcttgggcacccggtttcccttgtatatcgatgcccttattgtccagcttgacattgcgcaaaccttccacagaatactggccgtaatggctggtaatgatatacgcgccggtgatgggcatcggcaacttaccgcgattattagcaaagttccctgataattcacggtctgccttactcatggagtaagtttccaaaggctgtgccttcggctttgcgggcgtagaggcagttgccgttttttcgtttttttcaccagcctttttacgtgcggctgcctcacggcgcgcttcttctgccgcacgcttacgcgctttctctatttcttccgctatcagacggtcaatgcgtgcattgagctgattggcttcacggcgtttcttattcagttcgttctgtaagccccgctgtttctttttcagattggctaccaacaacttttgttccttctcctgcgcttccagcttgactttctcctcttcacgttctttcaacaatccttccttggcaaccttcacttgctgaagctcagtcttcttacggttcacctgctcctgctttttcaacacttcctcgccttgcaggcgctgataagtagcatattcacgtacatagcgcatgcgtcgataggtctgtgccaggctcttggcagagaaaatgaacatcagcttctcttcaatggagcggttcttatacaaatattgaacggacgattcgtatttcttcttcttgtcccttaggtcacgttgcaggcgggtcaactgacgttctaatgaagacaactcgcgctctatggattccacatcattattgatagtcagaatatagcgtttgcgctcttctatctgtccggtcagtgcagcaagaccgttcaactggcttcccacatccttcttggtggttatcaacagcgtttccgactctgctatctgtttctgcaaggcaccacgcttgctttccagttccttaatcagcttgttggactgggctaggagcggagaaaccggcaaaaggaggagaaagaagagaaggagaagcttcataagttatgagttataagttatgagggattatctgacaattatcaactaatcaaaggtccatcagcatttccagcagttcttccagctccacctctttatatttctgtgagagctgggtaggagtcagtgcaaaaggcttatccgagaagttggaaagttcaatctttcccttttccagagagggtatcccgagttccttgccggtaagcaccttcttgccattgggtttggaagcagcataaagcagtttctccaaatgggcaaaatccgccttcttgggcagcacatccttcagttccttacgtgttgcacggacataacgttttcccatacggtctaccaacagaatctcatccggggtgacttccatacgtgccacctccgtacgaagtatcggcatcagaaaggaaatctgcatgcattcttccttcttcaacttcatcgtaccgttcacagtaagggtggcatctttatggggtaccgtcagctgcactttggaggaaaggcaggcagattctccggacagagaacttgagtgacgcgaagtcttgcaaccggcaagccccacagccagcaacaacagcaaggacaacaggcggcatatccttgccatatcattcagcaggtttagtttcatctgatatatatttctttttttgtattttctgtttcaacgtatcagagcgattgcccttatcccaggcttgtttccagtatttcaaggcaccttccgcatcgccagtcatgtaatagatatctccgcaatgttccaagaccacgtcactgctatctttatcattctttatcgcctcatctatgtagagacgcgcctcggcataattacctttaacaaacaatatccatgcatatgtatcgagataggtggaattgttcggctcggctttcactgtcttgtagctcatctcttccgccttgtccaagtcgcggcgctccacggaaagataatatgcgtagttattcaaggcaccgatgtttgaaggattgtacaccaaagcggaatcataagccgcataagcttccacatgcagattcttggtgtgataagcatcaccgataatggcataaaaatctgatacgacctccttcttgctgtcgtccttgacatgcgacaaagccttttgacagatggcaagggcatcatccgtccgttccgcctggttgtaggcaatggccagatagaaatagaactccaacatatcgggattggactccacaccggcttcgcacaaattcattatttccttgtaatcctcctggcgcacagcttcccccagcaatgtcatacgagccgctgtgttggtagggtctatcgccagaacctggcgcagaaccggtccagcctccttgttcattcctttggaaagaagatattgggcatacagcaaaggtaattgcgcctcatcgggctcctgctccatgatacggttgaagagcgtaatgacacgtgtgctgtccttgcctgcctgctcgttctgcacgatgaactgccgcatcacattcagtttggtgtccgaagccactttcttgttcagcaacagcgtgtccaattgctgttcatacagccccttctgtccggtctcttcgtagtaagaagccaatgagtacatggccattgcattgtccggctcttcggccagcaccttcttgtaaatctcataagcttcctgctttttcccgttctgcatatagacatcccccagcacaacttgatagcgcatatcgttgggatactcttctaccagactttctatttcatgaaaggcgctcttgtcgtccttcttttgcagatagatgcggaacttctccatactgagctgttcattcttgcccatccgttcctcgagcttgttcagtataccgataactttgtcatactcttcctggcggttgtaaatctccagcaagttgtatagcgggtccagcttatccgagaaacgtaccgccatattttccaacaaggcagcggctttctccgtttcgttttgctgcatatacagattggcaagtccctgggcataccagtaattatcgggagcattctccaccgccttttccaacgcggcttgtcccaacggcacctgcttgaggtacatataatactgggccatctcatacaaagccgatgatgcgttcgggtttatcgtcaggcaatgttgcaggacatcgaaagccgcatcatagtctttttggactttcagacgggcggcttcaagaaagaagtagtcgtaacggcgctgctgttcgggggtaagctcctttacgggcgaaacgtcggctttcttcgacttcttccgtttcttcaattccttccgtgccttttcagaccgaccgtacccgctcattttctcctttgaagcttgaacgttggcagcctgcactccgtacgtagtaaagcagaaggtacctatcaacaacgcaagtattatttttactctgattctcatctatttaattataaattcttaacccgtaaaacggaacaatatccattcattttttacccgtatgcccgaaacctccggcaccgcgctccgtctcatccagcacttccacttcctgccaaagagcttgttcgtgacgcgctatcaccatttgtgcaatcctctccccatcttcgatgacgaaggtttctgcagaaaggttgacgagaataatacaaacctcaccacggtaatcggcatcaatcgttccaggggagttcagcacggtaatccccttcttaatggccaatccactacgcggacgcacttgcgcctcaaatccttccggaagagcgatataaaggcccgtaggcaccagacaccgctgcatcggagccagcgaaataggttcgttaaggtttgcacggatatccattcctgcagacagctcagtggcataagccggaagcggatgctttgatttattgatgatttgtacgttcaacatgatgttatttacgatttgacgatttactatttacgattggggctacttctattcttacaattcgagtaattcaagtttcgcaattcatcttccttttactataaacttgggcgaaaatacggctttttatacaaaatagtgatacatttgcagttaaataatagtaacttcaatcgtaaatagtaaatcgtcaaatctcaaataacatcatgatgaattggaatacgctcatatctgccaaacgcttcggactggaagagtttcaccaggaacgccatgaaaaccgctcggaattccaacgtgactatgaccgccttgtcttctctgctcccttccgccgtctgcagaacaaaacccaggtattccctcttcccggtagtgtattcgtccacaaccgattgacacacagcttggaagtatcatgtgtaggccgctcactaggcaacgatgtatcgaaagctctcattgcccgccgtccggaactgcaagacagctacctcaccgaaataggctccatcgtttccgccgcctgcctggcacacgacttgggaaatcctcctttcggacattcgggagaacgagctatttccacctttttttctgaaggaaaaggaatgtccctgaagggccaactgacaccttcccaatgggaggaccttacccactttgaagggaatgcaaatgcgttccgcctgcttacccaccagtttgagggaaggcgacagggaggatttgtactcacctactccaccttggcaagcatcgtgaaatatcccttttcatcgagtcttgcaggcaaaaagtcaaaattcggtttcttcatcacagaggaagaaagttttcgccgcatagcagaagagttgggtatggagaagcagaacgatgccccgttgaaatatgcccgccacccgctggtctatctggtggaagccgccgatgacatctgctaccagatgatggatattgaggatgctcacaaactgaaaattctgactacacaagaaaccaaagagttgcttctttcttatttctcgaaagagcgccaagcacaccggctcaaaacgatggagatagtaagtgacaccaatgaacaaatagcctatctgcgttccagcgttatcggactgcttatcggcgaatgcgtgcaagcctttgtagacaatgaagaaaagattctgaaaggagaatttgaaggaagcctcatcaaccatatatccgaggtaccagccaatgcctacaagcactgtgcagacatctccctgaagaggatttaccgttcacgcgatgtactggacattgaacttgccggtttccgcatcatcagtaccctgctcgaactgatgattgacgccgtgcgttctccggaaaaggcatattcgcaactgctcatcaatcgcgtatcgggccagtacaacataaaagcgcctgcactctacgaaagaatacaggcggtattggattacatctccggaatgacggatgtatttgcactcgatttatataggaaaataaacgggaatagcttgccagcggtataacagacgacaaacattcctccggatagtcctatgatacaaccttatttgctcccgacgtaagcttgcacgcctccggttcgctcgctatgaacgactcgatgtggcgaatgcgcttttctgccaaaatctcgtccacggcaattaggatacccgtttcctccacatctccgaaaccgtaattgatggctgtaccgaacatacgcatggtagggctgagactcatataggcattcaccagcgggggaatattataccccgccttacggatttcacaattcaaaatcttatagtcttccttaaaagagtctttacagaagagagccgccaattcattctcgtccgattccagaagcaacggcttcatcggagtaatcaggttgtccttatccgcaaagtgtttccgaagaaaataaagaatcttatcacgactctgacgatgatagctgggatacatagtcacctttccgaagaaatacttcacattgggcatgactacggtcagtgcgcccaaaccatcccacagattatccaacgcaaacagacctttactgtctgcacgcgtagactgatactccaacgtaacgaacgaacgtcctaactcgatggtcgtaggaagatagtccttcaaaaacttatccgaaaagttaaacatatgggcagttgccagaataggggcaccatgttcatcaaaacgcacatccgtacctaagatataacggtatccacccaaaatttcttctgcttccggattccagacaatcaactgcttgtacgggttgtccatgatgtcatattcatcaatatccatagacttgcccgttcctcctcccgcagcacggaatgcaatctcgcgcaaacggccgatctccttcattgtattcggagagtcttgggcagtaatgatatatatctgattatgacttctattggtcatgcgcagacgcttttcctcagtcaactccgctttcaacagctccttgcttatcggtgcaataacatcttccatatttttctgttagtagttcttctttaatataaatacggtctctctacaatttatatacaatatccttcacatattgcgcccatccggccgggcttttcgatttgtcgaaagtttgccaggggataggcttccctatggtgatggtaaatgttttatggcgattcttcagcatttcatctgccaggtaaagcatggcgatattgaacttgatgcccaacatcttacaaaaattggcaagattataaaagaagttggagttccgcccctcgaagtggatgggaactacatcacggtgggcttcgacactcttcacgataaaggtctttttccaatccaagtcacggatgaccccattctgcctacgcgaacaaagccctgcgggaaacatgatgagctgattgtccgaagcaaatcccgcctccaccattctggggaagtctttggcctgctttcccgtcttgttgatggggatgcaaagcggcgccagtccgtgcaggttcatcagcaggtcgttgaccatatatttcaccttgccaccataaaaggagcccaggacataacccagtgccactccatcctgcccacccaggggatggttggacacaaaagtataaagcccttctttaggcagattttcctccccctttaccacaatattggcatcaaggaactccagacaagctttcaggaaatctacaccgactttatctttcgactcccgcaaaaagacattcaattcctcttgatgaacgatgtgcttcaaataagaaaccacgaacttggggatatacttagactgcttcggagccttttcccgaagtatcttgtctatgtcaatcaaaaataaagagtcgtcagccattcttcttttgatgaaatgaatgcgcaaaattaactcatctttttaattaatcgcaaaaaaatgacagaaaactgcacccgaaatctatcaaatagcacctaaaaactgtcaattgatagtttttcccctaaagtatgtttgaaatccgtctgcctgaaagagaaaacttccgtaaacttgcaatatcaagattaacgaaaaaaaacatagcacatatgaacaatataacatttaaaaaagacctgctcggagttcaagacgatttattgcgttttgcatacaaacttacttccgaccgtgaagaagccaacgacctcttgcaggaaacatccctgaaagctctggataacgaagagaagtatacgcccgatactaatttcaaaggatggatatacaccatcatgcgcaatatcttcatcaacaattaccgcaaagtggtgcgtgaccagactttcgtggataccacggacaatctctatcacctgaacctgccgcgcgacgccgcttttgaaagcacagaaagcgcatatgacctgaaagagatgcaccgcattgtcaacgcccttccacgggagtacaagattcccttctccatgcatgtctccggcttcaaataccgcgaaattgcagagaagctagggttgcccttaggcacggtaaagagccgcatttacttcacccgccaaaaactacaacaagacttgaaggattttgtttaagcactcagcatataaaaccagtgatttccataaattaagaagagtacagattttagttgtatcaaaagagagaaaggcaggccgggacaatcccgcgtctgcctttcatggtctcgccccttgtatttcgtacacaaactcattcaagccgttacgctttgcgacaatattatttacaaaaatcaggatagcaatctctggctacatcccacttttccacctatccgaggcactgaaagctaaccaaagccacccgaaaactgccaattgttagattttaccccaaagagagtttgatttccgtctatcaaaaagagaaatcatccgtagctttgcatcatcaataaaacgaacaataatttaaaaaacatccattatgaataatagaacatttacccaagacctactcggagttcaaaacgacttattacgctttgcatataaattaacctccgaccgcgaagaggccaacgacctgcttcaagagacatccctgaaagctctggacaatgaagagaagtacacacctgataccaactttaaaggatggatatataccatcatgcgtaatattttcatcaacaattaccgtaaagtggtacgtgaccagacatttgtagataccacagacaatctctatcatctgaacacgccgcacgacctcacactcgacagcacagaaggcgcctacgacctgaaggaaatgcaccgcattgtcaatgccttgccacgtgagtacaagatacctttctccatgcatgtctccggtttcaagtaccgtgaaatcgcagaaaagctgaacctcccacttggaacagtaaagagccgcatcttctttacccgccagaaactgcagcaggacctgaaagatttcagataagagaatacggcaacctaagaattgtttattaattggccggataaaaaagtaaatatgcttatctttgggcaatcatgggacacaaaccaagatacctaaagaaaaaccgagtaattaataaacaacatgaagaaacagacaatcattacagcctgcacatttgcagcaatgacaatggctactcctgccgtttttgccgtacagccggccatgagtaaccacgtatgcgcctccgacgctatcaagaaagacaaccgaccggtagaatcaaaacgactgttccgttccaaagccgtagaagaacaaattcaacggatacagcagctgctgaaaaatcagaagctgtcatggatgttcactaactgctttcccaacacgctggacaccaccgtccatttccgcaaggacaagaaagacgggaagcccgacacatttgtctacaccggagatatccatgccatgtggctccgcgactcaggtgcgcaggtgtggccctacgtacagctggccaatgaagacaaggaactgaagacgatgcttgcaggagtcatcaaccgccaattcaagctgattaatgtagacccgtttgccaacgccttcaacgacggccccatccccgacggacactggaaaaccgaccttaccgacatgaacgacgaggtgcacgagcgtaaatgggaaatcgattcactgtgttatccgctacgccttgcctaccattactggaaaacgaccggtgatacaagcatcttcgatgccgagtggataaaagcaatccaaaacatcctgaccaccttccgcgaccaacagcgccgtgacggacgcggttcctaccatttccagcgggtaactgaacgcgcactggacacgatgaccaacgacggctggggcaatccggtgaaaccggtcggactgattgcatcttctttccgcccttccgatgacgccaccaccttccaattcctgataccctccaacttcttcgccgtatcttcgctgcgtaaggcagccgagattctgactgaagtcaataaccgcccggagcttgcaaaagaatgtaccgacctggctggagaagtagaaaccgccctacgaaaatacgctacctacaaccatcccaaatacggcaccatctatgccttcgaggtagacggtttcggcaaccaccttctgatggacgacgccaatgtaccgagccttatcgcactgccctatctgggcgatgtggacatcaacgatcctatttaccagaacacccgtcgtttcgtatggagcgaggataacccatacttcttcaaaggtacggcaggcgaaggcattggaggtccgcacatcggctacgacatgatttggccgatgagcatcatgatgaaagccttcacaagccagaacgatgaagagattaaaacttgcgtgaagatgttgatggatacagaagccggaaccggctttatgcacgagtctttccacaaagacaatcccgccaagttcacccgcgcctggtttgcatggcaaaacacattgtttggcgaactcattctaaaactggtgaacgagggcaagctagacttgctgaacagcatacagtaaaaaaacatttatcccccctggattctgtggatgaatgtaataatcaaccactccagggggaatattatcactcctccctcccatcatcttccggtaagtagtaacgttcacaaaatagacgggaagttaacaaaaaaagtttcagaagttaatactaaaacaagaaagagttaagaaagagctttatcccaaactttggtttttccaaaccaagcctggggatagagaaaccaagtcttggtttagatatccgcaaagctgggaaagaagtttcccacccaagacaccattccaccaacaagcgactttcaaaccaaagaccgtcatcctcaaccgaatcttttcaaaagagactacacgaatcccccaccagcaaagcgtttcaaaagcagcttcattatcaaatgaataagctatcaacaaggtgttgaaaacttcttcctaagattttagttaaaagattgtggggaattgtggggaaatgtgtatttttaccgtcgcttattataataaggtgagaaatgatacaatttttaggtaatatcgaggctaaggcggatgcaaaaggaagagttttcatcccggccaccttccggaaacagctgcaagccgcttctgaagaaagactcgtgttgcgtaaggacgtgtatcaggattgcctggtgctctacccggaaagtgtatggtttgccactcaaaaccaacttcgctgccggctgaataaatggaacgccaaacaacaaatgattttccgccagttcgtaagtgacgcggaagtcatgacccctgacgggaacggacgcatcctgctcccaaaacgttacctgcaaatggcgggtatacaaagtgatgtccgcttcattggtgtggacaacacaatagaaatctgggctaaggaacgtgccgaccaaccattcatgaaccccgacgagttcagcgaggctcttgaagaactgctgggagacgaaaatatttgttgtgacgaaaataagctataaacaacagatgatgaaagaagaaacaacatatcacatccccgtattgctgatgccgagcgtagatgcaatgaacatccgtccggacggcacgtatgtagacgtaacgtttggtggaggaggacattcgcgcgagatactgtcccgcctggaagacggcggccggctgctgagcttcgaccaggacgaggatgcggaacgtaacattgtgaacaacccgcattttacattcgtacgcagcaacttccgctacctgcacaacttcctacgctatcacggcatcgaaaaagtggatgccatacttgccgacctcggcgtatcttcccatcactttgatgacagcgaacggggattctccttccgcttcgacggggcactggatatgcgtatgaacaagcgtgccggcctaaccgctgccgacatcgtgaatacctacgaagaagaaaagctggccgatattttttatctgtacggcgagctgaagaacagccggaaactggcatctgtcatcgttaaggcacgggctacgcagagaattgccaccatcggcgaatttctggaaatcgtcaaaccactcttcggccgcgaacgcgagaagaaagaactggcaaaagtattccaggcattgcgcattgaggtaaaccaggaaatggaagcactgaaagaaatgctgtatgcggcaacagaagcgctaaagccgggaggccgcctggtggtgataacctatcactccctggaagaccgtatggtgaagaatatcatgaaaaccggcaacgtggaaggcaaggccgaaaaagattttttcgggaacgtattgaccccgttccggctagtcaacaacaaagtgattgtaccggacgaggaagagatagagcgcaatccgcgttcgcgcagcgccaagctgagaattgcagaaagagtaatgaatgattagtgactagcaatggaaaagaagcaagaagaaaagaatacggaaaaggtgaaaaaacgcacctcactgaagaacatcatcggaggcgacattctggccacagacttcttccgccgccaagccggattgttgttccttatcatggtgcttatcattatttacatcaacaaccgttacgaatgccaactgcaactgatagagatagacaatcttaaaaaagagctgatagacatcaagtacgatgccctgacacgcagttcggaattgatggagcggagccgccaatcgcgcatcgaggaatacatcgccaccaaagaaagcgatttgcagacttccactaatccaccgtacttactaaaataatggagaattgaggattaaagtaatttcaatagtacatcgtaaatcgttaaatcgtaaataacattggctgtaaataaaaaaaacataatgacccgttacttcttcgtcgtcctactcatggggctggtggggatagctattgttgtgaaaggcgccatgattatgtttgccgagcgacagtactggcacgatgtagccgaccgcttcgtaaaagagaatgtaacggtgaagcccaaccggggaaatatcctgtcctcggatggcaaactgatggcaagttcgctgccggaatataaaatatatatggacttcatgtccggcgaaagggacgagaagcgccgcaaaaaggatcagcagcgcaaggattctatctggaaagccaatttcgattccatctgtatcgggcttcatcagatttttccggacatcagcgccgccaccttcaaaagccatctgcgcaaggggcgggagatgaagagccggaactacaacattcttcccaaccgcaaccggcgcatctcttacattcagtataaggaagccaagcggttacccgtattcaagatgaacaagtacagaggggggttccacgaacagatatacaaccagcgtaaaaagccgttcggttctttggcagcccaaaccctgggccgtctctatgccgatacagccatgggagcccgtaacggcattgaactggccttcgacaccctgctgaaaggacggaacggtattacccaccgtcagaaggtgatgaacaaatacctgaatatcgtagaccttcccccggtagacggttgtgacatcatatccaccctcgacgtaggcatgcaggacatctgcgaaaaagccctggtggacaagttgaaggaaatcaatgccaacgtcggggtagccgtactgatggaagtggctaccggagaagtaaaggccattgtcaacatgatgaaagccggagacggcaattactacgaaatgaacagtaatgccatcagcgatatgttggaaccgggctccaccttcaagacagcctccattatggtggcactggaagatggcaagataaccccggataccgaggtagacacgggcaacggtattatgaatatgtacggcagcaagatgagagaccacaactggcaccggggaggttatggaaagatagatgtgacacgtattctggaagtttcttccaatgtgggcgtctcctacctcatcgacaagcactacaaggataatccgcagaagttcgtggacggtttgaagcgcatgagcatcgaccagccgcttcatctgcaaatacccggtgaagggaagcccaacatcaaaggacccaaagagcgttattttgccaaaacgactttgccgtggatgagtatcggctacgagactcaggtacctcctatgaacatactgaccttctacaatgccatagccaacaacggggtcatggtacgccccaagtttgtgaaagcagcggtaaaggacggtgaggtagtgaaagaatatcctacggaagtaatcaatcccaagatatgttccgaccataccctgacacagatccgcgaaatccttcggaaagtggtatcgcaaggtctggcaaaacccgccggcagcaagcaattctccgtatcgggcaagacgggtacggcacagatttcacaaggagccgccggatataagtcgggacgggtgaattaccttgtaagtttctgcggatatttcccctcggaagcacccaaatacagttgcatcgtttccattcagaagcctgggttaccagcttcaggcggtctgatggcaggtagtgtcttcgggaaaatagcagaaagagtttatgccaaagacctgcgttttgacatacgcagtgccatagacagtaccaccaatgtgattcctcccgtgaaagccggagagatgaacgaagcactccttgtactgaatgatttgaaagtgcccgttcagaaacagttcgccggacaaaagaaaaaggaacagtgggggcatacacaagcagctccgtcggcagtcatcctgcaagaccaggaaccggcctcgggcaccgtgcccagcgtggtaggtatgggagcgaaagatgctgtctaccttttagagagtaaagggctgaaagtaaggctaaacggcgtaggacgggtgaggaaccagtccatagcaagcggtagccggatagtgaaaggacaaaccatagccctgacactacgttaacatgagaataaacaagatttggatatacactatatataataaggtatgagattaagtgatttgttgcaaacaatacagccggtccggattaccggaagtacaagcatggagataacgggggtgaatatagattcccgcctgataggaaccggacatctgttcatggccatgcgtggtacgcagaccgacgggcatgcctatattccggctgccatcgataaaggggctgttgcagtattgtgtgaagaattgccggaagagcttaaggccggcatcacctacattcaggtgaaagacagtgaagatgccgtagggaaagtggctaccactttctatggcgaccctacatccaagatggaactcatcggcgtgaccggaaccaacggaaaaacaaccgttgccaccttattatataatactttccgctatttcggctacaaggtcggactggtttccactgtatgcaattacatcgacgacctgcccgtaccgaccgaacacaccaccccggacccgataaccctgaaccgcctgcttggcgaaatggccgattccggctgcaagtatgccttcatggaagtcagttcccattccattgcccaaaagcgcatcagcggtctgaagtttgccggcggtattttcactaatctgacccgcgaccatctggattatcataaaacggtggagaactacctcaaagccaagaaaaagttcttcgacgaactgccaaaaggagctttcagcctgaccaacctggatgacaagaacggacttgtgatgacgcagaatacccgttcgaaggtatatacctactctttgcgtagtcttagcgacttcaaaggcaaagtcttggagtctcatttcgagggaatgttgctcgacttcaacaatcacgaactggcagtacgtttcatcggaaagttcaatgcctacaacctgctggcggtattcggtactgccgtattgcttggcaagaaagaagaggatgtactggttgccctcagcacgctgcatccggtaaccggccgcttcgatgccatccgttcaccgaaaggctacaccgccattgtggactatgcgcatactccagacgccctggtcaatgtattgaacgccattcacggagtgctggaaggaaaagggaaagtgattaccgttgtgggcgccggcggcaaccgcgacaaaggcaagcgtcccatcatggccaaagaatccgcccgcttgagcgaccgggtcatcatcacctccgataacccgcgctttgaagagccgcaggacatcatcaacgacatgctggcgggactggataaagacgacatgcagaaaaccatcagcatcaccgaccgccgcgaagccatcaagacagcctgcatgctggcacagccgggagacgtgattctcgttgcaggcaaggggcatgagaattatcaggagattaaaggcgtgaaacaccattttgacgacaaagagatattaaatgagataatgtgctgatatgccaatgtgctaattgccatgcggcatgtaggatattcattcctttaccagcagatataccagactatcaattagcatattggcacattagcacattaaacaattaaataattaacatcatgttatactatttatttcaatggttagacaaatatgacttccccggtgcgggcatgtttggctatacatccttccgttcgttgatggcaatcattctggcattgctcatttcgagtatctggggagataagttcatcaatctactgaaacgcaagcagattactgaaacgcaacgtgatgccagcatcgacccgttcggcgtaaacaaggtgggagtacccagcatgggcggtgtcatcattatttttgccatactcattccttgcctactactgggcaaattgagcaatatttatatgatattgatgctgattaccacaatctggctggggtcgctgggctttgccgacgactacatcaagatattcaagaaggacaaggaaggcctgcacggtaagttcaaaatcatcggtcaggtaggcttgggacttatcgtcggactgactctctacctcagtccgcaggtggttatccgcgagaacatagaaatagagaaaccggacggacagatagaagtggtgcatgccgccaaggaaatcaaggcaacacagaccaccatcccattcttcaagagcaacaacttcgactatgccgacctagtgggcttcatgggtgaacatgcccagacagcaggttggatactgtttgtgattatcacgattttcgtagttaccgccgtcagcaacggagccaacctgaatgacggaatggacggaatggcggcagggaactctgccattatcggactgaccttgggaatactcgcctacgtatcgagccacattgaatatgccggctacctgaatatcatgtacattcccggctcggaagaactggtaatctttatctgtgccttcatcggtgcacttatcggcttcttgtggtacaatgcctatccggcccaggtattcatgggcgatacgggcagtctgaccattggaggaatcatcgcagtatacgccatcattattcacaaggaactgctgatacccatcctttgcggtatcttcctggtggagaacctttcggtcatcctgcaacgcctctattacaaggcaggcaagcggaaaggcgtgaaacaacgtctcttcaaaagaacaccgatacacgaccacttccgcacttccatgagcctgatagagccgggatgcagcgtagtattcaccaaaccggacaagctgttccacgaatccaaaatcaccatccgcttctggattgtgacgattgtattggcagcgataacgattataacattaaagattagataataattattcaatatgctaatgtgccaatgtgctaattgccatgcggcacgacagcgcagctcattagcacattggcacattaatcatattagtacattatgagaattgtagtattaggagctggcgaaagcggcgcaggcgctgccgtactggccaaagtgaaaggattcgacacgttcgtctccgacatgtccgccatcaaagacaaatacaaggaactgctggataaatacggcattgcctgggaagagggacaccacacagaagagctgattctgaatgctgacgaagtagtgaaaagccccggtattcccaacgacgctccgctcattatgaaattaaaggaaaaaggtacgcccatcatctctgagatagagtttgcgggacggtacactgacgcaaagatggtctgtatcaccggctcgaacggaaagactacaaccacctcgctcatttatcacatcttcaagagtgcaggcctgaacgtcggcctcgccggcaacatcggcaacagcctggccttgcaggtagccacggagcagcatgattactacgtcattgagctgagttccttccagctggacaatatgtataacttccgtgccaacattgccgtactgatgaacatcacaccagaccacttggaccgttacgaccactgtatgcagaaatatgtggacgccaaattccgcatcacccaaaaccagacaccggaagacgcttttatcttctggaacgacgaccccatcatcaagcgcgagctggacaagcatggcctgcgcgcccatctctacccgttcgctgccgtgaaggaagacggggccatcgcatacgtggaagacggtgaagtggaaatcaacgaaccgatagccttcaatatggagcaagaggagctggcgctgcacggcacacacaacctatacaattcgttagccgccggcatctcggccaatttggccggcatccggaaagaatatatccgcaaagccttgtccgacttcaagggagtggaacaccggttggagaaagtagccaccgtacgcggcgtgagcttcatcaacgattccaaggctacgaacgtaaattcctgctggtatgccctacaaagcatgaccggcaaaaccgtacttatcctcggcggtaaagacaaaggaaacgattacacggaaatcgaagacctcgtacgcgaaaagtgctctgccctggtctatttgggattgcacaacgaaaagctgcacgccttcttcgaccgtctgggactgcccgtagccgacgtgcagaccggcatgcaggatgccgtagaagcagccttcaagctggcaaagaaaggtgaaaccgtgttgctcagtccttgctgtgcctccttcgacctcttcaagagctatgaggaccgcggcgatcagttcaaagcatgtgtcagagcactataagatacagatgccgtaacagtcctattacgaattccgtaacaagaacggcaacttttaattctttaattattaatttttaatttgcgaagcattggatttattaaagagcatattcaaaggcgataaagtgatttggattattttccttttcctttgcctcatctccatcacagaggtattcagtgctgccagtacgctgacctacaagagtggcgaccattggggaccgattacgcaacacagcatcctcctgatggtaggcgccgtcattgtagtactggtacacaacatcccctataaatggtttcaggtgttcccggtattcctgcttccgatatccatcggactgctggcttttgtgatgctgatgggattcattaccggcgaccgcgtaaacggcgcagcccgctggatgaccttcatgggtattcagttccagccgtcggaaatagcgaagatggccgtcgtcatcgttaccgcctttatcctctcgaaagggcaggatgaagacggtgcaagtccgaaagcctttaagcgcatcatgattattacctgcattgtctgtggccttatcctgccggaaaactactcgacgggaatgctgctcttcggaacggtctacctgatgatgttcatcgggcgggtatctgccaggaaactgctgatactgggaggagggattgtggcattcgtaacagtctttgtcgccttcctgctggccacgccagacaagacattggaaaatataccgatggggcaccgcttcaccactgtaaaatcccgtattgcagactttaccaacaaggaggaagttcctgccgccaaattcgacatcgacggcgacgggcaagtggcacatgcccgtattgccgtagctacgagcaacgttgtaggcaagggtccgggaaactccgtacagcgtgactttctgagccaggcattctccgatttcatctatgccatcatcatcgaggaactgggactggtaggcggaatagtcgttgtgttcctttatgtctgcctattggtgcgagtgggccgtatcgccaaaaaatgcgaccgcactttccccgctttcctcattaccggaatagccttgctgctcgtcacgcaggcgctgttcaacatgatggttgccgtaggtctggcacccgtcacgggacaaccgcttccactcatcagcaagggtggtacatccactttcatcaactgtgcctacatcggcatgatactgagtgtcagccgctatacagccaagctggaggaacagcggatgcatgatgcgcaagtgccgatgctgatagatgccggaaatgccgagaacccggaacaaccggccgatagcgaagcacagacagccgccgagccgacagcaaaggtactgaacagtgatgcggagtttgaataacagcctctcccccaacccctcccccgtagggaggggagaaaagaataattgagtaatggagagcatgccaataatacaaaaataaaaaagaacaagaatatgagtaaagaggcgaacaactatacaaccaaaagtaactctacccctctccctacggggaagggggtgaggcttatcatcagcggcggcggtaccggaggacatatctttccggccatctccatcgctaacgccataaaagagttgtgtcccgacgcggagattctcttcgtaggtgccgaaggaagaatggaaatgcagcgtgttccagatgccggttaccggattataggcttacccgttgccggattcgaccgtaaacatctgtggaagaacttctccgtactgctgaaactgatacgaagccagtggaaagcacggagcatcatcaaggagttccgcccgcaagtagccgtcggtgtaggtggctatgccagtggtcctacgctgaaaatggcgggcatgatgggtattcccacgctgatacaagaacagaattcctacgccggtgtcaccaacaagctgctggcacagaaggcatgcaagatttgcgtggcctacgaaggtatggaaaaattcttcccggcagaaaagataatcatgacaggtaatccggtgcgccagaacctgctcggacattccatcctgcacgcagacgccgtaaagtacttcggattgaacccggaaaagaagactatcctcattctgggcggcagtcttggagcgcgtaccatcaaccagacattgactgccggactggatgtcattcgtacccaccccgacgtacagtttatctggcagactggcaagatatacattgaccaagtcagagaagccattacagccactacgggagaagccgtacgtaacccgcatatcagtgccattccgaatctgtatgtgacggacttcattaaggatatggcaaacgcctatgccgctgccgatctggtgatttcacgtgccggagccggttccatctccgagttctgcctgctgcacaagccggtcatcctggttccctcacccaatgtggccgaagaccatcagaccaagaatgcgctggcgctggtggataaggatgcagctatctatgtaaaggatgtggaagcgaaagagaagctgctgccggtggcgttggagacaatcgctaaccccgagaagctgcaagacttgagcaagaatatcgccaagctagcgttgccggactcggcgacaattattgcgaaggaggtattgaagagcctctccccttgtccctcccccgtagggaggggggaatagatagtactgctatcgttctttttataatatcatacttttggaagaagagtttgaagaaaaaatttgaatatgaataaaaatataagcaatagtaactcatctcccctccctacgggggaggggcagggggtgaggcttgaagccattcgctccgtttatttcgtcggtgccggcggcatcggcatgagcgctctgatacgctatttcctctctaaaggaaagacagtagcgggctacgaccgtacgtcgagcgaactgacagaacgtctgattacggaaggagcacagatacactacgaagaggatatcaaccttattccggaggagtgcaaagacaaggcaagcacgctcgtggtctatacccccgccgtgccacaagagcatgcagaactgacctatttccgtgaaaacggtttcgacatacataagcgctcccaagtattaggcattataacccgcagcagcaaaggcctgtgcgtggcaggtacgcatggcaagactaccaccagcaccatggctgcccacctgctgcaccagtcacacgtgggctgcatcgccttcctcggaggtatttcgaagaactacggtacgaatctgctgctttccgccaccagcccttataccgttatcgaagcggatgagttcgaccgctccttccactggctatcgccctggatgagtgtcattactgccaccgaccccgaccacctggatatatacggcaccaaagaagcctatctcgaaagcttccgccactacaccacgcttatccagccgggcggcgccctgattctgcacaaaggactggaaatgcaagccgacgtacaaccgggcgtcaccacctatacctactcgcgcaacgaaggcgacttccatgccgagaatatccgcatcggaaacggtgaaatcttcatcgacttcgtggcgcctgacacccgcatcaacgatattcagttgggtgttcccgtcagcatcaacatcgagaatggtgttgccgccatggcactcgcccatctcagcggtgccaccgacgaagaaatcaagcaaggcatggcaagcttccgcggagtggaccgccgtttcgacttcaagctgaagaatgaccggattgtatttctcagcgactatgcccaccatccggcggaaatagcccaaagcgtgaagtccgtccgcgagttgtaccaagacaagaagataaccgtcatcttccagccccacttgtacacccgtactcgcgacttctaccgtgactttgcagacagcctttccctatccgacgaggtgattctgacagagatataccctgcccgcgagcaaccgattcccggcgtgacgagtcagctgatttatgacaacctccgccccggcatcgagaaatgcatctgtaggaaagaagacgtcctcagcctcctcgcccaaaagcacaccgaagtattggtagtgctgggagccggagacctggacaactatgcgccccaaatcacccaactattatcagaaaaatatcatggttaaaaggattctactttctatcgttctgttgcttgtcattgcttacctggtagtggctgtcacagctttcaaccgcaagcccacctcgcaggtgtgccaagacgtggaactggtgataaaagacacggtatatgccggcttcatcacgaagaaggaagtagctaccctgctggaaaagaaaggcatcagccccattgggaaagacctggaacgcgtgcgtaccaagaccttggagcgcgaacttgccaagcatcccctcatcgaccaggtggagtgctacaaaaccccgagcggcaagctctgcatcgaagtgacccagcgcacccccatcctgcgcgtgatgagcgccaacggcgaaaactactatctggacaacaaaggtaccgtgatgccccccgatgcaaagtgcgttgcacacctcgccgttgtaaccggaaatgtagaaaagtcgtttgccatgagggatttatataagtttggtgtatttttgcaaaagaattctttttggaatgcacagatagagcaaattcacgtattgcccggcaagaacatcgagttagtgccccgtgtcggcgaccatcttatctatttaggcaagattgccggattcgagaagaagctgaaacgtgtaaaggcattctacgaaagaggattgaaccaggtgggttggaacaaatactcccgtatcagcgttgaatttgataatcaaatcatctgcacaaagagagagtagagaaagggatttactaatagtccttctttatcaaagcgcagcaaatagtaaattgtaaatagtaaaatagtaaataaatagatatggcaacaacagatttcatcgccgctatcgagttgagttcttccaagatttccggtatcgcaggaaagaagagcagtgacggaagtatccaggtgttggcttatgcacgcgaagatgcatccccgtttatacacaaaggggccatctacaacattgacaaggccgcacaagcgctgacttccatcatcaacaagctggaaggccagttgaacaactccatcgccaaagtatatgtaggcatcggcggacaatcattgcgcacggtgaggaatgcggtaagccgtacgctggaggaagagagcatcatttcgcaagaactggtagacgagatttgcgacgagaaccgtgatgtacccttggtagacatgagtgtgctggatgtagccccgcaagaatacaagatagacaacacgctgcatgtggagcccgtaggagttgccggaagatacatcaccgggcagttcctcaacatcgtggcgcgtgcctcgctgaagaagaacctcgaacacagcttcgagcaagccaaagtggaaattgccgacgacctgctcgtggctcccactgcgttggccaaagccgtgctgaccgaaaacgagatgcgttcaggctgtgcactggtggacttcggtgccgacaccaccaccgtgctggtctataagaacaatatcctgcgctacctcagcgtactgccgctgggtggaaacaacattacccacgacatcacttccctgcaaatggaagaggaagatgccgagaagctgaaactgcaatacggtgatgccctctacgaggaggaagaagacgccgagacccctgccgtatgcacgtcggaagacggccgtaccttcgaactggccctgctgaacaatattatcggagcacgtgcagaagaaattcttgccaacgtatggaaccagttgcaactttccggctacgaggacaaacttttctccggtgttgtattcaccggtggaggagccaatctgaagaatcttgagaaagccttccatagagtaagcaagattgaaaaggtaaagaccgccaagttcgtacagaccaccgtccacacacgcagcgacgagcccaagaaggacggcatgcacaacacactgctgggcctgctggctgccggcaacgagaattgctgcctgcaagaggtgaagccggtgcagcagcctgcctccaatgttcctcccaaaccggtcgacatattcgttgacgacgaagcgctgaaagagcaggaagccgccgcacgcgccgccaaggcacagcgcgagaaggaagagaaagaacgcaaggagcgtgagcgcaaagaaagggaactgcgcgaaaaggaagaaaagaagaagaaaaagaaagaaggccccagctggttcgaaaagactttcaacaagctttccaacgaaatcttctcggacgacgatatgaagtaataatgtgataatgtgccagaaaattaagttattatggaagatatagtacaattcgatttcccgaccgattcaccgaaaatcattaaagtaatcggtgtaggtggaggtggcggcaatgccgtgaaccatatgtaccgggaaggtatacacgacgtgacgttcgtactgtgcaacacagacaaccaagcgttgaaggactctcccgtgcccgtgaagttacagcttggaaaagaaggcctgggagccggaaaccgccctgcccgtgcccgcaaggcagcagaagagagcatcgaagacatcaagaatatgctgaacgacggcaccaagatggtattcatcactgccggaatgggcggtggtaccggtacgggtgccgcacccatcattgcacaaaccgccaaggaaatggacatcctgaccatcggcatcgtcaccatccctttccgctgggagggcgacaagaagatagaccaggcactggatggcgtagaggaaatcagcaagcacgtagatgccctgctggtcatcaacaatgaaaagctgagcgagatatacagcgagctatccgtagacgacgcgtttgacaaggccgacgacaccctttcggtagccgccaagagtattgccgaaatcatcaccctgcatggaaaggtgaacctcgacttcaacgacgtgaaaacagtgctgaaggacggcggcgtagccatcatgagtaccggctacggcgaaggtgacaaccgtgtcagcgaagccatcaagaacgcgcagcactcgccgttgctgaacaacaacgacatcttcaactccaagaaagtactcctcaacatctcttacagtgcacaatacaagctgatgatgagcgagatggacgaggtgaaggagttcatgaaccgtttcagccgcgacttcgaaaccaaattcggtatggccattgacgacaagctggaacagaaagtgaaaatcaccctgcttgccaccggtttcggtatccaggacatccacatgaaggagatggacgaccgcatcacccagcgtaccgccgaagaacagcaacgccttgccgagctggaggaggaagaggaacagagacgaaaccgccgcgaagtgtactatggcaaggatgccaatgcccgttcccagcgcagccgccgtcgccatatctatctcttcaatcccgaagacatggacaacgccgacatcatcagcatggtagagaattctccgacctatctgcgtgacaaaagcacgctgaacagcatcaagatgaaggcagagcaggaagggcagctcgccaccgaagccgcgcaagaggcagaaggcggtgcagggggagtcatcaccttctgatttttccgttcccgatatgtaaaaccatcctcctccccttcgggggaacaggagtaaacctataacaatatggatttatttgaaaaagtcagcgaagacattaaaacagccatgaaagccaaagacaaagtggctctcgaaacattgagaaacgtaaagaaagtattccttgaagccaaaaccgctcccggagccaacgataccctgagcgatgcagatgctttgaagattatccaaaaactgaccaagcaaggcaaagacgccgctgaaatctatgtacagcaaggtcgccaggacttggcagacgatgagctggcacaagtaaaggtgcttgaaacctatctgcccaagcagatgagcgccgaagaactggaggcagccttgaaggaaatcatagccgaagtcggcgccaccagcggcaaggacatgggcaaggtgatgggtgtagccagtaagaaacttgccggacttgccgaaggccgcgccatctcagccaaagtaaaagagttgctgggataaagaaatacacttcccctatcatataagccgtgcttcaacagagggactcagcgtccaaagtctgttgaacacggctttttacataccaatccatatcctcccccacaagagattatacactatctatcaacgcattatatttaccgaccgtttaccataagatgtaaaagccgttacctaatgatgtaacgacggttaccctatattgaaacggtcgttaccctatattgtaacgaccgttacagcttatcgtaacgacccttacagcagtaagtaaaactccctactcctataataaaggcagcgcacacttattgggccgttacatcgacgataatcaatcaaaaagctccttcaatacctcaagtgatttcaataccgggaaatccggcagatgcagacgataatattcattcataatgttcaggcagcgggtacgctccaaccggttcatggtgaaaagatgcatcgtttcataattcatgcgcatcagctgtgtcaggcgggccgcctcctcgggagcgatgtaattggaatgaagctgcggacgcaagggagtgaaacaagcattctgcaaatcgaagtaatctccggcatgataatcctccaggttgggatacaaaccgagaaaacgggaaaggcgcatcaggaagaccagatggaaattggcaaacccctccctgcattcatccagccagatgacggaatgatacagataagcaaacagcggacggttctctgcctcctcccggacggcgcgataaaggaattccgaaagaaacaaagcgatggcagatttgtagggatcgtagggaagcgtggcgaaaggataaagagacttcgcctccttcaccttatatatagtggcattaggacggaaatcggcttcaagttccaccaatgccagcggctggaagagtaccggcttcaccgccgccttgcgcgaacggggtatggacaccatgaaggaagccctgccagccacctccgtatagatgtctgcaatgagagatgtatccttatatttcaaggtatgcagcacaattcccagtgttttctgtaacattcccgatttctttatctggtttcaatctgataacaaagctacaaaaaaagcccgaaagaagagaaacaaaaggagaagaataaaaaaataaggtaaggagtgtaaaaaaataaaagcacataccacactgattttcagcagataaaattccaccctaagacaaaaagcaacaaaaagctatatttttttcttgcgaatgttttggtaattcaaaaatagtttctacctttgcatccgcaaacgagaaataaaggctctttgcaagagcggaaacgctcaccaaaggatggcccgttcgtctatcggttaggacgcaagattttcattcttgaaaggggggttcgattcccccacgggctacaaaataaaaaaataaacgaattaaaaaagattagtcgagatggcaaatcataaatcatcactgaagagaatcagacaagaagaaacaagaagacttcacaacagatattatggcaagaccatgagaaacgctgttcgtaagcttcgtgctactacagacaaagctgcagcaacagcgatgtatccgggtatcacaaaactgttggataaattggctaagactaatgtaatccacaagaacaaggctaacaacctgaagtcaaaattggctatctatatcaacaagctggcttaagttgactgttacacaaaagatattacaaggctggactttttagtccggcctttctcatttatacctctctatttacctgcttccacacaagtttcttttctgtgctaaaaagctgtaaactacccgaatttatccgtttgtttagcaccatatcccgaggattttcactatatttgctctgttattacaataaggaaaaaagattatgactgaagaacagattcactccaataacgggagctattctgccgaaaacatccaggtactggaaggtttggaagcagtgagaaagcgtcccgcgatgtatattggcgacattagcagcaaaggacttcaccacctggtgtacgaggttgtggacaactccatcgacgaggcacttgccggctattgcgaccacatcgaagtcaccattaacgaggacaactccatcaccgtacaagacaacggacgtggtatcccggtagactatcacgaaaaggaaaagaaatccgcactggaagttgtaatgaccgtactgcatgccggaggtaagttcgacaaaggttcctacaaggtatcgggaggtctgcatggtgtaggtgtatcttgcgtaaacgccttgtctacacacatgactacccaggttttccgtaacggaaaaatctatcagcaggaatattcctgcggacatccgctctactccgtcaaggaagtgggcacaacagacattaccggtacacgccagcagttctggccggacgataccatctttacggaaacagtctacaactatgatattcttgccacccgcatgcgcgagttggcttacctgaacgcaggcatcaagatttcactgaccgaccttcgcgtaaaggacgaagagggaaatgccaagaaggaaatcttctactcggaagaaggcctgaaggaatttgtgcgctacgtagactcctcacgcgagcacttcatgaacgatgtaatctacatcaacaccgagaagcaaggcacaccggtggaagtagccatcatgtacaacacttcttataacgaaaatgtgcactcttacgtaaacaacatcaataccattgaagggggtacccacttggcaggtttccgccgtgcactgacccgtacgttgaaaaaatacgccgaagacaacaagatgctggagaaagccaaggtagagattgcaggagacgacttccgtgaaggactgactgccgttatctccatcaaggtggcagagcctcagttcgaaggacagaccaagacaaagctgggtaacaacgaagtgatgggcgccgtagaccaggctgtgggcgaggccctcacctactacttggaggaacacccgaaggaagccaagctgattgtagacaaggtgattcttgccgcccaggcacgtatcgccgcacgtaaggcacgcgaatccgtacaacgcaaatcgccgatgtccggcggtggcatgcccggtaagttggccgactgctccagcaaggacccggaagaatgcgaattgttcctcgtcgagggtgactcggcaggcggttcagcaaagcaaggccgtaaccgtgcgttccaagctatcctgccgcttcgcggtaagattctgaatgtggaaaaggccatgtggcacaaggcattcgagagcgacgaagtaaacaatatcatccaggcgctgggcatccgtttcggcgtggacggtgaagacagcaaagaagcgaacattgacaagttgcgttacaagaagattatcatcatgaccgatgccgacgtcgatggttctcacatcgacacgctgattatgacgcttttcttccgttacttcccacaagtcatccagcagggttgcttgtacatcgccactcctcccctttacctttgcaccaaaggcaaggcgaaagagtattgctggacagaccagcagcgccagaagttcatcgacacttacggcggcggttcggaaaacgcagtacacacccaacgctacaaaggtttgggtgaaatgaacccggaacagttgtgggaaaccaccatgaatccggaaaaccgcatgctgaagcaggtgcatcttgaaaatgcggccgaagccgactatatcttctccatgctgatgggcgaagacgtgggcccgcgccgcgatttcatcgaaaagaatgcaacgtatgcaaatattgacgcttaattaatttaataaccaacctcacatcttacaacgaggaagccccggacgggcaggataatcctgctgaccggggcttttcctttatccctcttctcttccaaagaagagacccgtctccatacagaagaactataggattccttgtttcttcatctcttccactaccaattccaactctgcataccagtcctcaccaaacttacggataagcggctctttcaggaacttgtacacgggcagattttccttttgtcccaacaacatagcggctttgcagacatcccaacgatgatagttcactgccttatagagtccgtagttccccacccttatcggatagagatgacaggatatgggtttgtagaagttggtcctaccttcacgataagccttttcgatggcgcaatagcaacagcctttatcatcatagcaggtaaagacgcaatccttgttgttcacaatagaagtcaccaggtcaccttcacaatcggtatagacaacaccttgctcctctatcacagcgcgggcttcgggagaaagctcgtcccaaatcagcggaagtacctcttccagtttctccacctcgtccagctccacgggagcaccggcatcgccctcaatgcagcaaatcccctggcaaacacccaagtcacacaagaacttctcgcgcaagacatcgaaagaaaccacaacatcaccaatctgtatcataatcattctattaaaaaaagacgcggattatccggattgcacagactcaactttaagagcatccgtggaatccgtataatccgcgtctaaatattgttacggccttgacgccttacttaatcaaatccttaccagtcatttcagccggctgctccatacccaagatatgcagaatagaaggagctacgtcagccaatacaccgttctcaaccttggcgtccttgtttgcagtaacgtaaacgaaaggaacgggattcagagagtgggcagtattcggagtaccatcctcattcagagcgtggtcggcattaccgtggtcggcgatgatgattacttcataatcgtttgccttggcagcttcaacagtatctttcacacattcgtcgatggctttcactgccttctcaatagcttcgtagataccggtatgtcccaccatatcaccattggcgtagttcaccacgatgaaatcgaacttctgggtcttgatagcttcaaccaacttgtccttcacctcgtacgcactcatttcgggcttcaagtcgtaagtggcaaccttcggagaaggaaccaggatgcgctcttcagcatcgtaaggagtctcgcggccaccgttgaagaagaaagtcacgtgtgcatacttctctgtttcggcaatgtgcagctgggtcttgccattggcagcaaggtattcgcccaaggtattctgtacgttctccttatcaaaaaggatatgcacacccttgaagctggcatcgtacggagtcatgcagtagaactgcaggcccggaatagtctgcatgccttgttcgggcatatcttgctgggtgaggacaacggtcaattccttggcacggtcattgcggtagttgaagaagattacaacatcaccttccttgatggtaccgtcgaagccaccgttcacaatcggcttaatgaattcatccgtaacgccttcgtcgtaggactcctgcatagcctggaccatatccgtagcaaccttgccttcaccgtttaccaacaaatcgtaggcaaccttcacacgttcccaacgtttgtcgcggtccatggcatagaaacgtcccacgatggaagcaatcttgccggcagacttctcgcaatgagcagtcaactgctcaatgaaacctttaccactcttcgggtcggtatcacgaccgtccataaaacagtggatgaaggtattctcgataccgtattccttggaaatatcgcagagtttgaacaaatggtcaaaagagctgtgcacgccaccgttgctggtcagtcccataaagtggatattcttgccgttttcctttgcatatgagaaagcagaaacaatttccttgttcttcagaatgctgccatcggcacaagcacggttaatcttcaccaaatcctggtaaacgatgcgtccggcaccgatattgaggtgacctacttcagaattacccatctgtccgtcgggcaaaccaacgttttcaccgcttgcttgaagctcggaatgcggataagttgccaacagactgtcccaatacggagtaggtgtattgaaaatcacatcatctttgccttgatcgccgatgccccagccatcaagaatcattaaaagggctttcttactcataatattaatcgaatttaattgtataatctttttgtatgatacaaacgttcttttatagtaggaacctgttttttgcgttgcaaaggtacaaaaaacagccgttaaagcgtactgtttcaaatgatttatgtacttttgccacgcttaaaaaataaaaaaacaagaaatatggacgattcaaacccacgaacgtgcaatagtattcaccaataaaacgaacggagacgttgactgcaatgcctctgttccaactagaaaggaggcaaacaatgagaaagtatctctacagtgaaaatggcttcactgaaaaggccgaatggcaacccaactgctgggtcaacgtagaatgcccggacaacgatgatttcaaattcctaaccgaagagctgaaagttcccgaatcattcctggaagacatagccgacgtggacgagcgcccacgtacggaaacagaagacaactggctgctgaccatcctccgcatcccgatgcagagcaaccaacgcggcgtgccgttcatcactgtgcccatcggcattatcaccaatgacggaatcatcgtttctgtctgctatcaccacacggagctgataccggacttcattcagcacacccgccggaagaacatagtcgtcaacaataaactggatttgattctgcgaatcatctactcttccgccgtctggttcctgaagtatctgaaacagataaacaacgatgtggccaccgccgaaaaagagctggagaaaagcatccgcaacgaagatctcctgcaactgatgaagctgcaaaagacgctggtctacttcaacacttccatccgtggcaatgaagtgatgataggacggctgaaaaacatctttcaagacaccaattatctggatttggaattattggaagacgtggtcatcgagttgaagcaggcatacaataccgtaaacatctacagtgatatcctgacgggaaccatggacgccttcgcctccatcatctccaacaatgtgaatgccatcatgaaacgtatgacaagcctcagcattacactgatgattcccacgttgatagccagtttctacggcatgaatgtggacatccacctggagagttttccgcacgcgtttattttcatcatacttttgtcggcaatattatcagcagtgacattcgtatggttcagaaggattaagtggttctaaacagcatcattgtccgaagttcagcgacaactgcccatcccccaagagattaaacgtcaagcgatgatagggtgtagtaccccgctcagcaatggcggcacgatgtttcttggtgggataccccttgttacgattccagtcataatacggatattcctcgtgaaggcggttcatgtagtcatcacgataggtctttgccaaaatggaggcggcagcgatggaaaggtacttcccgtctcctttcactacggtagtatgcggcaagtcccgatattttttaaagcggttgccgtctatcagcagatgttgcggacggacattcagttggtcaacagcacggtgcatggcaagaaaggaggcattgagaatattgattttgtcaatttcttcgggagagacgacgcccaccgcccatgccagagcctctttttcaatcacttcacgcaaggtatagcgttgtttttccgtcagctgcttggagtcgttcaaaagttcattcttaaagtccgttggcagaataacagcagcggcatagaccgcaccggccagacagccgcgaccggcctcatcgcatcctgcctctatcaaatctttattcaaataaggtaataacatatatatcgctatctttgaggcacaaagataaatctttttggagggaaaccggacttctaagaagaattaattaaatttgcagaaacaagacgatgccatgaagaaaaacctatgtctactactcgtatgtcttctgtcagcagctgccccactgcaagctcaagacatgcagcaagcacagaaattgattgaccaagcacagaaatacctgtacaacaaccccaaacaagcttcctactatgcagctcaggcttctgccttgtttcccgaagatgagcccagtgaggtccgcgcacaagctatgattctctactgtcaagccgaacaattgttggggaacttcgacctaagtatcaagaatctttatgacacccaaaaatatatccatcccaccaacaaaaaacaaatggcacaactctgctccttgatggggcgtgtatacagcaaactaggcgattacaacaaagccattgaactgaacgacaaagcaacctccatcttcaaatccatcggcgattccacctctgtggccggatgctataacgaacgtggagtaatgcaccacttcatgagtgaatttaccgttgccgagcgtttcttccagcgtgcgctggccatcaaccgtgcccaacgaaacctgaaagagattgcaaccaacttgaacaacctctgtctgtaccgaggaaatacggaagagaaactttctttcatccaggaagccatcaccatcaacaagaatctggacgcccaatggtctcttggcgaaaactacaacaacatggggaaacagtattactatgacaagcaatactccaaagccttggaagccttgcataaagcctacgagtatgcccacaacatcggagcccgcgaactgatttgcgacaattacgaatattcgtccatggtatatgcagctataggtgactatgcccaagcttataagtatctggacaagaggtaccacctgggcaaggaactgcaaagtagcaacaagctacgcaacatcgagcaggaaatttcctataaaagataccaagaccaaaaatatgctactgaaatgcaggaacaaacctacaagatagagctactgaaacgcaatttgtggcttttgggcagcgtacttattctgggaatagctttcagcatctttctatataaatggtataaacgccgaaaagatttgcaactgatagaagcacgctaccaattgcaactgtccgaaaaagaagtggccgaactgaagatgcatcagcaagagctggaacttcaaaatgtacacaatgaactggctaccagtcggcaggaggcaaccagcttcgccgtattcctgaaaagccgcaatgaactgctggacaaaatacgcggaatggtgaaagaaggatataagatggacgcgcaagccatcacgccccacctgaagaaaatcaacgcattcatcagccagagccaaagcggagacaaaaccaacagtgccctattgacaaacatcgatgataaaagcaatgaattcctccaaagactagtagcgattcatcccaaactgacacaaggcgagaaatatcttgccaccctgctaagggtaaatttgtctaccaaagaaatatccatgttgaccggtactacccctaaaaccatcaacatgaaccgttaccgcctgcgcaaatccctcaacctttcttccgaagaagacttgaccgactatctacagaacatataacccagttcaaggctgaaaatatttattttgcatttctaccctcaccgccctcactgcttacctaaaagtctttattcatcggactttcagaggtgagtaagggcaatttcaaaaaggtgagggtaaagtttgctctcactttgtctcagtagaaacaaggcatcgaacaagtaagcataggctcgcaagtccggaagaagggactactgtatcagtatgcaaatgaaagaaccgtctacggatgacgtttataaagaaaaaagcgtctagttaaatcaggaaaagacagctttctttttgtttcccccaattaaacaccttgttttatgttgtgcaaacaaaacgttttatactacatgaacaaagtgttttgtactgcagaaacaaagtgttcatcactatgaactaataagttatccgtattttgcaagagataagatatgaatgtcatccgtcttatactcgacttcctcttttacagatggcttgcagataaaacatctgcaagggacatcattgataaacagtagtatctcaactctcctccggggaggagagttgagatactactgtttatcaataattataaaggacttgcgaaacttgagttgcttgatatttctaaaagagttggtttccttcttcatctaatcaccgtttacttgttacttgcgcaactcaataattaatgtaaatcgggaaaagtttatgtggatatagttttgtagatatagaatatctcattttacccctatttatcagatatttacaaaactatttgtagataataaaacaaagaatatccctctcttgtagtctgcttgtagataacattcattagcaattcctgtttatgaagcttaatttagcattgtgaaaaaccaatagtattaaccttaaaaacttattcaaatgagtaaaagtaactactacaaagaaagagtcattcagctacttctcttctttgcttttatgctgcctatgggcgcattggcacagaacattcagctgaacggtaccgtaaccgatgtttccggtgaatctgtcatcggagccagtgtattagagaaaggaacaacaaatggagtaatcactgacatcgacggtaactttaccctcagcgtttccccaaaagccactattattatctcttacgtgggctatgctccacaagaaatcgccctcaatggtcgcaaggaattgaaagtggtgctgaaagaagacaccgaactactggacgaagtagtcgttatcggttatggcacacaaaagaaatcggatgtttccggttcggtaagttccgtatcgggcgataaactaaacaacatacctaccgctaatgccgaaactgccctgcagggtatggctcccggtttgatagttaactttggtagcggtgccgccggctccactcccagcctgcaggtgcgcggtgtaaccacttatggaacagacaactctccgttggtaattatcgatggcgttccgggtgatatgagttttctgaaccccgaagacatcaagtcaatgtctgtattgaaagacgctgccaccgccgctatttacggagcacgcgccgccgcaggcgttatcctgattgagacttaccgtggtaccaaatccaaacccaaaatcacgttctcagcttattggggagtggatcagatagccaagaaacttgacgtctgcaatgccgaagaatttatccacatggcaaagatggcccgtacaaacgccggtcaaaaccccaaaaactggcctgcttacattgcggcttatgagcaagaccccacacagtttggcgacaccgattggcaggacgaatactaccgcaacggcttcacacagaaatacaatgtggggtacactagtggcagtgagaatgccaacgtagctttgtccgtattctattcaaaaaacgaagccatcgtgaccggcacgggtgacgagaagtatggcttccgcttaaactcagacatgaaacgcggcaagttcaaagtgggcgaatcagtaaactacagccgttgggaatcggaaatggaagccaactcaggttttcccggcatataccaagtgaccaacatggaacctatcgcacgtctgtatgacgagaattgtgacggcggatacggtggtgccatccccggcatgaacatgagcgatgctgccaacatggtaggttataataacctgattgagaacacccgcgccacagattacatcaaaggatcgggctatctgcaatatgagcccatcaagggactggtaatcaaggcacaagcaagccgtagcctccttttccgcgaaacccgcgtattcaaacctacttacgaactgggtgccatgaagtggaacgaaagcgcctcactatcacagacccgcaccagaagcgtcaacgacctgctggaactgactgccaactacaacttcaccatcaaagacagtcacgacttcgccttcctgctgggagcttcacaagaagaaagcacttacgacctattgggtgcatcgggttccgaattcgagaacaacgacatgggcattctgggccaggcacgcaaagactatggtgtgcaaggtgaaaagacccgtagcggcttgcgttccgtatttggccgtgtgaactatagttggaaaatgcgctacatgttaatggcctcgttccgctatgacggttcttcacgttttgccgacggtaaccagtgggggttcttcccctctgtatcagtaggctggaacattgccaacgaacctttctgggaagatatgaaagaaacagtcagctccttcaaattgcgtatgagctacggcgccctcggtaaccaatcggtacctctctatctctacattcccaaattggactccaacgccgacaacatcaactaccccttcgacggcaaagtcgtaaaccagggatatgcagtacgtagcctcccctcaaggaacatcaagtgggaaactaccttctacaaaaacatcggtgtggacatgagcctatggaacaacaaactggaattctcgattgaaggttacatcaaggacaccaaggacatgctttccgaaaagaacatcagtctgtctaccggttacggtgcactgacggtgaacgatggtgagctgcgcaccaccggtatggaaatgcaactgatttaccacggtaatgcaggtaaggacttcaagtatgaccttgacttcaacctaagccacttcaagagtaaactgaaatcaatggcagaccccaactatatgtacgaatatggtgcttcacgtacctacgtgggtggttacttcggtgaattctgggcttacgaaaccgcaggcatcatccaaaatgaagcagaagccaaactttggaaagaatcacacggacgcaaggacagcaaaggcaactggattcccatgcagcccaacgcagaacccggtgacctccgcttcgtagaccaaaacggtgacggcatgctggacagcgatgacaagaagcttctgggcaacggttgccccaaggcctctatcggcttcaacgtaacactgaattacaagaacttcgatttggtagccaacttctacggtgacctcggtgtagaccgttacaactataccaaatatcaattggaacgtatggataccaagttcaactatggcagaaacgcactgaaagcatggactccggagaaccccaacaccaacattccacgtgccgtatacggcgacccgaacaagaatgctcgcacttccgaccgtttcatcgaacgaggcgacttcttccgcctgaacaacttgcaactgggctacaacctgcctgctacagtttgtggtaagttgggcatcagcaacctccgtttctatgtaggtggtacacgcatctttaccatcaccggttacagtggctatgacccctctaccaacggtggtattgaccgcatgggttacgactatgcttcatcacctctatgccgcactttcatggccggtattaaattcggattttaattgaaccaaaactttaaaaaagatgattatgaaattaaagaatatattattgtgcgcctcagtcttaggaggcctggcactctcttcatgtaccggaaatttcctggatgaagacagaaaccccaactcactggaccccgaaaacttctggaagagcgaatccgacatcctcaaaggacttaccgcagcctacgctggactacagcctaccatcgaatgggcgcaacctttcgaacgctacattgtgatagacaactaccgcagcgacgagctggactaccgccccgacgtgaccgcctggatggaactggccatgtacaacaacgaatcgaccaactacgtgcccaacgatgaatggaccaacctctataccagtatcaactattgcaaccagtgtctggacaacattcccaatgtgcccgacaacgatgacgaaggcatcaagcagaccaaagcgaccagtattgccgaggcacgttttctgagagccttctactactaccgtctcttcatcaacttcggtgaaagactaccaatgttcgagcacgaactcgaaggtaccgaagaggaattctatcctcctcaggtagaagccggcagactgaagactttcatcgagacagaactgagtgaatgtcaagccaaccttcccgaaaaatggaatacaaacatggccggacgcgtcactaaatatactgccgcagcactcttaggcaaatactatatgttcatcggcgaaaaggccaaagccaaaacagaattctggaaagtcattgacagtcacagatatgaactgatggagaactatggcgacaacttcaacggactacacgagaacaataaggaatccatccttgaagtacagttcaccggaagtctggaaggcgggcactacgaatacaatctctttaccttgcacttgggtcccgacagtggctgtggcgcatacgaggaagcatatccgtccaaatggttattcaatacactgaagaaagacctcaccgaagatggggaatacagcgaccgattgtatgagactatcattttcgacgatcccaaatcccgtccgttctattacgaagacggcaaaggattcagtgattaccaccaagaagacaatatctactggcgcaaatatgtgacttacgacaagtcattgggtgattactgggattattccggtttcaacatccccctcatccgctatgcggacatcctgttgctctatgccgagtgtctgaacgatgaaggaaactctaaagaagccatcaaatacatcaacaaagtacgtgaccgtgtacacgtaacgccactgtccgacaccctaagtaaagaacaagtgctgaagcacctgcaggatgtggaacgtccttgcgagctggccctcgaaggctcacgctggtatgatctcatccgttggggcattgtggaagacgcacttaagagtcatgaaaagcctttcgcaagcaatttcatatcgaccaagcatatcagactcgctatccctcacaaagaattcctgatgaatcctaattgggtgcaaaacgaaggttatacaaaataaccgataaccctacaactcagtctctatcggaagcgaaatgccggaaacgggctcccatccgatagagattgcttttaatagaactctctgtttcaagacttcatttcatcatatacttaatttaccatgagacatccaaataaaaacatcgctttgaccggcatcgttgcctgcatactggcctcgtgcgtcaaagctcccacttcttcagaaccgcttttatccaagcaagcggacttctgtaatcttatcaacataaagaacactcccgccggagccgtagactgggatgcctacgtctttgccgacaaaggtgcttggatggcatactcactgcccgacaacgaaaaccgtcgccatgccggtactttcatgggacctatggtcatgaccggacgcggatggatagctgccggactcgccgaacctacgctgtgggtgaacggcgaacagtataggatggtgtacaatgtacagaccacccgatacctccccggcaaactgatacaggaatacaacgatgagaacttaaacttcactaccgaattgtgctacctcacctcacgttccgtagccatacgttcaatcgtgaagaatatgagccaaaaaccggtaaaggtcagcttcgactggaacggaggcgtatacgagcctacctctgtcgtaagcagcatagataaaggtctctctttcatccgccccaaagattccacgaacacggtaatccgattcctcacagcagacaagattcaggctgtggggagcgatagcctgcacgtcacagaaaagagtgaaatgaccctggaacccggcaagacttatcagtcggagatgacccaaaccctgacgctgcgcggtgaagacacagccaaagaactggctgccatagcaacgctgaatatagacaattgctttgaactaaacgaacagcaatggaacgcacaaatcgcttcgttgctgagcggaaacagcaagtacctcaaggacaacaaataccgcaaggtactcgtaaaagcaatgatgaccctgaacagcaactaccgcacccctgccggtgacatcctgcatggcggcagcaacccgtcgtacaacggattcatcaacggcatctggtcgtgggactcctggaagattgcttcgggcaacgtacatttcaacgaggagatagccaaaagcgaaatgattaccctcttcgactatcaagccgacaacggcatggtacccgacttcatcagctacaacaagaaatacaataactggcgcgatgccaaaccgcccgtagccgcctggggagccatgaacgtgtataaagctaccggcgacaagaaattcctcgaaacaatgttcgacaagctctataagttccatcagtggtggtatgccgagcgcgaccacaatcacaacggcatctgcgaatacggttccaccgacggcactctcattgctgcctgttgggaaagcggcatggacaacggcgtacgctttgacgatgccgtgatgcagaaaaacagcgagaaggcatggtccatgaaccaggagaacatctgcctgaactcgttcctctacgtagacaagaccatcctcgccgaaatggcaaccctcctgaacaagcccgaactggcggcacagcttaatgccgaagccaaagtcatcaaggagttcgtacagacaaagatgtgggacaaggaaaccggattcttctacgacacccgtatcgataccggcgagcacatcaaagtgatgggtgccgaatgctggctgccactctgggcaggcatcgccactcccgaacaggccaaacaggtgatgcagaagatgatggacccgcagaagttcaactccacccttccattgggtaccttggacatcagccatcctcgcctgcgtcccgtgcgcggctactggcgcggcccggtctgggtagaccaagtgtacttcggtatcaccggcctgcgcaactatggtttcgaccgggaagccgacatactgactgagaagttcatcaacaacgcccaaggactcaccaccgacggtcctatccacgagaactacaacccgctgaccggcgaagcgctcaattcgcctaacttcggctggagttcggcatgtatcatcaagatgctgctcgatgagtaactctcacgcaaaacaactctcaaaagtctgaaaagacaaacgattatacatcattaaaagcatacgaatatgaataagatacattcaatctgcatcctcgcactgatgctaccgttatgcgcatttgcacagtacgacggtacacccatgaacaagacgggcgacaccaagaaagcggaaaccgccgtaagaaccgacaaatatcctcactcggacaacgattgggaaaactttgatgtgttgcacatcaaccgtctgccttccgccgccaccttcatggcctacaccaccaaagagaaagcagtgaagaacgacaagagtcaatcggaatattttcagtcgttgaacggtacctggaagtttcagtttgttccccgttcggaccagcgcccgatggacttctttgaaaaaggccacgatgtaagcggatggggcaacatcaaagtgcccgccaactgggaaatggaaggctatggccatcctttctatgtaggtgccggctacggcatcaagcgcaacccgccactgattgccgtggaaaacagtcccgtaggttcctacaaacgcacattcaacgtccctgccaactggaaaggcaagcaaatcgtcctccacttcggaggcgtggcctcagctttctatgtgtgggtcaacggtgaaaaggtgggttactcgcaagattccaagacccccagtgagttcgatatcaccccctatgcagtaaccggacagaacgagattgccgtgcaggtattcaagttcagcgacggctactacttagaagatcaggattactggcgctttgccggcatacaacgtgatgtgtacctttatgcccgtcccaacatccacgtgcgcgactttgaagtagtgaccgacctcgacaacgagtacaaggacgccgacttccacctctatgtggaactggacaatgcccaaaactcccaacgtactcaaacgcccaaggtaaaaggtgccgaagtggaagtgagcctgacggacaaagagggaaaagtcatctacaccgaacgccaacgcgccaaagacaacaagctgcacttcctgaaacacatcgaagcgcccctactgtggagtgctgaaaagcccaacctataccagatgatgattacactgcgtgccaacggccagacacagtacatctgccgcaacatcggattccgcaaatcggaaatcaaacatgcacagttactcgtcaacgggcaacccgtctacatcaagggcgtaaaccgccacgaacacgacccttaccacggccatgtagtggacgaagcctccatgatacgcgacctggaactgatgaaacaaaacaacatcaacagcgtgcgcacctcccactaccccaacgacccgcgctggtatgaactgtgcgacatctacggcatgtatgtagtggacgaggccaacatcgaaagccacggcatgggctacaaacccgaccaatgcctcgccaaccaacccgaatggcagaaggctttcatcgaccgtacagaacgtatgtttgaacgcgacaagaaccacccctgcgtcatcatctggtcattgggcaacgaaaccggctcaggctgtaacttccaagccacctatgcttggattcatgcccacgaccgttcccaacgccccgtacactccgaggactctggcaaaaaccgtcctttcaccgacatcttctgccccatgtacaagaagatagacgtgttgataaaccatgctctctatctgcccaccatgcccctcatcctctgcgaatacgctcatgctatgggtaatagtgtgggcaatctgcaagactactgggacatcatcgagaagtacccttctctacaaggcggtcacatctgggactgggtggaccagggtctttacaacaagaccgacgacggtaagttctactgggcctacggcggcgaccttgcccccgaaggcactccaagctcggccaacttctgcatgaacggcctgattgccgcagaccgcacattgaagccccacatacatgaagtgaaacgggtgtaccagaatatggctttcagattgctcgattatcacgaaggattggtagagcttagaaacaagttcttcttcaccaacctgaatgactttgacttcacttggcgcttggaaggcaacggtgaagtattggcacaaggacgcatagataatgtagatttgcccgcccaacagacaggcgtattccggacacagttccccaccatccattcctccgaaggagtagaatattacctgaatttctatgccagccagaagcgcgacgagggtctgctgaaggccggtacacaattggctgccgaacaagtgaagcttcccttctataaggctgttacccccaaagctgcctcaggcaacgtgacggcaaccgacagcgaagccctgcttgtcctcactgccggaaatgtcagtgtaggattcgacaaagccaccggagcactctgctcgttcaaggaaggcaaggaagagatgattaaggaagcactgcgtcccaacttctggcgtccggtgacggacaatgacatgggcaacgacatgaacaagaccctgcgcccgtggcgtgaagccggacgtggcgccaaactcacctcattggagaaaacagcgctcgacaaagatggctatgaagtagtgtcacactaccgtctgcccgaagaagttgccggttcggaattcattgtccgctaccgcttctcaccgagaggcagcctcgatgtgaactgtactttcattcctgccaacgacactttacctttgatgccccgcatgggtgtgagcatcaccctgaacaagcaatacgaccaaatggcatggctaggtcgaggtccgcacgagaactattgcgaccgcaacggttcttccttcgtgggtctgtacaaaggtagcgtagccgaacagtacttcgcctacgaccgtccacaagaaaacggcaacaagaccgatgtacgttggatgagcctcaccgatttgaaaggcaatggcctgatggttatcggtgcacccacaatcagcggcagtgcctacctcttcccgacagaagatttggatgaacccggcacacgcaagtcacaacgccatatctcagacgtccaacccaaagatatggtgacttggaacatagacttcaagcagatgggtgtgggtggagataccagttggggagcctacccgcatcaaccatacctgattcctgcccgtaagatggaattctcattccgcttatgccctacacaagaaaaaggagtgaaagagaaccaaagatatttggaaatgaagtaattttgcaattgtcaaacctcagaagcgcctccccctctttaaaacaggaggtgcttttgagggtaagacagctttccatctattcacaaaaccatacagacaatgtttacaatcatcggactaatgctcacaggaatgctgctgggctacctcttacggaaacgggacttaaagaaggtccatccaatcatcaccctgcttatctggctgctactgtttatcctcggtattgaggtaggaagtaacgaagagattatcagaggactccataccatcggatatgaagccgttgtcctcaccttgggagggaccttgggaagtgttatcgctgcttgggcactctggagagctttgtataaaaggaaaggaggcagggcatgaaaggaagtcttatcattgtgggcttttttgtattgggtacgatttgtggtgtgtgccatctgctgccttttgatattgcagaaaccaatatcagctactacgcgctttgcgcgctgatgttcagtgtagggttgagcgtaggcaacgacccgcagaccctgaagaacttccgttcactcaatccgcgactggtattcctgcccatcatgacgatactgggaacactggcaggttcggcagccgtcagtctgattctgacacaccgttctataacggactgtctggccgtaggctcgggattcggctattactcgctctccagtatcttcattaccgaatacaagggagccgagctgggcaccatcgccctgcttgccaatatcagccgggagattctgacactgctggccgccccgttgctggtacgatggttcggaaaccttgcccccatctctgccggaggagccacgacgatggacaccacactgcccatcatcacacggacagccggacagcagtttgtcgtagtttccatcttccacgggtttgtggtcgatttcagcgttccgttcctggtgacattgttctgctcgatatagggcttttaccctcttttgacagacaccggtctctgacaagagccatttttatatcactaaatcctattaataatgaaaaccaaactttatacctttctcctttcttcgctgctttgcaccggtgccctggccgacaacgagccgtggcagaacccgcaagtcaacgaaatgaacagagaaccgatgcacgcccacttcactccgtttacgaatgaagccaacgcattgaaacaacgtgccttgcccgccgacgtacggttcgacgttaatcctacaacggaacgccgtatcactctggacggcacctggaaatttcttttttcaaagaacaatgacctctgccccaaagactttcacaagcccggattcagtacccgcaagtggagtaaaattgaagttccaggaagctgggaactgcaaggcttcgatgcacctatctatacagatacccgttatccgtttccccccaatccgccctacgtgcctaccgactacaatcccgtaggtgcttatatccgcgagttcaccgtcccggctagctgggaaggcatggacatctttcttgatttcgaaggggtggagtctgcctactatgtatgggtaaacggcgaattggcaggatatgcagaagacagccgcctaccgtcgcacttcaacatcacccacctgctgaagaagggcaacaataaactggctgtaaaagtattccgttatagcgacggttcctacctggaaggccaggactactggaaatacagcggcatcgaacggagtgtttatctctacgcccgcccccagagccgcgtcaaggacttccggatgacagcggaactgataaacaactacaaggatggcgaactaaagctggacgtattcctccattggcctaaagccggagaaacggtggaagtcaaggtaatggacaaggacaaggttatctatgaccggaaaaagtccataacctctgccacagacactttgtttacccagcagcaagtgttcccgaatgcacgcgcctggaatgccgaaacgccgaatacctacacgctggtagtcaacaccttcgacgcacaaggcagaccgttggaatctttcacgcatcttttcggtttccgcaccgtagaaatgatgaacggcatgcagatgattaacggccgggccgtcctcttcaagggagtgaaccgccacgagcacgaagccgtcaaagggcgcaccgtcagcgtagcttccatgatacacgacatccagctgatgaagcagttcaacctgaacggtgtacgcaactgccactacccgaacaactatgcgtggtacgagctttgcacggaattcggactctatatggtagacgaagccaacatcgagagccatggcatgatgttccacaaagatgagacccttgccaactaccccgactgggaggtgcctttcatgcagcggatgagccgtatgattgcgcgcgaccgtaactactccgccatcgtgacttggtccatgggcaacgagtcgggctacggcaagcacttcgaaactctgtatgactataccaagaagatagcccccacccgtcccgtacaatacgaagggggtggttacaactctaagagcgacatctattgccccatgtacgcacgcatctggaggttgcgccaacacgtgaaccagcgtgatgcccgccccatgattctctgcgaatatgcccatgccatgggtaacagcgcaggaaacttccaggactactgggacttgatttataagtacgaccagctgcaaggcggtttcatttgggactgggtagaccagacgtttgccatcaaggacgagaaccagcgcaacatctgggcttttggcggcgacatgggatttgtaggcgtcgtcaacgactccaacttctgtgccaacggcttgattgctgccgaccgcaccccgcacccgcacatctacgaagtgaagaaggtattgcaatatatccatttcgaaccgctcgccttcaccccgaacaagataaaggtcaccaactggcacgatttcatcggattggaaggatataccctccgctgggcagtggaatgcgacggcaagaccgttcagaacggtgagatggatttccccaagattactcccagaaactctgccaacatagaattgccactgaaagcgctgcctgccgacggcaaggagtatttcctcacactgcgtgcattcaccaagcacgaagcgccattagtaccgaaaggacacgaggttgctatcgaacaatgggaactgccttccgtcccgtcagccaaaaccgttcagccggtggagggaacgttgaccgtaaaccgcaacaacgaagcattgaccgtgaaaggcaataacttccaggtagctttctctacccgaaacggtgaaatgacagagctgaactacaacggaaagaatctgattaaggaagggctgcaacccaacttctggcgcccgttgaccgataatgatattccaaatgggcacctgatacgctgcggcacctggagaaacgccggacgcgatgccaaactgcagcatatcgaagttgcggaagccggacaaacggctactgtcactgcgacctaccgcatggaagaacaagatgctgatttgcagactctctacaaaatcactcccgacggcaaggttcaggtaaccatgcacttcacccccggcaagaaaccattgagtgaaatgccgcgcctgggcatgcgcatgatactccctgccgaatatgaaatgatgacctggctgggccgtggtccgcaagagacgtatgccgaccgcaagacgggagcattgataggcctctacaacgccacggtgtgggaacaattccatccgtatgtacgtgcccaagagacggccaatcattgtgacgtacgctgggtggccctacgtaatgcaaccggcgaaggcctgctggtagtgggcgaggaaccgttgagcgtaagcgcctggaacttcccgatggaggacattgaataccgtccctcacagatggagcgccgccacggtggaagcatccagaagaaagatatggtatggctcaacatcgaccacaagcagatgggcgtaggcggtgacaatacttggggagcacaagtgcatcccgagtacaccatcactccacacgaatggaaatacagcttcacactcgctcccctcgcaccggaggacgatgcggcggaacaagcgcacaaataaccgttaaatacctcattcatatgaaatacaaatttatacgcatactctgcttcacattgttggccgcaggcatcgcagcctgcacccccggcatgaaaagcactacggagaaacggtataccttcgccgacatactggacatctcctatactcccgacaccctgcaccgctgctacggttggttcaccgacgccggctcgtggatgggcttcacgctgcccgaacggcaacaatgggtcaacggcttctgcggccccttcagcctcgatatgttccgccgccagtggatggcacagtcagccgccgtcgtaagctttgccaaagatacacaagagatttttgttccggattccacttgctattaccccggcgagctctatatgtcggcacattccacccacgggagcatcacgcaacggctcaacttcacaagtgcctcgaccgccttgctgcgcatcgaagccgacacggctgaagacctgctgttctccggtagccaatggggcaaagacatcaccgtcagcgtagaacagaactccgtcatcgcccgtcatcccagtggcgaaaccgtaaccgtgacctttactcctaatgtagagctggccaagactgacaataactatacagccctcgtccgctctccgcgctaccccgtcaacgtagccatctctttcttcacttccgaaaaagagatgactgccggcctgcaaaacctgccgggcttgctcaataatcccacccccgccctgcaagccaatgccgaacgttgggaaggttacctcaccaagatactgcgcaaggacatgaagcccgaatacgaccgcatcgccgtgaaagccgtcaccacgctcatctccaattggcggacacaccgcggcggattgcttcacgaaggcatcatcccgagccatgccgtaggttatttcgtcggcttctgggcatgggacagttggcgcttcagtgccggaaccgccaagttcgaccccgaactggccaagaacaacatccgcgccatgttcgactaccagcaaccggacggcatgattatcgactgtatctataccgacccctccgagaacaatgcccgtgacagcaaacctcccttggtatgctgggctgtcgacgaaatcttcacccatacgggtgacaccgccttcgttgccgaaatgtaccctcaactgctctcctattataaatggtggtacgaaaaacgcgaccacaaccgcaatggcatgtgcgaatacggtgctaccgacggaacactggaagctgccgcctgggaaagcggtatggacaacgccatccgttttgacggcgccgtgatgctgaaaaacgaaggctacgaggatgcctggagtatggatcaggagagtgtggacttgaacgcttatctggcactggaatgcaaactgctgaagaaattctccagcctgctgaagatacctttcgacgcaccggactacagtagccaggtagccgactatttctttgacaagaacatcaacttcttctgcgaccgccgtctgaaggacggttcattcatcgaagagccgggctgcgaagcctacactccgttgtggacccggattgccacacaagcgcaagtggacagcatgctgcccatgcttcaagatacggcaaagttctccacgtatatccccttcccgaccattgccgccgacaatcccaaatacaatccgcgcggctactggcgtggccccatctggctggaccagacctactttgccatccgtggactgcgcaactacggctacaaccagctggcagatgaatatacgctgcaagtcttcgaccgcctgagcgggctgaaagagggtgcccccatccacgagaactacggaacccataccggcgaacgcctgaaagctccccatttcagctggagctcctcacatctgttgatgatgtacgacgattacggtaagtaaaccgggattccatatatgtcataactcaccacagattacacagattcacgcagatttttttagtttattgatatctgacatatttatctgtgtgaatctgtgtaatctgtggtgagttatgacactttcatgaagaacaaaagcgatatgattattatcggtaaacctgcaccggaagctctccacgcaaagctcccagcgcattcattaccaatgcttccaattcgtcttctccgggatagacgtggacgggagcaaggaaagacacgcgctcctgcaaccgcgaagtgatgtactcggaatgtgccatacctcccgtaagcagaatggcgtccaccttgccataaagcacaacagcagcaccgcctatctccttggcaatgcggtaaatcatggcatcaagcaccaaagcggcatgggtgtctccctcagcgatgcgcctctctatggcgggaatgtcggtagtacccaaatgggcggcaagtcccgccttgccggaaatacgtttcttcagttcttcggtagtgtaacgccccgagtgacaaaggtctatcagttgcccggcgggcagggtacctgcacgttcgggcgaaaaaggaccgaaaccgtcgagggcattgggcacgtccaccgcacggccgtggcggtggactcctacggaaacgcctccacccaagtgacagacaatcagattgaggtcttcgtaatgcacgggagcttcgggctgcagggcactacgctcggcagcatagcgccgggcgatggctcgctggttcaaggcgtgccagatggtgatgctgggcatcagaggcgaaccggtgatgcgtgccacatcgtccagttcgtccaccacgccgggatcggctatgaaagaggggcagccgggcagcatggcggcaagttcgtgggctatcagacaacctaagttgcaggcgtgggtacgcatggcgtggagcatatcgtccaacatggcatcgttcacggcatacacaccgccaggaatgggtttcaacaatcccccacggccgacgatggcatcgaacttaaagggaatgtcattggcctccagcgcttccagcaccaagtgcttgcggaattcgaactggtcgatgatgcggggaaattgggaaagctccttcaccgaatgccggatgttgagtaccagacggggagtttcatcctcatagacagcaatttttgtcgaggtggaaccgggatttactgccagtattttcattgattacgatttacaaattacgaactacaaattactaattacaatcaaggttctttcaccccgctggtcaggcaagccatggcaatgctgtaatatttggacaaaccggaatcgctacgcgacggtaataccaccggacatgagggtccttgcagcaacccggccatatcggcatgagaaaacagagatacagccttataaaaagcattgcccgattcgatgtttgggaatatcaacacatccgcctccccgtcaatcggtgatacaatgcctttgatgttaccgctcgtcttctcacaagaggtcttcacatccagcgggccgtcgatgatgacattgccgaactctccggcttccgccagttctacaatattcacatagtccaatgaatgggggaatttgacgctaaccttctccgtgcaatgaatcagcgcgatgcgtggctgctctatcccgaaatggcggcaagtatggatggcataccaaatcatttcaatgcgctgttgcagtgtcgggcggggaatgaccgcagcatcggagaaaaagagcagtttatcgtaagtaggtatctgcatcacggccagatgggtcagaatctttcctttaggcaacaaaccatgttccttgtccagaatggcacgtagcaaattgtcggtattgatgatgcctttcatcaggatgtccgctccaccctcgcgtacgatacgcaccgcctcacgtgcagcctcatcggaatcttctatatgtaaggtactgacatattgaggatatttcttcaaagtgggatatttttccaatatggcagaatcgccaatcatcagaaattccgcaatcccctcctccaaggcacgggatatggcatattctgtattagggtcattggcacagactaccgcaatacgtttcctcttattcaaggttttcaggtgggctgttaactgggcaaagttccgtatcggttccataacgttagatttttagcaaatatctaaaaaaatgtcgagaaatacagcatttgccccgttgaaattttatatgtttaatatcattttgatatgttcaccacagattacacagattgacacggatttgaacagaatttgaattactctgttgattatatatcatatataacctccctctcttctgttaaaaatccgtgttaatctgtgatatctgtggtgaattgtgtacttttgcccaaaatagattgataatatatatgggtagtcttattttccctccgtatctgcaggaaggtgaccgtgtcattgttctctccccttccagcaagattgacaaatctttcctgaaaggcgcctacaaacgtttgaagtcctgggggctggaagtcgtattcgcaaagcacgcggggagttccaacggaacgtatgcaggaaatatccggcaacgcctcgaggacctgcaggaagccatggacgatgaagaagccaaagtcatattctgtagtcggggcggttacggagccgtgcatctgataggcaaactggattttaccaagttcaggcagcatcccaaatggctcatcggattcagtgacatcaccgccctccataatctgttccagcagaatggcttcgcgtcgttgcacgcccccatggcgcgccatctcacagtagaaccggaagacgacttctgcacacaagcactgaaggatatactattcgggcaggcattgggaggaaccgaagcattcagttatgtctgcccggggcacaaactaaatcataagggagagggaaaaggtgtgttgcgcggcggcaatttgtctgtgttctacgggctgcgtggtactccttacgatattcccgccgaaggcaccatcctcttcatcgaagatgtgggagaacgcccacatgcggtggaacgcatgatgtacaatctcaaactgggaggtgtcctcgacaagctttccggcctcatcatcggacaattcaccgaatacgaggagaacaagtccctgggaaaagacctatatggcgcattggccgatttggtgaaggaatacgattacccgatatgtttcgattttcccgtcggacatgtcagcatgaatgtaccgctgataaacggcgctgcggtaacactgaaagttggaaagaaagaagtgaaactaagttttaatacagaaagagaatgaaacggaattatacattcatcccgttgctgctgttgctgattgtagcgatagtggcatgcagcaacaacagcagcaagtctgcagccgataatgacagtgagggcgatgcgaccaaagcgactgtccaagtgcctcagttcagtgcagacagtgcatatcaatacatacagacccaagcggattttggtccgcgcgtgcccaacaccgccgcccacaaagcctgcggagaattccttgccaagaagctggaagaattcggcgccaaagtatacaaccagcatgccgacctggtggcttacgacaacaccatcctgaaagcgcgcaatgttatcggcgcctataatccggaaagcaaaaggcgtgtactgctctgtgcccattgggacagccgtccttatgccgaccaggatgctgacaagacgaagcatcacagccccatcctgggtgtgaacgatggagccagcggtgtgggcgtattgctcgaagtggcccgccaactgcaacagcaggctccagccatcggcatcgacatcatcttttttgacgccgaagactatggcatcccctacttctatcaaggtgcatacaagaacgacacttggtgcctgggctcgcaatattggggacgagtaccccatgtagacggctataatgcccgctacggcatcctgctcgacatggtaggtggaaagaacgccaccttctacaaggaacagttctctcaaagaaccgccggtaagtacgtgaacaagatatggaacacagcccaccgcctgggcttcggcaacttcttccccaaagaaaaaggcaccgaagtgacagacgaccatatgtatgtatacaacctgcggcagattccctgcgtagacatcatcaactatgacccgaactgcgacaccggcttcggtgacttctggcacacgatagacgacaccatggacatcatcgacaagggcactctcaacgcagtgggacagaccttgctcgaagtcatctacaatgagaaatagacaatcaaatagtaaatcgtaaatagtaaattccatgataagtatcaacgaagtacaagatgaagtaattgccgaattcaatgatttcgacgattggatggaccggtaccaacttcttattgatttaggaaacgagcaggaaccgctcgacgaaaaatacaagacggaacaaaacctgattgaaggttgccagagccgcgtatggctgcaggcagacgaagtggacggaaaaattattttccaggccgaaagcgacgcactgattgtgaaaggaatcatttcactgcttatcaaagtactctccgggcacacaccggatgagatactgaacgccgacctctatttcattgataaaataggactgaaggaacacttgtcgcccacccgtagcaacggactgctgtctatggtaaagcagatgcgaatgtatgcgctggccttcaaagcgaaaggcatctaaaggttacgaccgacaatatataagctaataatcagcatgtcttatcctgatataggtagacacatttaca

SEQ ID NO: 4402 - DNA, 124371 bp, Unknown
  gut microbiota DNA sequence
tgcagcgccactgcaaaaagcatgcagtgtctttgcagtgggaagtgtctgtgtatcaatagtgaatggggtgattcggcaatctgtcattctccgcggcgttggcatatttccactcctgcagcctctatatccgcgcccatcggtggattgcgctttgccagcttgagggttatttcctctatctgtgggaagtcgtggaacaatcggtttataattcgcccgcatacatgttccaatagtttggaaggaatgtccatctctgccttcacagctgtatgtacatcggcatagctcacggtgtcggctacgtcgtccgtttctgccgcacgccggatatcaacttgcaggcgcaggctgacggtaaactcattgcctaccacggtttcttgttcgcccacgccgtgatgggcgaagaagcgaagcgtatcaaggaaaatataactggtcattacttgtagattgttttctgcaaacttactgatattttgtggtacgggcaaatcagtatccggttattacgattcaggctgtggattgtattctgtaaaatataaaaatagcgcgaaattgttttttatagaatacaattatgtgagggccggaatgaacttatcgaattattttaggcacggaattatacgggttatcacggttactttcaatattatccgtgattgtccatgtaatccgtgcctaaaataaccctttgttaagaatcctttcttatcttccggtgctttctatcatgctccttattttctcgttcaggctttctgccttcatcagttgttccagtgtcaggtgcatgcgccagcgccagtagtgccgcgggttggcaggaatattgatgcgttcttcctgcacgttcgggttgcgccatttgccgtccatggacatccagtcttgcagggagaggatgcagaggatggagttgctatggaggtgattgcgaaccacttcttcgcagagctccggcgtggccgttgccggtgcggcaccgtagtgcccgagcatggtgttgtagtaacgctgcgtctgttggaagtcttcttcccaccagccgcgcagggtagacatgtcgtgcgtggagatggtgcagaccgaacggtatggataccagtctgtgtggccgaattcttgtttcgggtctttcggcatacgttgtatctccagggaaaggatacgcaggtcgttcatcacccatgccacgcaatcgggaatcatgcctaagtcctcaccgcataccagcatgcgcgtggactgtgtcagttgcggcagtttcttcatggcttgctgtccccagaagtcgttgtggcggtgatagtagtactggtcatacagccggttgaaggcagccttttcccaatcgttcagtgcgcggtagatgtagtcgtgctgcacgccgatgcgcggatggtattcgtgcggattgttgcggtcgggcacgaacagcacatcgctgataagggcgtaaagcccgtcacgaatccagatgctgtcatcgtccgtttttccggcaaagtaggcttccaccttgcgctgggtgtcgaactcgggacgcatgcggtaaacctcccacgtgtctgtcggctctatgaaggtctgtttcacatagtctgtatgcgggccgaagatttgtccgaggaagtactcatggatatagggctttaggaagaagtcttcgcggaatgccagcccgtagctttctatctcctcgcgcgtcatgggcagggcggggacgaattgtcccaacagcccgtgtacggcgtgcatcggtatctcccaaatgcggaagaagccgaggatgtggtctatgcggtaggcatcgaagtattctgccattttgtggaaacgtttcatccaccaggcataaccgtctttttccatgacatcccagttgtaggtggggaggccccagttctgtccgttcacggagaagtcgtcgggcggtgcaccggcttgtccgttcaggttgaagtagtgggactctttccaggcttccacactgttgcggctgatgccgatgggaatgtcgcctttcagcactacgccgttggcgcgcgcatgctccgtggcggcaagcagttgccggtgcaggttgaactggatgtaataatagatggctatgtgcggatagtcggcggagtccggccggcacaatgtctctatctccttggcatcgtaggtggcatacttgggccactcgcggaaattcggggtcttgtaggcatcacgcaggtagctgaagacggcatatggctgcaaccattccttgttggcttcgtagaaattacggaaagcatccgatgccagcaccttttccccttcctgcttgaagatgaggtggaagtattcccactttgtcttgttcacagcttcgtagtccacggcgggcagggcattcagttccttctggcgtttgttgaattcggccatcaccttcttgtccttcaagctgcccaactgcttcaggtcggcgtacatgggatggaaggcatagatggagatgctactgtaagggtaggagtctgtccaggtatgcgtcatggtagtgtcgttgatgggcagaatctgcaccgccttctgattggtggcaactgcccagtcaatcatgcgcttcaagtcgccgaaatcgcctacaccgaagcttttctcggagcgcagggagaatacgggtacggctactccggaacctttccatgcaggaagattgaagtatacataacggtcgccgacagccagcgtttcgttggcggctatctgcgggtcggccatatagcggttgggattgttctcccaggccacggcacggcgctctttcttgttgtaaaggacgaatttatactccagcgggaagctgattttgccggcatccacttctacctgccattcggggaagtcgatgtcgctcataagggcagctttgtccgggttccagtcacccagcgccttctggtttccgcagagtgccaggcaatggtcactgtctatgcagggggcgtacgcctttatcagcaacccctttttgtagcttttcggggcggcactgcgttcgcgatgcgccagcagggattctgtgaaagcggatgtataaaaatactgctgctcgggcagattcttccaacaatcttctatgcggtaaactttcttcggattgtctgcaacgtgcaggatgcgtggcaggctgttccactctgtccgtatggttctgccatctcgatagatgtggtaactgtattcgacgcttccattaccgggaatctggatatccacttccgcggtccagtgaatgccgtctacagtgtgcaggggggtggctttgttgggctggttgttgccaagttccgggatggaacccaggactctgacttcttcaccccagctggtgcgatactcgatattgaatattagtgtcatattatattagatttagaaatagcaatagctgcaatgattatgcaagtatagaaattattcctcataatcatgcagctaccgttatctaagtcatttaaattcctatgcaaacgtttgtgcttgccgtgggattatccacagcgagaagctccgcacgtcttgcagatgaggcaaccttcttggtaaaccagtgtttcgttaccgcagttggggcatttcttgcctttggcttccgtgccgtcctggatgtatttcttcagggcgcgttccacaccgttcttccaggtgttgatgttttcgctgtccagttgcagtgaacctaccagcttgatgacctgctcgataggcatgcggtagcgcaatacaccggaaatcagcttggcatagttccaatactctttgttgaacttctcggacagaccctcgatggtgactttgtatccgcgcttgttctcgaactggaagtcgtaacgcttgtttccgtgctcatccacattcttgatgatgtggcccgacaccacattcttcggcaggatgatgccttcatcatcatccagcacaccggtgaatatttcgtagggatgattgtccagcaagccgacgaatgccacccatttctccttgttgttctggaagcggacaacgtctgcatccaatattctgggacgtgtttcaacgaccgtaggcggtttgcacgggggaagttcggacttcttgtcactcttggtagagatgagtacgccggaacgcgaaccgtcgcggtaaaccgtacagcccttgcagccggatttccatgcttctacatacagacggttcacgaggtcttcgtctacgtcgttcggcaggttgatggttacgctgatagagtggtccacccatttttggatacgtccctgcatcttgactttcatcagccagtccacgtcgttggaggttgctttataataaggtgatttctctaccagggcatccacttcttcctgcgtgtagcgtttggcggggttgtatccttgtgcttccatccaagtcacgaacttggggtggaacacgatatattcttcaaaggcatctccggtttcgtcgatgaagtccacatggacgttcgtatcgttgggattcactttgcggcggcgcttgtacacgggcaggaatacgggctcgataccggaggtggtttgagtcatcaggctggtggtgccggtcggggcgatggtcagacaggcaatgttgcggcgtccgtacttcttcatctcctcgtacatttccgggtcagcttcacgcaggcggttgatgaacgggttgttcttttcgcgttctgtatcgtacacctcgaatgcgccgcgttctttggccatttctatggaggagcgataggcgttgagtgccaccgtcttgtgtacttgctccgagaattcggttgcctcttcagtgccataacgcaatcccagggcggcaagcatgtcgccttctgccgtgatgcctacaccggtacggcggccttgggcgcttttcttgtaaatcttctgccacaaaacgcgttctgtatgtttcacgtcttcactttcggggtcggcatctatcttgctcatgatgcgctctatcttctccagttcaaggtcgatgatatcgtccatgatgcgttgggccaaagctacatgcttcttgaatagctcaaagtcaaagtaggcgtccggcttgaacggattgaccacgtatgagtaaaggttgatggcgagcagacggcaggagtcgtacgggcacagtggaatttcgccgcatggattggtggatacggtacggtagcccaggtctgcatagcagtcgggcacggattcctttaatatggtatcccagaacaatacaccgggttctgccgatttccatgcattgtgcacaatctttttccataatgcggatgcgtcaatgtctttttgaaatgccggctctgtggcgtcaatcggatattgctgtgtatatggtttgccttcgatggcggcctgcatgaagtcgtcggtcagttttacggaaacgttggctccggtcactttgccctcagtcatcttggcatcgatgaaggcttccgagtcggggtgtttgatggatacgctgagcatcagtgcgccgcggcgtccatcttgagctacttcgcgtgtagagtttgaatagcgttccatgaagggaaccaagccggtggaggtcagtgccgagttctttaccggtgaacctttcggacggatatgggataagtcgtgtcccacgccgccacggcgtttcatcagctgtacttgttcttcgtctatcttgaagatggcaccataagaatccgcttcgccgtccacaccgataacaaagcagttggacagagaggctacctgatagttgttcccgattccggtcatcgggcttccttgcggaacaatgtacttgaagtggtcgagcaagccgaaaagttcctctgaacttaatggattggggtacttggcctcaatgcgggctacctcattggctatccgccaatgcatgtcttccggagacttttcgtaaatatttccgaaagaatctttgactgcatatttgtttacccaaactctggcagccaactcgtcgccttggaagtattttaaagattctccgtaggcttcgtcataagaataatttttcttttccacaatgttgtatctcttaggattagttacaaataagtaaagttgtagaagttgtacttatcgttaacaaatgtatttgcaaagctatgaatgtttttcaacttggcaaaattaaaatgaatgtttttattaaccgatatatagttttctattgattgctattaatttattggtttataatgttttaatgatttgagtaaacgaataagttttccaaaatggaatttattaacaacttgttgggctgaaaggttctcggtttagtcgaacataaggttacttttatctgctcgtagagataataattgttcatttcttgttgaaaagatgtattttattccggatatatgatgataaaaaaagtgtgaactcttgaatgaattgttcgtggattacattatctttgcaaaaaaagaaagaatggaaagcttgaaacaaaggagaacaatccgaaaataccagcagaaggatatttctgctgatttgttaaatgatttgcttgaaacctctttccgggcttctacagtcgggaacatgcaggtttatagtgtgattgtgacgcgtgatgcagagcgtaaagccaaactggcgcctgcacatttcaatcagccgatggttcggacggcgccggtagtgcttactttctgcatagatttgcgccgcttcagcaagtggtgtgagcaacgtaaggctgagccgggatacaacaactttgagtggtttgtgacgggggctgtcgataccttgctggtggcacagactttttgtgtggctgccgaggagaaggggttgggcatttgctatctgggaactaccacttacaaccctcagatgattgtcgaagcgttggagttaccggaattggtgtttcccatcacgacagtcacagtgggatggcctgccgaacagccggaacaagtggaccgtttgccgctggaggccattgtacacgaagaggtttatcatgattatactcctcaggacattgaccggttgtatgcctataaagaatcgcttcctgagaacaagcagttcatcttggagaacaataaggaaacgctggcgcaggtctttacagatgtgcgttatacgaagaaagacagtgaggcaatgtcggagaatctttggaagataatgaaaaagcagggattttgaaaattaaggattagggataagggataagggataagggataaggggttaagctaatgcatacttagctgcatttaatcccttatcctttattcttatccttttttcagtgcggcttgaatctcgtcgatttccgcacggaatgatttgtccacctctttcagttctttgatggttttacatgcatgcaatacggtggcatggtctttatgtccaattagcgcaccgatttttgcagtagagaagtctgtatggtttttggctaaatacatggctatttgtcgtgcttgcaccacttcccgctttctggattttgtgtggatggtggcagtttccaatccgaagtgcttgcatacggtgttgatgatttcatcgacagtcactgccttgctttcgctgttcactaccttgcggacgatacgttgcgtcagttccaggtctatttctttattgtatatggtggaatgcgccataatggaaatgacgatgccctccaggtcacgtacactgtcgcccacgttctctgcaatatagtcaatcacttcctgggggaactgcaggccgtcacggtgtatcttgttgcgcagaatgttcttgcggagttctacggtaggtttctccagctcagccaccattccccatttaaaacgtgtaatcagacgctcttccatgccctgcagcaataccggtgcacggtcggaagtgaggatgagctgcttgccgttctgatgcagatggttgaagatatggaagaatgtattctgcgttttggtcacgccggcaaattcctgaatatcatcaatgattagaatatcaatggtctggtagaagttgatgaagtcgttagtcgtattgttacgtacggaatcggtgtattgcacttggaataggtgtgcagatacatacaatacccttttctccgggtatagttccttgattttggttccgatagcattggcaagatgggttttgcctacacctgatgctccgtataggaacagcggattgaagattgttttagccggattgagagcgacagcttctgcaacgctgcgcgacagcttgttgctgtaaccttcgatgaaggtttcaaagttgtattctggattaaggtgcgggtcaagttcggggacgggaatctgcggaatccttttgtccatcacttgtttttgcggtatgatggtacgctgtgtagactccaggtcgacggttttccgcgagctcttgtccaccattacgttatacatcaatttagttccctcaccaatgaccttatagagagtcttgcgcaacaaatcaacaaatttgtcctccaaaaactcatagaagaactggctgggcacttgtacgaccagcgttttgtcttcatattttaaaggtatgatgggaagaaaccatgttttgtatgtctgctccggaacattgtctctgatgatttcaagacagcggttccacagcccgacatgatctatttcactcataacggctataaatacatttattaattaagcataacttctacgattgcaaaattggcaatcttattcgagaaaaacaaatcctttttttcttgcgtttttagggaaagtaataagctctttactttcagctacttatcggttactatgagtatactccttatataaggtgtcttgcatttatctaatactttgtcatatagtggtttatgtagctttgcgtctcttgttttccttctgtgcccagagcaggaaaaagccctttttcgctccttgtatagagcaaatgagggctttccttttaattcctttatagacttattatttagacaaaatctatataacgtccatcttttacttatctttcttgccgaatagggagaaatggacgtatcgtttcggatgcgatttcaagtcttccaataaacttgctgcgttggcagtggtggcgttcagattattatatagagaagggtcgtttagcaaaagtccgacggtattgtctttctggttcaatttgtctgtaatcatttttacattgttcaaagttgcgtctaccttttgcatggcggcagcataatctatctcctttaagttgttggaaatgagtgcaaagttgtctccaatagtattgagcttgccggtcagttgtggaatatcatccttcattagagtttgcaattggcggcttgtgacggccatacttgctgttaaatcttgtacgttatgcaaggttgcagggatggcggggtcggccagtatgacatttaaggatgcgaggatggaatccagcttgggcagcatcttctctacttgcggcatcatggtggcaactttttccatcattccgttgttcagcacgccggggattgtgtctccaatctggtatttctcccgcgggttattggcaagcagcaggttcatctttacgccgccaagcatttcggctgccagttctgccgtacttcctttgggaatgcgcagctctgggtcaacatctatttcggcaacgactttgcccggttgggtatagtcgtagtacaagtcgcggacaatacccacgcggaagccgtcggcaaagaccgggctggattttgtcagcccattgacattctggaatttcacgtagaaatagctggagggcttgaacatatttatccctttcaggtagttgatgccgtataccaatatgcaaagtgcagctatgcctgctattcctattctaacttcttttgtaatatacttcatgatgtatcttttgttatttatttctgttctttttaaattcgctgatggctgtgttgacgtttatcttttctccattcttgaacgcaatgatgaatgcgtccttgaatttgtccgtaatgctacgtttgctgcgcagcaccttgttgtaatcgggtgatgcgccgtacgtatatttgtagattccgccttctttataataatccacgtctttcagtcctttcagtcttttgtcattcttggccagaggacgtgaagaagtgagtatctgtatcttaaacacgatgccgctctgttctgtttgggaaacggctgcattttctgacctttgcgggcgctgggcagcttggttactctccgcttgaggtgcatttttcttttccggtgtcgctgtagctgcgttgccttcttcttgaacgggctcgggtacatcctccggaagaatggtattgctgcttccgttcaaccggatttcctgctcgcgcttataggtgaggaaagcgcggaagataccgttggcaagtgaggtggttcctgcttcagtgttcaggtaccgttcctcttccggtgtggagatgaatccgagttccaccagtatgcttggcatggcactggccttcaataccagaaaacctgcctggtgcacgccccggtctgtacgtttgcaggtttggcggaaatgcttttgtacgagggaggcgaggtgcacactctgtgacatgtatttgtcttgcatgaattcgaagatgatgtaggactctgccgagttgggattgaagccggcataccgcgtcttgtagtcgctttcgtagaggataacggcattttcgcgcttggctacttccagattggcatccgattttgccagacccagtgtccaggtggaggctcctttggccgtccggtttttggccagggcattggtatgtatggagatgaacaaatcagctttggcgttattggcaatttcagcgcgccggtccagggggatgaatatgtcccggtcccgcgtatagataacttttacatcagggcagttcttcttgatttgtttgccaagtttgagtgctacattcaggttgatattcttctctttggaaatttttcccactgcacccgggtcgtgtccaccgtgtccggggtctataacgacaacaaagtctttcgcttcagcgctgccactgcaaaagggggagataagcagccctaagcatatacttatatataatatgtatcgtctgtatagtttcatataattgtagcaaagacaatgcttccttttcgcttggcaaatgtagtggaaatttatagaaaactaatggattatgttcagttttattgttcttcttctcatttttagtggaattaatgtctgtgtttgagcaattagtggcttaatgtattgataatatgcgtaactttgcggtggataattaaaatagcaaatcaagtatgctggttcgttttataaagaactggacgttgcctttggcaatgcttgccggtactttgggatatttcttttttgcagacattccttttgtggcgcctgccaaaccttatgtgaatgggttagtggctttcctgactccgcttttgattttttcccaacttctgctcactttctgcaaggtggaggtgcatgaactgaaacccaaatcgtggcatggatggttactgctgttccagacggtttcttgcttgattgttgcggtattgttggtgtgttgccctatggaggaggtctaccgggaagtgtttgaaggtgcgatggtctgcctcatttgtcccactgcgactgctgcggctgtcattaccggtaaactgggtggaagcgcatccagcctgacgacctatacgttgttgtccaatcttctggcggctgtggctgttcctttggttttcccgttggtggagcctcatgctgacattactttttttgttgcattcctgaaaattctgagtaaagtctttccattgctgctttgtcctttcttgctggcatggtttctgcgtgcgtttgtgccgaaggtgcatcattttctgttgggtttccatgatgcagccttctatttgtgggcggtagctcttgccattgtctcagggcagacggtacgttcattggtcaatagtgatgcaccggtatttgttgaactgctgatagccctggcgggactgataacctgctgtatacaattctatttgggaaagagaatcggcggtcattatggtgagcgcatcagtggagggcaggcgctggggcaaaagaatacggtgcttgccatctggatggcatatacttatcttaatccgttatcttccgtcggtccgggatcgtatgtgctgtggcaaaacatcatcaatagttatcagctgtggaagaaaaggaaaaatgagacggaataactgctgagtattttacatcttatttgctttatggacatagagggtggttgcaacaattatcagtacaaatgccataatgaggaatattatccggataagacgatgttttgaaaataggttggccatgcaggcagaagccacgctgaaacgggctattatagaatcaattgtggcgttttcgaaaaagactgatgcaatactccatagtgcaataatggttaatatagcattggctgataaacaaagaattttatcaagtggcattctaaatacttttcttgttctcatatataggactctatgtttaactcctttcattcctgcctttcgctgaatcagccaaaggatagggcaaaaataaaagagaacttcctgacagaatcaatattgtcttggaatattgttaaatgattgaatttctaaacctatgtttattctttgctgtcaaaactctgtttgtgtctgatgcggctcatgtgaataggggttattttcaagtaagacgcaatttcttttaggggtaccatttgtaggatttctggacattttttaagaagttggagatagcgttcttccgatgtaaatctgaacaaatccaagtaacgtgaatacgactgaaaaaataattgttcggctgcaatgcgggctattcgttgattttctttgttctcttcaaattcttgtagaagtaattcggaagaacagatgtagattctacatggggttattgcttgtatattcaattcagattttatgtcgtataaacaattgggataatcagagataaattcattggcaaaagaaaaacctacattatatgttttgttttcagtttggttgatgcaggtatatttgattacaccggatacaataaacccgaagaaagaaccgacttctccctctcggaggataaattcatttcttttataataccgtagttctccgtttcttaaacacagttccctaaaaaagtcagtgtctatattgcccatgtatgaattaaaatctgtcatttacaacacatgtttttcgaaaggtacaaaattattattttattcctgattttttgtcattgttggtaagttggttgtggattctcttattataatactttaaaaatttaacttcacctacgttttttaaaagcttttggttttcaatgaagttttgtccgtattttagccaacgtttggtaaatcttttgaatttagtacatgggaaatcagaacactggaaacaatgtgttattcttttttccaagcaacataaatggaatgttttacatttttcacagcgagaaccattctgttctgctcctttgcagggacttttttctcttgtgtatatgggacaaccaccacaaaagacaccacaagcaggaatacgtccgttatacgatttcattcagccagccttttcgccatccaaaaattggtgagataaagttggttggctttgcgtttctgttccacttctactatatagcctcttttctcaaagaatggacgggctgtcaggcttacttctgatgtaattcgcatgattcctcttgcggttgcataccgttctatctcatttagaagtatggtagcaatgcctttaccttgaaaatctttatgaataaacatagaatgcaaatatccttggtgggtaatggatgaaaagccgacaatctgtgactgttgattggttgccacaataaaataatgtgtcttaatcatgtcttttatgtgggagaggtcgtttccgcacgatgcccaatctgccacttctgcttctgaatagtcacgtttgtttatatggaggactgtctcttgaaacaaactcataagttcaagggcatcagactgttgggcaattctaattgtaaaatctgtattcatgtttttaagtgctaaaatgtatgcttttagatgttccatgttctaacagaaagtctttcaatgtatttattgtgtttgcaaagataattttttcatttctaatttattggtttaggaaaccaagttgttgattctctgcttcgaatataaaaagtatgcgaattttttatgaagcatgggaatctgctttcaatcgccagccaatggctgatgaatttaaccgggtagatttcttgtcaatcggtttcagacctgcttataagaacaatttataacaaagtactcccaataaaagcaagactaaagcacatgctgcaagaatcgtctttgccctgaatagatgttctttatctgataattccttttcagtagtatttcttcggatttcttctatttcctcaatggttacatcggctctctcaggacctttcctttttacaaggtatttgtagtgctcccgcatccgtcctctgctcaacttgcggagagcacggttctctttatccctttgtagcatgtcattgatgcagcctaatgttcccataagcagatttttatcatgtgtaagcaaaatggtctgcttgcacgtgtactaagatacggcatttatgtcgctttcgcaagcgattttgtgttttttgatataaactgatgtgacgatacgattttgatagttatgttaactcattgtctgccagagagtaattttgccaacccattgtcatgcttttggcaaacttttgccatgcctatggcaaagtcttgccaatagggtggcaaaatcttgccaacttgtcggcaagaaagacacacactgttccctatacctttattatagtgtgatagtgtgagaagtgtttttcctttttaaaacttttgtgtagaatgatgatgggcttcttttattctgttttgccggacggcatcagcagttcttcttcattgtagcgcggtcggtccttcacctcaatgtatattttgccgatgtattcgcctacaatccccagcgacacaagtatcacacctcctaccagccagacggaaatcatcagtgatgaccatccggggacggcgttatgctgtgtgtaagagtgaagtgtccatccggtgacacacagtgccacaagaataaagatgcagcctatccaaaaaatcatacggaccggtttgacggaaaaggaagtgataccgtcgatggcaaaattaagcatcttccggaaaggatactttgattctccggcaaaacgcttgtcacgattgtagtacacgctgtccgtctggtagccgatgaggggaaccagtccccgaagaaaaaggttgcgctcgcggaagcggcataggtgttgtacagcccgctggctcatcaggcggtagtcggcatgattgtagacggattttacccccattgccttcatcagccgataaaagaccaaagcggtgttgcgtttgaagaaagtgtcggtcttccgttctttacgtacgccataaacgatgtcattgcccgctttatagctgtttatcatgtccggaatcacctggatgtcatcttgcaagtctgcatcaatggaaatggctatctcgcaacggtcttttactgcattgagtcctgccagcagggcattctggtgtcctacgtttcctgccaggttcagtccgcaggcataggccgtattttggtgcagttctttgatgatagcccatgtctggtcggtgcttccgtcgtttacatataatatatagctttccggggaaatttgccgggcttgtatcagccggtcgaataattggctcaatcgtttatgggtttcatgcagcactgcctcttctttgtagcaaggtacgacaacggcgagtatgggagagttttccatcatagaacaaatctttttgcaatattcgtaagaaatcgggagaaaaacaaattatcactcttttcttttgaaaacgaaacgtacgagtaagaagttgaccggaatggcgatggcgaaaaccggaatgggggccagaggtttggggatgcccatccagagagagaggttcagcaaccccatgtgtagcagatagctgcataagtgtgctcctccaaatccgaaggcttttctccatgagggctttcggccgaaggtaaagtaagcggtcagatagaaattggcgatgaagctgagagcatatcccagtgtataggctatgtttacattgataacccgttgtaatacaaaatacaatccgtagtgcagagctgtcgcaaagatgcccaccattacgaagcgtacaaattccggtagttgtttcagccgcttcatcttaacattaaatatctactctctgttgccattatcattggggcggcaaagttaggcattgtttcagaattatttgtaattttgctttgcgaaattaagctgcatctcagcaaattgcaaataaatttgcatctgctttcggtttgcgctatctttgcgtccagaaaacataaaaaacaaataaggtatgtcggacagaaagaaggcgttctggtttattgcgctgctgagtgtgcttgtggttgttccctttctgggagaaaccattttttattccaagggggaaccgcgggaggcgattgttgccctttctatgctggaaagtggaaactggatacttccggtgaactatggtactgatattgcttataaaccccctttcttctactggtcaatagccgccgtctcttccctttttggagaggtgacggagttttctgcccgtttcccgtctgcattggcttttttagccatgcagttaatgttctttgcctttgtggcaaaacgtaaaaacgttcaaacggcgtttctggcctctattcttcttttgtcttctttcgaggtgcatcgggcggctgtcgcttgtcgggtcgatatggttcaggttgcctttatcgttatttccctttgtctgctgttccgctgggatgagaagggatgccgcggagtgccttggcttgcggtgttgctgatgggatgtgccacgttgaccaaagggccggtaggctccatattcccttgcgcgtgtatcggtgtgtatcagttgttgcgcggacgttctttctggaaagcgtttttctcgttggtaggtatcggcttgctttcttttgttccttatttagcttgggtatacgtagcttacagacaaggtggacaaccgttcctcgatttggttctggaggagaataccaggcggtttatgggcaaaatgtcctacgagtcccatgaaaatcctatatggtataatttcctgactttgatttggggatggattccctggacgttggttctggtagtttccttgtttggcttgaagtggaaaaacatgcgttgtctgccggaaggggagaccctgctgttgcggttgaagaagggctggactgctttccgcaaccagtctccggtacaattgttcacgtggctggtcattctgataatctttgtcttctactgcatccccaagagtaagcggagcgtttatctgcttcccatctatccgtttatggcagtgctgatagctgagtatctgttggctttggtacaaaagggggcacgagttttcaggatttgtgcaatcatctttgcttctttgggcttgttgcttacgcttgtttttgtcgtagttcgtctcggcctggttcccgacagcgtttttggaagtggacgccatgccgctgagaatgtagcctttatgcatgcgttggaggatgtggctttgtctgttcccaagtggctcctggtagcgcttcccgtagtagccgctgtctgcacattatgtatggtggtaaagcgtgcggatagccggtcattattatatggtatagcaggatgtatgctttgtcttttcgtatcattggattcggtttatcagcccacggtgctggctgtgaaatcagataaacatttggctgaaagggtcaatacgtatgttccggaaggtgtggtctattcttactcgaaaatgagtttctatggtgttaacttctatctgaaagaccgcatgcggcacattgaaaaggaacgtccgtccagcggggagggctatttgttggttcccgtaaaggaggaggagaatatgttgggagagctggaacagacgtatcatctggaaaagatattccgtacagacagacgcagttgtgatatgcgtaatgaaatctgcatgtataaatttagggcgattgacattcataacccataatttataactcataacttaaaatgaatccgatagatatcattaacaaatattatccggaagagaatgagttgcggcatatactgttgacgcacagccgttccgtagccgacaagtcgttatggattgccgaccgccatccggaactttcattggataaggattttctgtacgaggctgccatgctgcacgatataggcatttttcttacagatgcggcaggtatccattgttttggcgacaagccttatatctgtcacggttatttgggagccgacctgatacgcggcgaaggctatccccgccatgctttggtttgtgaacgccatacgggtgccggactttcattggagggaatcattgcgcaggatttgcccgtaccgcatcgtgaaatggttccggtcagcttggaagaacaagctatctgttttgccgataagttttattcaaaaactcatttggaaaaggagaaaagtgtagaaaaagcccgaaaaagtttggaacgttatggtgaagaaggggtacggcgctttgataattggtgcgaacagttcttgtagcaatctaaatttctttaaaaagggagattatccgtataaattatgtacttttgcccctccaagcgtaaactattagttaatgacgccattgaaagcaaatacattcatatcattcatactactattcgtcttgcttcttctctccggtggggctgcttctcagcgccgtagagcgaaggtcgcgcctccgaatattcagcggacagacacgttgcaggtaggggatagtttgcagatgggagactccctgcaagggggaaaggggcttcctgccgattcgttgcaacaagatacggtagcggctgcgcctcccaagaaggatgcattggatgctcccgtagcctacgaagccaatgactccattgtatttacgcagagtggctttgcccatctttacggccagggaaaggtgagttatccgggtgctgacctggaggctgatgtcatctctatggatatggacaacagtacggtttttgcccgtggcgtggtcgattctgtaggaacagccaagggaagaccggtcttcaaagacggggacacctcctacgaaaccgatactatccgttataacttcaagagtaaaagaggtcttatcagcaatgttgtcagccagcagggcgagggatacgtgaccggtaataatgccaagaaagggaataatgatgaactctatatgaggagcggtcgttacacgacttgtgaccatcatgaccacccccatttttatatgcagatgacttatgccaaggtacgtccgaaaaagaacgtggtgacgggacctgcctatctggtagtagaggatgtgccgcttccgcttgccgttccatttttctttttcccgttttctagcagttaccagtccggttttctgatgcctacctatatggatgactccaatcgtggcttcggtctgacggacggtggatattacttcgccatcagtgaccaaatggacttgaagctgcgggcggatatcttcacgaaaggttcttgggcgctgaatatggagtcgaactatgtgaagcgttacaaatattccggtttgctgcaggcaagctatcaggtgaccaagaccggtgacaaaggcttgcccgactactcggttgccaaagacttcaaggtggtgtggtctcaccggcaggacccgaaagcgagtccgaattctaccttttctgccagtgtgaactttgctaccagtagttatgagcgtaccaatatcggcaatatgtacaactcccaggcaatgtcgcagaataccaagacttccagtgtcagctattcgcgtaactttcccgaccagcatctgagcatctccgcttcaggtaatattgcccagaccatgcgcgactcctctatcgcggtgactttaccggacatgaccatttccttgagtaccattttccctttcaagcgcaaacatgcagtgggagatgaaaagtggtatgagaagatttccgttcgctatactggccgtgtgaagaacagtatcaagacgaaggacaatctgttgttcaagaagaacctgatacgcgattgggagaacggtatgcagcatgagattccggtaagtgccacgtttactttgttcaagtacttcaatgtgacgcctaccgtaaactatacggagcgttggtacacccgcaaggtgaagaaggactgggacgatgagcaaggcaaggaggtgaatgatacgacctacggttttcaccgtgtatacgactacagtgccagtctgggtatcaataccaaagtttatggtatgtacaagccattgtttatgaagaagaaggagatacagatacgtcacgtcatcactccctccatcagtttcagcgctgcacccgatttcacttcgtcccgttttggctattatgactcttatataaaagaccagaacggcattcgcgataccgtgcagtattcctattatgccggtcaggtgttcagtccgccaagtggaggaaagcaggggcttatcagtttcaatatctccaataaccttgaaatgaagttcaaggataagaatgactctatccgcaaggtgagcctgattgacgatttgagtatgggtatcagttacaacacggctgcccaggtgcgtccttggagtgacttgagctttaatctccgtctgaagttgagcaagagttatacgttgagtatgagctctacctttgccacttatgcttacgagtttgatgagaacggaagggtggtgcccggtaaccgtacggaatggtcgtatggccgtttcggtcgttggtcgggatatggtacgtcgttcagttggaccgtgaacaatgattcgtggaagaaaataaggaacttcttcaccggtcagaaggatgacgaggagcagggccaagaccagaatgcctcgacggaggaagacggtgacatggagggggaaactaccgaggacggcactccgaagaagaagaaggaaaaggctgctgccgatgctgacggctatcaggtattcaagatgccttggtctatcaacttcagtaccggtttcaatattacggaagacaccagtaagcccattaatcgtaagaacatgcgctatccgtacaaattcagcctgaattcccttaatataaacggtaacgtcaagcttaccaataaatgggctgtcagcttcaattccggttatgacttcaatgcgaaggagataacgcagaccgctttcaacatcacacgtgacctgcactgtttcagcatgacggctgccatatcacctttcggacgctggaaatactataactttaccatccgtgccaatgcaagtatcctgcaagacttgaaatgggaacagagaagccagactcagagtaatattcagtggtattgatgtttaccaaattatttccgtctctccatgttcccgcaaatactcgtttgttttgctgaaatgcttgttcccgaagaagccgttataagcggataggggagatggatgtgccgaggtaagtaccagatgtcggctacggtcgatgaatgcccctttacgttgggcgtaggctccccaaagaataaatacaagatgctctttttcttcggcgagaatgcggatagccgcatctgtaaatgtttcccaacctcggttttggtgagaaccggcttggtgtgcacgtacggtgagggtagcattgagcagcaatatgccttgctctgcccagcgtgtcagattgccggtagtgggggcatcagtgccaatgtcattttttatttccttgaaaatattaagtaaggaaggagggaaaggaacaccgtcatttacggagaaacaaagtccgtgtgcttgtcccggaccatgataggggtcttgaccgattatcacgacttttactttgtcaaaagggcataggttgaatgcattgaatatcagctttcccggaggatatattgcatatttcccatattcgtcccgtacaaaatcagtcaatgtacggaaataatctttctcaaattcaggttgcagatgtgctttccagctttcttctatttgaacattcatactaattggatctgttagtagtttcggatgctaaagtacaaaataaaaaataaagtccaaccttttgagggggtgaactttatattatatgacgggataaatgtatatcaaatcaggtgtatattgtgttccttgcactctttgcgcatatcttccggccagatactggcttgtatctcaccgatatgcgccttgcgcagatagaacatacagaggcgggactgccctataccgccaccgatggaaagcggcagtgtatcattcatcaagcgtttgtggaagtaaagttccaggcgttcctcttcgccttcctctttgagctggcgaagcagggcttccttgtctacgcggatacccatggaggaaagttcgatgctgcgttgcaggatgtggtcccatagcaggaggtcaccgttcagtccggggaggtcgttcagccctttgctggtatagtcgtcgtagtccggggcgcgtccgtcgtgcttcttgccgtcgctcagcttgcatccgataccgatgatgaacactgcaccgtatttcttgcaaatggcatgttcgcggcatttgggttccaagtccggatacagttggcgcaattcttcggcatggataaagtgaagtttctggggcaggcaaggcttgatttgcggatacatctcatataccatatattctgtgcgcaccatagctgcatagatacgggttactatctccttgaggaattccacattgcggtcttcggcagtaatgacgcgttcccagtcccactggtctacataaagggaatgcagattgcccagttcttcatcggcacggatggcattcatgtctgtgtagatgccatatcccggttcgatatggtattcggcaagcgtgaggcgtttccatttggcgagggagtgcaccacttcagctttggcgtcgcccaaatctttgatagggaaagttacggcacgttccactccattgaggtcgtcattgatacccattcctttcaatacgaacagtggagctgtcacacgtcgcaggcgcagttcggaagagaggttcaattggaagaactctttaatttgtttaatccctaattcagtctgttttaggtccaataaaggtttgtaaccttcaggtgttatcaggtagctcataaatttattcagtataacttctattaaattgctcggcaaagataggaataatattgatacttgcttctgttttgtgggaaaaaagaacaaaatgtttgtgtaattgcggttagtcttctcaaagtaataataaaaatattcctcggtttgatataaaaagcgtttgaatgttaggaatctgctaatttttttatacttttgcatccacatttggctccgtagcttagtgaatagagcgtcagattccggttctgaaggtcgtgcgtttgaatcgcaccggggtcacaaagaaaggaactccctttgcatgaatactttgcaaagggagtttctttttatacaatacatccagaaaagtcaaccatacggttctctttcttgttataatttccatagagttagaggtatgaaacaaataatatttatttttgcaatgttaatgacttgtctgtcctatgccggtaagccggaaggacggtcagaaaggagaacagacatgaaaccaatgaaagagatttatctggcaggaggatgtttttggggtaccgaacatttcctgaaacaaatagaaggtgtggaggctacccaggtgggatatgccaatggaaatatagccaatcctacctatcagcaggtatgtaccggtaccacggactttgccgaaaccgtaaaagtacagtatgatcccgatgaggtggacttgcctttccttatcgacctttatttcaaaacgattgaccctaccagcctcaataagcaagggggggatagaggtacacagtatcgcacgggtatctattatacggataccgccgacctgcccgttattcgtgaaaccgttgaccggctggctgccaactactcccgtccgttggttgtagagatagagcctttgaagaacttctatctcgccgaagattatcatcaagactatctggacaaaaatcctggtggatattgccacattaaccccaccttgttcgacctggcacgtaaagcgaagatgaagaaagaaggagatggcgagtatttaaacctggaaaagtaacggacaatggatatactgttaataagtaatgaagatacgtgccgcagccgtatcgcgcaggaactcctgcatgcatttggcaggggaatgaatatctctacggcaggaattatggaggggaactgcgttcccgatgccgtgtgcaatgtgatggaacagaatggtttcagcgtgtctcgcaagaaaccgtctggtgtcgggacctatacgcaccggtcgtgggactacgtgattaccctatgtaaagaagccggagaagaactgaagtttatcactctggatgccaagcagcaggtgcattttgattttgaagatccctttaaaaatcgttttcaaaatgaaagtgagcaggagaaacaagttgcctcactctatgaaaccatgtaccggcggctgtatgaattttaccgcgatgaactgagtgagcagctgttgcctcgttgtacgtgcggtgcaaacacctattgccgttgtgaatagtgaaatatgtgttttttttgaagcaatctcttgactcgtccctaagggcaggacctatctttgcttcataaacaaaatgcgcatgagtttatgaagaataaaatgaagtttaaaatcggagagttttccaaactttgccaagtgaccgttaagacgcttcgtcattatgaagagataggattgatgatacccgttgaagtggatgagtggacggggtatcgctattacgacatcagccagctccggtgtatgagccgtattgtttacctcaagcaattagggttcagcctcgaagagatatccgagttgtttgccgatggcaaggaatttccggatgctgaattgttgaaggttaaaatagaacgttgcaaaaacgagattgaacacttgatatggcggcagaccgaacttgccaaattggaaaatttactccataaacaagagaatgttatggaaaaagtgtttaagaaatccctcccttcaagaatttttgctacccatcgccgtaaaatagactcttatcaggaactgttcaatctttgtccgaatattatcgggcctgaaatgtaccgtttgggttgtgaatgtcctgccccggaatattgtttcacggtggaatataatgaggaatatggggttgatattgatatcgagttttttgaagcggtggctgaacgcaaggaagattcggaactgattaaattcaaggaacttccggaagtaccggttgcgctctgtgtcaaccattacggtgcttatgagcatatgcccgaaactttcgccgagctttttgcgtatgccgaggcaaatggatacgaggtcattgaccgtccccggttttgccatattgacggcatttggaacaaagaaacggtggatgaatggatgacggaaattcagttgcccatcaaactttcttaatcagcctttgatttttgcggaaagctttcaaccgtgagaatacctaaaaatagggataggtagtcaacttattttctgcgaactttgcagactgaaaaaagaattgaaatgagaagcctgcatattctgtttatattggtagttgtcacttggctcggttttccgctgagagcgcaagaagctatttctatcgggactcgccacactttgttttcgcatgtcttgaatgaggctagagaatattgggtgtatgtacctgcaacccgcccgggtgaaaaagaggaaagttatccggttctttatttgctggacggtgattctttttttcattcggtggtaggttttactcgcttgttttccacctccaaagtttcttccttaccgccctgtatcgttgtggctgtcctgaatacaaacagaaccagagactttacgccaacctgttccgctgcccggcgtgacggaactgtccgtccgggcgataaaccggaagggggtggggcaggacaattttgccgttttctgacggaggagctacgccccgcagtggaacaagacttgccggtgaatggacaacacttgttggccggacattcttatgccgggttgttcacgctgcatgttttgctgaattatcccggtacatttgatacatacatcgccatagaccccagtttatggtgggataaaggatgttttcagaaacaggtagaacggcaggtagataaggttgacttttcaggaaaacaactgtatgttgcgtttgccactcagccgcgtcctgataggaagctgagccacttttccctgacagatgattttatagggagtgcagttcctcgtatggagaagcggcatttgcgggtggtatcaaaaaagttcccggaagagacgcatggaacggttgctcttccgggattttatgacggactgaaaacgttgttcttccgttctgcggttggaatttctctgccgaacaaacctctctgaaaaaaactctatttttcagtaagctgaatgatatgcaccattgtactaaggggactacctataccatggtgaggtctgccaaaatcctgaaagcgtcatagcctgagtcgccttccggcaggaagcgccgagaagcgccatttccttataaatcagtattttcagctccggagaaggttgagtgtccttctccggacacactgattaaaaaactgcaaaagtgcagccggggcttcgttgactccgggcaattggaatagtagtacaaccactgttgtacaatgagcgcagcaccatatgccctgctaccgtacggaagtgcataaaaaaaaacagttgcctggagaaaccctctccaagcaactgttttcagtttcttgatactttataatctacatattctaaatctttcttgtcatcaatcgtcaatgtcaatcaccctcattttagagtcaaatgtaatttcccaacgattagacaactttatctcatactcattgtcatcgtactcaatctgaagaattcttgcatccggataattggtctttacatagttacgtatcgcttccggtacaatctgtacaggaacttcactttgtctgcatcgtacctctttccattcccccgatttatcaaattctaccttctccccattcgtgaacaccacatcatagcttttataaaacattcccgactccaatttagccattgccaccttatggtctttaaaataagtcttgataaatgtctgcgccttcgccggcaactggctcacctctatcggcttatcattatccgccattaccattgtgtgcactgcaaacatacaaaccaacatcataactaattttttcatacttctctatttttaataattaatactttatttgttttctgtattacaaagatgggaaggaaatctggaaagaattgggaaaaaaactctatttttggaaatgaaaaaaaatctatttttgaaaatgggtgttgcggctcttcacctatgaatttttgtttgcaatgaatattatttaaagacacaatagactattatggctatgaaaatattaaatcagtttatcgatgattttgtaggtgttttccaatatcggtttatggatacctttcaatattttaaagaaaggaagaaaagtaaatatttaggagatagatttgaggaatgggttgtgaagaactccaatattagtaaagatggttattcggatctatgtgataagaaaatattttggcggcttttagattggagaggtgataaatacattgaggggtataggcctctgtcttcatcatctccggatttgttgatggagtgtgttaccacaacgagtaccattcatgaagttggagatattatagctgtagaatgtaaatggcgaagtaagataggtttttatctcgatataaaagacattgaaaagtacgaggggtatatgaattccaatctgttgaaccgtccgataaaaaacttgttttatgtttttggctttggatggtgtggtgacagtccggaatctgtttatgtagttcctgccagagaattgtatgattatgataaagatacctgtagaataacgttccctattaaagaaaccgagaaggagaaaatgggtagattggagcgctttaagaagaaagacaatagatgtcttctgtatatcaagtaatggtattacttggttatataagctccaatcaactgttatattgtttgggtcgccgtcaatctttgtggcgaaggctattactggcatctaatgcggtttgcaacctttcccagtcgtcacaaagcgcctgcatggacggaaacaataaatctgctccggcatccagtaatacctgcctgtccagcggaccggtattgactgccacagtgaatatgccggctgctgttccggcttgtactccgataggtgcattttctacaactatagcttcgttggcttgtactccggctttttccagtcccattagataaggctcaggatgaggctttccgtatttcacatcaaaggcggtcaccatgtggtcgcgctgaaacataccagggaagttgtgggcaaggcggttcagcagggagtgttggcccgaaccggtgacaagtaccggaataagtcctgccgcttttaccttttgcagcacttcccaagcacccggcatacgttccggttccgggtgggtactgaattcggcgcttttctctgcatagatgctttctatcatctcgggagtggcatccttgccatactggcgttgataaacgatgttgatggtggaggctccggtacgtccctcgtgcatgtatgcctcttcacggctcaagtgcaggccatgacgttccattactttatgccaggcatcggcatggtagggcatggagttgaataacacaccgtccatgtcaaaaagaacggctttcagttggatgtaggggtgcccgtgcttttccagataacgggcgatagagttttcgaacacttggtagattggggattgagaatttaaaaatgcggggtagataaatagagagttgagaatcggggaacggttctcttcgcacttgttgtgcagccatttctcaattctcaactctcaattcttaatttatcaaagtcttgcctggatagctttggactcttcttcgtagccgggcttgttcagcaatgcaaacatattcttcttgtatgcttccacacccggttggttgaacggattgactcccaaaatataaccgctgataccgcaagctatttcaaagaagtagagcagacctccgatgctttcttcattcagtgcagggataacgatgcgcatgttgggtacgccgccgtcaacgtgggcaagctgtgtgcccaattcagccatcttgttcacttcgtccacgtgcttgcctgccaggaagttcagtccgtcgaggttggcttcgtccgaaggtacttgcagggagtgctgtgtcttctccacggagatgacagtttcgtagatggtacgttcgccttcctgaatccattgtcccatggagtgcaggtcggtggagaaatctacggcagcagggaagatacccttgttttccttaccttcggattcaccataaagctgcttccaccattcgcttacgtagtgcagtttgggattgtagtttacgaggatttcaattttcttaccgttcttgtagagctcgttacgcgtagctgcatagatggcagcaggattttctgcaaacggaacatcttttccacaagccttttccatggcaactgcacctgcaaccagtttctcaatgtcgaaacctgctattgcgatgggcagcaagcctaccggagtcagtacggagaaacgtccgcccacgttatcggggatgatgaaggatttgtagccttcgttgtcggccgttacgcgggcagcgccctttttggcatcggtgatggcaacgataaccttctttgccatatccttgccgcgttggtcttcgcattgctttttcaacagacggaacgccaaggccgtttcagtggtagtaccggatttggagatgttgataacaccgaatttcttgtctttcaagtattcggtgagttcatatagataatcttcaccgatattgtgtcctgcatacagaatgaccggagccgttttcttgtcttgcaaccaagtgaagctgtttgacaaagcctctatcaccgcacgtgcaccgaggtaacttccgccaataccggcaactactactacctcgcagttgtcacgcaacgtctgtgcggtagtctttaggtcggccaggtgctctttagtgatggaagaggggaggtgcagccagcctaagaagtcgttgcccttaccggtaccattctctaatgcttcctgtgcagcctttacttgggcttcataggcgaaaacgttttctttggagatgaatccaagagtcttttcaatgttcaaactaatcataatattctaggttttaaattcagtatttcgttttatcttttttcgcgcttaccggaatgaatcggtaagcagcttgatttcaatcgtcggcgagatacgctcatacagaatgttgtatactgcatctacaataggcatgttgacatgataatgcttgttgatttccttgatacattttgtaccgtaatatccttcagcaatcatttccatctcaatctgcgcgcttttcacggagtatcccttgccaatcatcgtaccgaatgtgcggttgcggctgaaattggaatatcccgtcaccagcaggtcacctaaataaacggaatcacttacgtttctgttcagcggatgtaccgtttgcaggaatctgttcatttcctgtatggcattggacatgagcacagcctgaaagttgtcgccatatttcagaccgctgcagataccggctgcaatggcatatacattcttcagcaccgaactgtattcaatgccggcaacgtcattactgacagaggtcttgatgaatgaactggccagtttgcgggcaatggtgcaagccttgtcggtgtcgggacaagcaatggtcaaataagaaaggcgttccagagccacttcttccgcatggcagggacctgccaatacagcaatattctcagctgggacgccatattccttagtgaaatattccgagacaatcaagttgtcatcgggcacaatacctttaatggcagtgatgatgaatttatccttaatcttagtcttcagtttcttcaagtgaaccttcagataaggggaaggtgtaacgaagatgagcgtatcagattctttcacgacatcattgatgttggagttgaagttgatacgcttggtatcaaacttgacgcccgtcaagtaggcagggttatgaccaagccgtttgaagtcggcaatacggtcatcgcgtcgcatgtaccaatttatagactccgcttgggccagaaccatttttgcaatggcagttgcccaacttcctccgcccatgatggctatcttaccgggtagtttcatatcgaaattaataattaaaaattaaaaattaaaagaggggaaaggagtaccttcctcctcctcttatctttaatcttgcctatttaattctttaatttttaattcttaattcttccgacccagtcagcaacttcgtttacggtcgggtttgccagttccaatttatatttcttgttgataccgcagatgtccatgtggagtttttgcggattcacatctttcatgtcactcaccaggttgtagccggctttctggattacagccacccagtcttcggggatgcccagctctgtgtatcgtgcaggagcatctttggggataaccttttccggacgcatctgcgggaagaaaagcacttcttggataaaggattcgcccgtcattaacatggtcagacggtcgatgccgataccgatgcccgatgtgggaggcataccgtattgcaatgctttcaggaagtcctggtcgatgaacatcgcttcgtcgtctcccttttcgctcaagcggagttggtctttgaagcgttcttcctggtctatcgggtcgttcagctcgctgtaagcgttggcaagttccttgccgttcaccatcagctcgaagcgttcggtcagtcccggcttgctgcggtgcatcttggtcagcgggctcatctctacgggataatcggtgatgaaagtgggctgtatgaaagtaccttcgcagaattcgccgaagatttcatcaatcagcttacccttgcccatggtgtcgtcaatctccatattcagttccttgcacacctggcggatttcgtcctcgctctttccttcgaggtcgtatccggtcttttccttgatggcttccaggatgggcagacggcggtagggagctttgaagctgatggtcttgccgtctatctcggtttctgtacagccgtttacggcgatacagatgcgttccagcaatttctccgtaaagctcatcatccagttgtagtccttgtactgcacgtacagctccatacaagtgaattccgggttatggttcttgtccataccctcgttacggaagttcttgcctatttcatatacaccttcgaatccgcccacaatcagtcgcttcaagtaaagctcggtggcgatacgcaggtagaggtccatatccagagagttatggtgggtgatgaacggacgggcgcttgctccaccggggatggattgaagaatcggcgtctccacttccgtgtagccggcttcatccagcacggcacgcatggtcttgatgacggtggcacgcttcaggaatttttctttcacgccgtcgtttacgataaggtctacataacgctgacggtagcgcagttcggggtcctcgaaagagtcgtaagccacaccatccttatatttcacgataggcaggggcttgatgctctttgcaagtacggtcagcttcttggcatggatgctgatttcgcccatctgggtacggaatacgaatccttcgataccgatgaagtcgcctaaatcgagcaaacgtttgaacacggtgttgtacatctccttgtcctcgtccgggcagatgtcatcgcgggtgatatatacctggatgcgtcctttggagtcctgcaattcgatgaaagatgctttacccatgatacggcggctcatgatacgtccggcaacggacacttggcgaggctctgcatcgtcgttgaattcagctttaatatcggtagagaaagcatttgttacatactctgctgcgggataaggctcaatgcccatcgcgcgaagttcattcatgctgttgcgacgaatgatttcttgttcacttagttctaatacgttcatttcgctatatttcactcaatttgggtacaaaagtacgaaacatttttcagatagcgaacctttttccttgaaatatagggaacggggagtgacattaatcctctccttcggtatctacccattcgatatgcggggagaggagggtgcgttccgtcacttgtccgcattgcccgcggtagtattcggggatgaagcgtatctgcaccgcagtgatttgcgccggactcacttcttctggggtgtctaccccggtgccttccgaacggcaggtgtagtagaacgtcccgatgccctttagctttacggagtgtcccgagctcatcagcttgcccagcacttcaccaaggttcattaatactgcataagtatctcccggggttaccgtagacatttccgacaataatcgggctatttcatccgttgtatagggatgtcctttggtgacggctcttgggtgccatttgtcgtcgcctttctgttttactttcttatagaatgccatgggggcttgttgttattatgtgtccggctcaaccggtaggtcaggcatggttcatacggtatgaatgtgccaatcatacggtatgattatatcaatcatacggtatgattatggtaatcatatcttatgatttatcattgaatcgcaaagatagcataaatcatccgcatagtgtgcaggtttaaggtgttttttctgctgttctgttttaaaaaaagagtacctttgcacccgctaaaaagaaataggtatataatatggcaggacaaaagactccctcggcgttggggacggaaagtataggtaaactcttgatgcaatatgccgttccggcaatcatcgcaatgacggcatcctctttatataatatggtagacagtatcttcatcggtcacggcgttgggacgatggctatttcgggattggcgttgactttcccgttgatgaatctggctgcggcgttcggctcgctggtgggtgtgggagcctctacactgatttccgtcaagctggggcagagggattatgacacggcacagcgtgtgctgggcaatgtctttgtgctgaacatggtgctgggagtggcctttaccatcattgtcatgctctttctcgacccgattctctatttcttcggaggcagtgaccagacggtgggctacgccagggattatatgcagattatccttttgggaaatgccgttacgcacctctatctggggctgaatgcagtgctacgctcttcagggcatccgcagaaggcgatgtatgccaccatagccacggtggttatcaataccatactcgacccggtgtttatctatggtttcggctggggcatacgtggcgctgccgtcgctaccattgtggcgcaagtcatctctttgacgtggcagttcaagcttttcagcaataaggacgagctgttgcatttccaccgggggatattccgtctgaaacgtaagattgtattcgattcgcttgctatcggcatgtctcctttcctgatgaacctggcagcctgcttcatcgttatcattatcaatcaggggttgaagaagtatggcggcgacttggctatcggggctttcggcatcgtgaaccgtctggttttcattgtagtgatgattgtgatggggctgaatcagggaatgcagcctattgccggatataactttggggcgaagctgtacggacgggtgaacaaggtgctgagactgacgataatctatgccacggcagtgaccactttcggctttctggtcggtatgctggtgccggacctggtggtgggcatctttacatcggatgcggaactgacagagctttcggtcacgggactgcgtattacggtaatgttcttcccgattattggtttccagatggtgacttccaactttttccagagcataggcatggcaggcaaagcgatattcctttccctcacccggcagatgctgatcctgcttccttgcctgcttgtcctgccgcagtttttcggagtggcaggagtgtggtacagcatgccggtatccgatttgcttgcaagtttgatagcattggtgatgttggtttgtcaattccgcaaattcagaacctctcccttgtagggatgggtcgggggagaggctttgaatttttcttcctactttctgcagatattccgtaagaatatttatatttgctatctgcaaaccaatagatgaacaagcgtatgggcaataattttataatcaatataggccgtcaactgggcagtggcggacgggagataggcgagaaactggctgcccgtctgggtattgacttttatgataaggaactgattaggttggcttctgaagagagtggactgtgttgtgagttttttgagaaagctgatgagaaagcttcacaaggtattattggagggctcttcggcatgcgtttcccttttgtcagtgacggggctatcccagccacgaattgcttgagtaatgatgctctgttcaaagtgcagagtgacgtgatacgcagattggcggaggagaagtcctgcttgtttgtggggcgttgtgccgattacatcctgcgagaacatccacgctgtgtcaatgtcttcatttcctgctccaatgaggagcgcatcaagcgtatttgccgaatgtattccattactgagcgtgaagcggaggagatgatgaacaaagcggacaagaagcgtgccgaatactataactactacagctacaaaaaatggggagctgccgaaacataccacttgtgtatcgattcttccgtattgggtattgaagctacggtggactttatagaagagttcgtcaagaagaagctgaaactttaaggaattaaaattaaaggctgcgcaatgttggtttaacccaactacgcagcctttaattttaattccttaattcctcctacatcattgtcagtaatatcatctgtcccgccagaatacgcaggaacattgtcaatggatataccgtggagtaacctactgccggagcatcattgcctgatgtctgattggcgtatgccaatgcgggagggtctgtgttgctacctgctatcaaacccatcagggtgaagtagttcactttgcagtagaaacgggctatcataccgattatcaacaaggggataacagttatcaggaatccatagcctacatacagtaatccgctaccttctactactgtttgtacaaaatgctcaccagcttctataccgacactggcaaggaagagcacgataccgatttcacgcaacatcaagttggcactcatggtggtgtacgtcacaagatgcattttgtgaccgaaacgtccgatgaggatggcaactaccagcggaccaccagcaagacctaacttaaccggtgtcggcatacccgggaatgcaatagggaggcttcccagcaggattcccaaaaagattcccacaaaaatagttacgatattcggagtgtccaaacgtttcaactgattacccaatacgccggctacacgttctacggcatcctgctggcctaccaccattacacggtcacctacctgaagtaccagattgggatcggcaaacaagtccatacccgaacggttgatacgggttacatttacaccgtacatgctgcggaagtggaggcttcccagtttcttgccattgatttcagatttagtgacgaggatacggcgggaaaccatcggagtgtcctgtttttcccagtctacgtgtatttcttttccgataaaggcggttaccgcttcggcatcttcttcggaacatacgatgaagagctggtctcctacgtggaatattgtttcatgattggggatactgacgtgcccctcgtggcgtatgcgcgaacatacaaacgggcgtcccagaaaatcctttatctggagcagggtctttccggaaattgattcattgcgtacctcgaggtgaagcatgtgcggctgatgctttacatctgcttcctgcgtattgagttcctgttcctccttcttgaggttcacccggcaaatatagcggatggctatgatggaacctatgatacctaccacaccaagcggataggcgcaggcatatcccaatgcaatggggtctcccgtatagtttatctggttcagggcttcttgtgcggcacccagacccggagtattggttacggcaccatagagaatacctactatcattggcaggtctatccctccgtcaatgaagtagatgctcaatgctactgcgatattcagcaacacgataccgacagcaagcatgttcagccgcataccccctttcttaaaggaagaaaaaaaggagggcccgacttgcagaccgatacagaatacaaataaaatcaaaccgaattcgcggataaaatgcaaaatgtgtgtttcgcccgtgaagccaaaatggcccatcaggataccggcaaagaggacgaatgtaacccccaacgataccccgaaaatcttaatcttacccagcaatacgcccacagatattacgaatgcatacaaacaaacgatgtgagcgacagatgaagagtcccatagcaagctttctaaccaattcatagtacctattaatatgtcgttttttaaaatttcgcgcaaaaatacttaataaaaaggaggtggcaaaggctttgtggtactttttgctatatcaactttgcaaaagtagagtatgcttccggtgaatacgctgaatccgtatgggcacggagtcatctgttagtgcaattttctctaaaaaaagattttgttctaagtatttccttatatttgcaagtctcttgatgacaaaaatgaatagtattcatctatttaaattttaaataaactatggcagacagtaaagaaaaactcttctccgacttttctcccgtttccactgagcagtggatggagaaagttaccgcagacctgaaaggggcggatttcgagaagaagctcgtttggaggacaaacgaaggatttaaggtgaaacctttctaccgtatggaggacttggaaggtttgaagacaacagatgctcttcccggcgagtttccttatctcagaggtaccaagaaagacaacaatgaatggcttgttcgtcaggaaatcaaagtggaatgccccaaagaggccaatgccaaggcgttggacatcttgaataaaggtgtagattcactctctttccatgtaaaggccaaggaattgaacgcagagtatattgaaactttgttgaaagatatctgcgcggaatgtgtcgagttgaatttctctatctgccaggggcatgtggtggaacttgcagaacttcttgtcgcttatttccagaagaaggattatgacttgacgaaattgcaaggctccatcaactatgactacttcaacaagatgctggccaaaggtaaagaaaaaggtgatatggtggcaacagccaaggcgctgctcgaggctaccgcttcccttccgaaataccgtgtattgaatgtgaacgcgttgacattaaacaatgcgggttcttatattttccaggagctgggttatgctttggcttggggtaatgaatatatgaatcaattggttgatgccggtctgccggctgcaatggtagccaagaagattaagttcaatttcggtatcagttccaactacttccttgaaatagctaaattccgtgctgcacgtatgctgtgggctaatattgtggcttcttacagtcccgagtgtctgcgcgactgcgacaacaagggtaaggataacgaatgccgctgtgcagccaagatgaagattcatgcggaaacttcttcattcaacctgactttgtttgatgcacacgtaaacttgttgcgtacgcagactgaggcgatgagtgccgcccttgctggtgttgactcaatgacggttactccgttcgacaagacttatgatgctcctaacgaattctctgagcgtatggcgcgtaaccaacaattgctgttgaaagaagaatcgcacttcgataaggttatagacccggctgcaggttcttactatattgagaacttgaccgtctctattgccaagcaggcttgggacctcttcctcgctgtagaagaagacggtggtttctatgcttccgtgaaagccggaaaagtgcaggctgccgtaaacgagagcaacaaggcacgtcatgctgcagtcgccaagcgtaaggaagtgttgctgggtaccaaccagttccccaactttaatgaaaaggcgggagataagaaaccggttgaggctacttgctgttgcggcggcggacatacgtgcgaaaaagatgttccgacactgaactttgaccgtgctgccagtgaatttgaagcgttgcgtctcgaaacagaggcttccggcaaacgtccgaaagcgtttatgctgactatcggtaatttggccatgcgccaagcacgtgcacagtactcttgcaatttcttggcttgtgccggatatgaagttgtagacaacctcggtttctccactgtagaagaaggtatagaggctgcaatggctgccaaggccgacatcgtggtattgtgttcaagtgatgatgaatatgcagaatatgctgttcccgccttcaaggctctgaatggtcgtgccatgtttatcgtagccggtgctcctgcttgcatggacgacctgaaggctgccggtatcgagaactttatccatgtccgtgtcaatgtattagagacattaaaagaattcaacgccaaacttttgaagtaagcaacttcaatcgtaaatcataaatcgtcaaatcgtaaataacatgatgcgaaaagattttaaaaacttagatatatatgccgcttttcaacccgtcaatggtgctgagtggcaaaaggctaacggcatccatgctgattggaaaacgccggaacacattgaggtgaagcctgtttatacaaaagaagaccttgagggaatggaacatttgggttatgctgccggacttcctccttatttgcgtggtccgtactctgtaatgtatacattgcgtccctggactatccgtcagtatgcaggtttttctacagcggaagagtcaaatgccttttaccgtcgtaatttggcttccggacagaaaggtctgtccgtagctttcgacttggccactcaccgtggctacgaccccgaccacgaacgtgtagtgggtgacgtaggtaaggcaggtgtgtctatctgttccttggagaatatgaaggtgctgttcgatggaattcctttgaacaagatgtccgtctccatgaccatgaacggtgccgtacttcctgttatggcattctacatcaacgcaggtctggagcagggtgccaagttagaagaaatggctggtactatccagaacgatatcttgaaggaattcatggtgcgtaatacctatatctacccgcctgcattctctatgaagattatctctgatatctttgaatatacttcccagaaaatgcctaagtttaattctatctccatctccggctaccacatgcaggaagcgggtgctacggcagacatcgagttggcttacaccctggcagacggtttggaatatctgcgtgccggaacggctgcgggtattgacatcgatgctttcgcaccgcgtctctctttcttctgggccatcggaacgaaccactttatggaaattgccaaaatgcgtgccgcacgtatgttgtgggcaaagattgtgaagcagttcaatcctaagaatccgaagtcgctggctttgcgtacgcactcccagacttccggctggtcgctgacagagcaagacccgttcaacaatgtgggccgtacttgtatcgaggcgatggctgctgcattgggacatacccagtcactgcataccaatgctcttgacgaggctattgccttgccgacggatttctctgcacgtattgcacgtaatacgcagatttatattcaggaagaaacttacatttgcaagaatgtagacccatggggtggctcttattatgtggaaagtttgactaatgagttggctcacaaggcttgggaattgattcaggaagtagagaagctgggcggtatggcaaaagccatcgaaaccggtatccccaagatgcgtatcgaagaggctgctgcgcgtacacaagcccgtatcgatagcggttcgcagaccattgtcggtgtgaacaagtatcgtctggagaaagaagctccgattgatattcttgaaatcgacaatacggctgttcgtcaggaacagattgagaacctgaagcgtctgaaggaaggacgtaaccaggcagaagtggacaaggcattggaggctattactgaatgtgtaaagaccggtaagggcaacttactggaactggcagtggaggcagcccgtgtccgtgccactttgggggaaatctcttatgcttgcgaaaagattgtaggacgttataaagcagtaattagaactatatcaggcgtgtattcatcagaaagtaagaatgacagcgacttccaccgtgcttgtgaattggcagagaagtttgcgaagaaagagggacgtcagcctcgtatcatggtagccaagatgggccaggacggtcacgaccgcggtgccaaggttgttgcaaccggatatgccgactgtggcttcgacgtggatatgggacccttgttccagacaccggccgaggctgcccgcgaagcggttgagaacgacgttcatgtagtgggggtttcttcattggctgccggacacaagacattggttccgcagattatcgaagagctcaagaagttgggacgtgaggatatcgtagtgattgccggtggtgtaattcccgcacaagactatgacttcctttacaaggcaggtgtagctgccatctttggccccggtactccggttgccaaggctgcttgccagatattggaaatcttgttggatgaagaataatccgacacgttaaatgttaaaagagggacggtatgtgtttacatatccgtccctttttcttaatctgtgttatagaacatacttttttagttggataatttgcagatttatcagaagtccgtatctttgcaatgtgtttttcatagtattagatttaaggttaacaaaggttggagtacagcggtactcctttttttatgtccgtacgtcagctttgggggagaaaaatcacctggtctatgttatcgtttcttgcttatagtttcgttcttgccccctttttattacctttgtcccgctaaaagaataacgaatgatagtttgtattgccgaaaagccctctgtggcgcgtgacatagccgatgtattgggagcgaaagaaaagaaggacggatacatcgaaggaaacggataccaggtgacctggacattcggccatctttgtacgctgaaggagccgcatgaatatacccctaattggaagtcatggagcttgggaagcctccccatgatacctccccgtttcggtattaagctgattagtaatcccacatacgagcgccagttccatacgatagagaacctcatgcaacatgccgatatgattataaactgtggtgatgccgggcaggaaggagaattgatacagcgctgggtgatgcagaaagccggggcacgttgcccggtgaaacgtctttggatatcttcattgacagaggaagccatccgtgagggctttgccaagctgcgcgatgcgtcggatttccagcctttgtacgaagcaggcttgtcgcgtgccattggcgactggctgctcgggatgaatgccacccgcctctacaccatgaagtatgggcagaaccggcaggtactttctatcggccgtgtgcagacgccgacactggcgctgattgtaaaccgtcagttggaaatacagaattttgttcccaagcaatactgggagctgaagaccgtctatcgagataccactttctccgccatcctccggaaaagtgaggaggaactggtattggaagccgagaagcagaaagaggctatagctgccgggaagaaacctaaaaaagaagaagagaatcggggtatcgaccccattaccgaccgcgaacgtgggcttgctttattggaccagattaagaattctccttttaccgtgacggatgtcaccaagaaagaggggagggaggcgccactccgcttgtttgacttgacttctttacaagtggaatgtaacaagaagtttgcctattccgctgatgagacgctgaaaatcatccagtctttgtatgagaagaaagtggctacctatccacgtgtagacactacctatttgagtgatgacatctatcccaaatgccccggcatcttgaaaggtctgcgtgattacgagacatttacagcccctttgacaggaactgcattgttgaagtccaaaaaggttttcgataactcgaaggtaacagaccaccacgccattattcctaccggccagcatccgcagaatctgacggatatggagcgtcgcgtattcgatttgatagcacgccgtttcattgctgtattctatcccgattgtaagtttgccactaccaccgtattgggcgaggtagagagcatagagttcaaggccaccggcaagcagattctggaaccgggttggcgtgttatcttcggcaccccctcggcacaatcgcaggaggagaaagaggagaagggagaagaggagaatgtgcttccggcttttgtgaaaggagaaagcggaccgcacgtccccgatttgtatgagaagtggacgcagccgccccggccttatacggaagccaccctgctgcgtgctatggaaacggcgggcaagctggtggataacgacgaactgcgtgatgcgctgaaggaaaacggtatcggtcgtccatctacccgtgcagccatcatcgagacgctgttcaagcgaaactatatccgcaaggaaaagaagaatctgatagccacccctaccggtgtggagctgatacagattatccatgaggagctgttgaagtcggcggaactgaccggtatctgggagaaaaagctacgtgagatagaaaggcggacatataatgccggacaattcttggaagaattgaagcagatggtatcggaagtcgtgatgagtgtactttctgataacagcaaccgccacatcaccatccaagcgcctgctcccgaaaagggcagtaaggcttctgccaagacagaggctgccgataagccgaaaaaggagccgaagaaaagaacaccgagagagtctgccgccgcaggtaaaaagacggagcaggcttcgggcgctgtggcagcttcaagtacggaggcttccgtacaagctgacgatttcgtcggtcagccttgtccgctttgcggaaaaggtaccgttatcaaggggaaaacggcttacggttgttctgaatggaaatccggatgcacattccgcaagccgtttgaataagggtaatcacattaaataattctctccgccatgtatttccagaggggagcagccatcagcgcctggcggatgcttccttgctgcagcaattccttgacctcttgcaaggaaagcaggtgtacggtcaggttttccgtatcttccaactgttgctcggagattttctccacgtccgtagccaggaaacagtaggtaatgttggtgtgggtacttggattgggagagatttgcatgaactcttcccatactccgtttccatagccggtttcttccaaaagttcccgttgtgcggaaaccatcggagagccgtcctcttcttcgcatacccctgcacagagctcataggacgtttcttgtatgccatgccggtattggcggataaagacaaattgtccatcacgggtgatggcaatggtattcacccagttgggatattccaatatataataggaggggatgtggttgccgttgggcagcactacatggtccttacgcacagtgagccacggagcccgatgaaggtattcgctggataagacggtccaggtgtcttttgatttttccataatggtaaaattaactatattttaaacagcatccctccgatattatctgtcgtggctcccgtcaccgaggcgaggcatccgggtgtgtccgccatatagagggcacccaggaaagcaaagattagggcttccttgtattctatgatttgccggctgggaatcacgatttcacacggacacaaggcgtcgatacgttctatgaggaacttgttgaatgcacctccgccggtaatcagcagttttccgttaccatcgggcaaggggcgggcggtgatgatgcgtgatatttgccaggcggcatgctcgtaaaaggtacgtagcatattctccatactcaagccataacgctcgagcatgggatataccagcgtttccacccactcccgtcccaatgacttcggtccggactgatggtagaaatccattccgttcagttcgtccagcagttcttggcagatgttgccttgccgtgctatctcgccgtcacggtcaaattccaatcctatttgccggcagtaatggttgatgacgtaattcaccggactgatgtcaaaagcgatgcgccgcccgtcctgctcgaatgagatgttggagaaaccgccgatattcaaacagaagtcgtagtcggcaaaaagcaaccggtcgccaataggtacgagtggagcgccctgcccacccagcatgatgtccagccgccggaaatccgaaacggtaggtatacgggtttcagcggcaatggcggctccgtcacctatttggtacatgattctcttttgaggctcatggaagatggtatgcccgtgggaggcgataatatcggggtggactccaaattcttgcatgaactcgttgacacgttcaccgagaaactttccataggagctgtggaaagtgatgaactccaaagcactcattgtctgtgcaccggtacccaatatctgcttcatggcgtcggggtagctatagccttttgcacagtctatgtggaaagaccattttccggcttgctgccggaaagtgcaacaacatacgtccagcccgtcaagggaagtgccggacatcaggccgatggcttgaatttggaagtctttcatcctgattttcttgttttatttataattgaggtagaattcgacaacagcttctattcctttacggaagatgtccaacggtatattctcattaggtgagtggatggcgttggattcgagcccgaagcccatcagaacggttttgatgcctagtacttgctcgaaagtggagatgatggggatacttccaccccgacgcactgccagcggtttctttccaaaagctttttcaaaacctttttcggcggcttggtaggcgggtagggtgatggggcatacatatccttggcctccatgcatcggagtgacttttacctgtactgaatccggcgctatgtccagaatgtagtcggcaaagagccgggatatcttgtggtggtcctggtggggaaccaaccggcaggataccttggcgtatgccttggatgggagcacggtcttggacccttcacccgtatatccgccccagatgccgcatacgtcgaaagacggacggcaactgttacgttccagcgtactgtaacctttctctccgaaaagtgcttttacatggatagcctttttgtatttctcttcgtcgaaaggaatgcgggctatcatgtcgcgctcggtttggggaacttcttccacatcgtcatagaaacccggtacggtgatacgtccctctgcgtccgtcacttggctgattatctggcaaagtacattgatggggttggcaacagcaccgccgaagtgaccgctgtgtaggtcgcggttggggccggtcacttctatttcccaataggccagtccgcgcagtccggtggtcagtgaaggcaggtctgcaccaagcatgctggtgtccgaaaccagaatgacgtctgctttcagcaactctttgtgctcctggcagaagctttctaagctgggcgaaccgatttcttcttctccttcgaagatgaattttacgttggtttgcagcagttcgttgcgtacgaggtattcaaacgctttcacttgtatgaaagattgccctttgtcatcatcagcaccacgtgcccagatatgttcgtcgcgtatttccggttcaaaggggtcgcttttccaaagttcgagaggttcggctggcatcacgtcgtagtgggcatataccaatacggtcttggcgtccgggtctacgattttctgtccaaaaacaatcgggttacctttggagggcattacgagggcttcatccgctccggcttcgagcagcaactgtgcccagcgttcggcgcaggcaagcatatcgtcgtgatgctcgggtttggcactgatgcttggaatgcgaatgaggctgaacaagtcttccagcattttaggctcgttctcggtgatgtatttctttatttccatgggtgaatattatagttgtgttgttctgtcaatcaggtaataatccaacaatgtcattgctgtcattgcttccacgatgggtactgcgcgtggcaatacacacgggtcatggcgtcctcgggctttcagggtggtgtctacaccgtcaatgttcacggtgtgttgctccatcagtacggttgccacgggtttgaaggctacacggaaatagatgtcttgcccgttactgattccaccttgtataccgcccgaatgattggtgcgggtctcgatacgtccgttattgttgtagaacacatcattctgctccgagcctttctgctttaatcccttgaaaccgtctccatactcgaatgcttttgctgcattgatgctgagcatggctgctccaagtgctgcatggagcttgccgaatacgggttgtcccagtccgatggggcatcctttgacgacacaagtcaccactcctccgatggtatctccttctccctttatcttgaagatgagttcttccatttcttttgccttcgccgggtcggggcagcggaccggattggtctctatcaggtcgaggtcgtatgcggtataattttcttcaaggcggataggacctacttgtgaagtgtacgccgtgatgtgtatacccagctgcttcagcgccaatttggccagggcacccgctactacacgcgagattgtttcacgggctgatgaacgtccgcctccgcggtggtcgcggatgccatatttcactttataagtatagtcggcatgtgacggtcggtagacttctttcagattattgtaatcgtcagaatgttggttttggttccatacaatgaatcctatggggcagcctgtggattttccttcgaagatgccggagaggaactccactttatcaccttctttccgggcggtagtgatacgtgactgtccggggcggcgtcggtcgagctctgcctggacgaaatccatatcaatgactattcctgcagggaatccgtctatcactcctcccacgcccttaccgtgcgattccccaaaactggtaagacggagaatatttccaaatgagttgaacatatcaaatgctttaaaggtttatatatgaggttaatgtgccaatacgctttataagaaatgcttttgactttataaagataacaactttttttcataaaacgtttaaggaaataagataaaaagtcttttccgcataaagttgcctgcctttgccagagtttggtcaatggcttgttctttataaaaatggcttactctttatgaaatctgcatccgaatttcactcgtaatgatgaaaaaaggaacatttattttttagaaaagaccttgtactgtaaccttaaaaagtgttactttgcacctttgatttaaaatgggaaattaatagctcccttgggaagctttttattaactaaacaagtactcaaaaaagtatgaaaaagaatttattttatttatttgcattgatctgttcaatgagtttattcacggcttgtagtgatgatgacgatgacaaggtagtatgtcctgtgccgcaaacagagtttacagttgcaacaggtttgaacttgacttataacggtggatcaatgttgggaaagaaagtaacttttactccggatgcttctgatgcaaccaaggctactttggtattggctggcaatttggatctttccggtattcttacacgtgaagcggcttccggttcttttggtgcaggcgtattccctggttctccggttgtaacccttccggttactttgaatatacaaggtgatgaatgttcgttttccggcacaagtgagaccgattattgtacttttgactatgcaggaaaggttactgcttcttccttgaaattagatttaactaatgtcgcattgaaaaattccgctttatccggaacaacttgggttcctacaccccttaattctgattatacggaagaaccgattcatttgatttgggaatccaataagaatgtagaggtaatgcctggctgggagctaccgattcaaacaattttgacgttagctcttcgtatgcctttaattgacgcaggtggtgatgataaagtgaatgtagaggatatgttgtgtagtgtgttgcatgatattactttgggtgttgacggtaatatttcagcttcttatgttgatgccgctcagggaggtacctctgttgttaagactcctgcgaatgttgcacaatatgtagttctcagtgatacccaaatgaaggtatatttgaatctggatgccatcattgccaatgtaaaacgtctgggcagttctaccaaggctatagatatgagtgaaattttgtctcaggctgttacgtctttgcttcctttggtaactgacggtgtgcctttgacttacgaaaagaacgaaggtaaattaaaggtttatttgaatacggatttgttattgcctttgatgaaaaatatagttgctcctttattctcggatgaggagtttgtaaatatgcttatcgaagcaatgaaagctgatcctgattttggaagtatggccggtatggcagaaggtatgttgaagggtttacctgaaataattaatgaaacaactcgtttggaagttggtttgaacttgactgccgctaaataacttttttttcgatatggaattttccctcctttgtctcctgattttcaggttatagaggagggatttttgtttgttttttcctacatttgcatgataaataatcaaattgtagaaatgatatgacagaaacggaaagacgacagattattgctttggttaaatctgaagtaattcctgccattggttgtacagaacctatagctgtggcattgtgtgtagcaaaggctgcggaagtgctgaataagcgtcccgaaaagataactgtattgctgagtgccaatattctgaaaaatgcaatgggagtgggtattccaggtacggggatgattggattaccgattgctgtggcgcttggcgccttaataggcaagtcggtatatcaattggaggttttgaaagacagtacccctgatgcagtggaggcaggaaagcgtttcatagaagaaaagcgtatccatatatccttaaaagacgatatagaagagaaactttatatagaagtctgctgtgaagccgatacggacaaggcaaccgccattattgctggtggacatacttgttttacttatataacgcacaacggggatatcctgctggacaaacaaaccgcttcttgcatcgaagaggaggaggatgtattggacttgactttacgcaaagtgtatgacttcgccatgacaaccccattagacgacattcgttttattcttgatacggcacgactgaacaagactgccgccgaacgttccttcgaaggtgaatatggtcatggactgggtaaaatcctacgtggcacttacgaacaccggattatgggcgacagtgtcttctctcatatcctttcttacacttcgggagcatgtgatgcccgtatggccggtgccatgattccggtgatgagcaattccggcagtggcaatcaagggatatccgctacccttcccgtactggtctatgccgaagaaaatggaaaatcggaagaagaattgattcgtgccttgatgttgagccatttaacagtaatctatatcaagcagagtttgggacgcttatctgccttatgcggttgtgtggttgctgctacgggttccagttgcggtataacttggctaatgggaggaacttatgaacaggtggcatatgctgtgcagaacatgattgccaatcttaccggaatgatttgtgatggtgccaaacccagttgtgcattgaaagtaactaccggagtttcaaccgcagtgctttcagccatcatggccatggaaaaccgttgtgtgacttccgtagaaggtattattgatgaggatgtggatcagagtatccgtaatctgacaaaaatcggttctaaaggaatgaatgaaacggataaattggtattggagataatgacaagtaaataatatagaatttgaaaattaaagaattaaaaattaaagaattaccatgcggcatgcttaatactgtgtagtctgattctttaatttttaattctttaatttttaattctttagtggcagcatccgcctccacattcatggtcgccgcatccgtcgccacagtcaccacaaccgcagctgccgcaaccgccacccatcatacgggcaacttcagcaagctcttcgttcgtagccggacggctttccaccacttctccggtaaagttcaaatcacaacctgcgagtggatgattcatgtccattacaactacgtcttcctttacttctactacacttccattgatgcgttgaccttcagaagtcatcaaggggatgacggcgccttccactacacggtcgctgtcgaattctccttctatcatgaagatttctttggggaggtcaataacatggtcgtcgtcatattcaccataagcttctgatgccggaatggtaaagtcgaatttatcgcctatctgcaagtcttttatctgggcttcaaagggttcgagtgtcattcccagacctgagataaactgaaaaggatgctctacgggtgcttcttcttcgaaatctttttctccgttttcgattgagtacagcttatatgctacggtgatgtacttgttttctactgtttccattaattttctatctttatttaattagtaaatacttttttttgagtatttgaagagacaaagatacgaattatttgtttcgggatgtagagagcctttggtaattttcagattattaaatggtttcaatgattggcaatacatttacattggctgtctgaatggttctatttagaactgttaagtgataaaataggattttagggcgatattttcttacgattattcatatttatcttatttttttcttcaatttgtttggagattataaaaaagcccttacctttgcagcacgtttgaaacaaaaaagaagaattaagttatgaatttacatacatctattaacctggcagtcctgcatattattcgcgtcgtggtggtggcatcaagagcgtgagaaaggttatgtatgtattcgtacgttagaagataatttattaagcctttctcactatagtgggagaggctttttcattaaaaggagatttgaaaatgaagcatcagttacgcagctcgttcagcacacaaggtcgccgcatggcgggagcccgtgcattgtggacggcgaatggtatgaagaaggaacagatgggtaagcccattatcgctatagtcaattcatttacacaattcgtccccgggcatgtacatctgcacgaaataggccagtttgtaaaggaagagattgaaaaactggggtgttttgctgcggagttcaatacgattgccattgacgacggtatcgctatgggacacgacggtatgctttattccctgccttcaagagatatcattgccgatagtgtggagtatatggtaaatgcccataaggcggatgctatggtttgcatcagtaactgtgacaagattactccggggatgctgatggcggctatgagactgaatataccgactgtgtttgtttcaggcggtccgatggaagccggggaatggaacggacagcatttggatttgattgatgccatgattaaatctgctgatgaaagtgtgggcgataaagaggtggcacagattgagcaacatgcctgccccacttgcggatgctgctcaggcatgtttaccgctaattccatgaattgcctgaatgaagcgattggattggcactgcccggtaacggcacgattgtagccactcacgaaaatcgcaagaaactatttgaggatgcagccaagttgattgtagagaatgcctttagatattatgaagaaggggatgagagcgtactcccgcgaagtattgctacccgcgaggcatttttgaatgccatgacgctggatattgcgatgggcggttccactaatacggtacttcatttgttggctgtggctcacgaagccggagcggattttaagatggacgacattgacatgctctcccgcaagaccccctgcttatgcaaggtggctcccaatacccaaaagtatcatgtacaagacgttaaccgtgccggtggcatcattgccatcatggatgagcttgccaagggcggattggtcgatacgaatgtccgccgtgtggatggaatgacgttggcagaggcaatcgaccggtatagtattaccagctctaatgtatgtaaagaggcaatcaagaaatactccagtgcggcagccggaaagttcaatctggtacttggttcacaaaatgcgtcttataaggaactcgacacggaccgtgcgaccggttgtatccgtgatttggaacatgcatacagcaaggatggcggtctggcagttttgaagggaaatatagctcaggacggttgcgttgtcaagactgccggtgtagacgagagtatctggaaatttacggggccggcgaaagtcttcgactcacaagatgcggcttgtgacggtattctggctggaaaggtggtcagtggagacgtcgtcgtcatcactcacgaagggccgaaaggtggaccgggtatgcaagagatgctttatcctacttcttatatcaaatcccgccatctgggtaaggagtgtgcattgattaccgacgggcgtttcagtggtggtacttccggactaagtatcggacatgtttctcccgaagcggctgccggtggtaatatcggcaagattaaggatggggacattatcgaaattgatataccgaaccgttctatcaatgtgaagttgacggatgaagagcttgcagcacgccctatgactccggtaacccgcaaccgtgaagtctccaaagcattgaaagcatatgccagtatggtgagttccgctgacaaaggggctgtgaggctgattgattaaaagcccccctttccgaaagcgaggggaggaaagaatgaaacaaatttttcaagctactattgagcttttaaatataatgaatagataaagtatggctgataataataaaaagagtaacttttcctccctctcccaaggagagggtcggggtgaggctctaataacaggcgcagaagcattgatgcgctctctggagcatcagggagtaaagaccattttcggttatccgggagggagcatcatgccggtattcgatgccttatacgaccaccggaaggaattgaaccacatcttggttcgccatgaacaaggagcaacccatgcggcacaaggctttgcacgtgtatcaggcgaggttggcgtttgtctggttaccagtggaccgggtgctaccaatactatcacgggcattgcagatgccatgattgacagtacgcctatcgttgtcattgccggccaggtagggacgaacttcttgggtacggatgcatttcaggaagtggacttggtaggcattactcagcctatcacgaaatggagttaccagattcgtcgtgcagaagatgtggcctgggcagtggcacgtgctttctatgtggcaaagagcggacgtccgggaccggtcgtgctggattttgctaaaaacgcccaagtggagaaaacagaatatgcgcctactaaggtggactatgtccgtagctatcttcccgttcccgaaatggagccggaggccatacggaaggctgctgaattaataaatggtgcggaacggcctttggtgctggtaggacaaggcgtggagctgggagaagcccagcaagagcttcgtgctttcattgagaaagccggaatgcctgccggatgcactttattgggactttccgcattacctacgaaccatccgttgaacaaaggaatgcttggtatgcacggtaacctggggcccaatatcaataccaataaatgtgatgtccttatcgccgtaggcatgcgctttgatgaccgtgtgacgggtaaattggaaacatatgccaagcaggcgaagattatccactttgatattgaccctgccgaaatagataagaatgtaaagaccgatgttgctgtcctgggagattgcaaagagacactggctgccgttacccaattgctggaacccgccaaccatcaggaatggattgacagtttccggcaatacgaggaagtggaagaggaaaaggtaatccgtccggaattacatccggcaggaaaagcgctaagcatgggtgaggtggtgcgtgctgtgagtgaggctacccataacgaggcgatattggtgactgatgtcggccagaatcagatgatgtccgcccgttatttcaaatacagcaaggaacgtagcattgttacttccggtggcctgggtactatgggcttcggccttccggcagctatcggtgccacttttggacgtccggaccgcacggtatgcgtattcatgggagacggcggcttgcagatgaacctgcaggaactgggtaccatcatggagcaaaaagctccggtgaagatgattctgttgaacaataacttcctgggcaatgttcgtcaatggcaggcgatgttcttcaatcgtcgttattcgtttactccgatgatgaatccggattatatgaagattgcttcggcatatgatattcctgcacgcagggtaatgacccgcgaggagctggcaaaagcgattgacgagatgatagcgactgacggaccgttcctgctcgaagcttgtgtggaggaagaaggaaatgtaatgccgatgacacctccgggcggttcggtcaatcagatgttgttggaatgctgaagtcatgcgaaattaaagaatttactctatctatggataaaaaactatatacaatcattgttcattcggaaaactttgccggtttgctgaatcaggtgacggctgtgtttacccgccggcagataaacatcgagagtttgaatgtatcggcctcctccatcaagggggtacataaatataccattaccgcttggacggacaaggataccattgaaaaggtgaccaagcagattaccaagaaaatagatgtgctgcaagcccattatttcacggatgatgaaatctatcagcacgagattgccctctataaaataacgactcctacgctggaagaaaaaccggaggtgtctaaagtaatccgtaagtacaatgcccgtattgtggaggtgaatgctgtatttgccattgttgagaagaatggcatgagtgaggaaatcaccaatctttatgaggagttgcgccagttggattgcgtacttcagttcgtccgttcgggtcgcgtagccattacgaccagctgctttgagcgtgtcaatgaatatctggcggaccgtgaagcaaaatatcgtcaaagtaaacactaggaatcatgatgagcgagaacaataagataggtacctacaagtttgttgccgaaccgtttcatgtcgactttaccggacggctgacaatgggagtattgggcaaccatttgttgaattgtgcgggtttccatgccagcgaccgcggttttggcatcgcgactctaaacgaggacaattatacttgggtattgtcccgtctggctgtcgaactggatgaaatgccttatcagtacgaagatttctccattcagacttgggtggagaatgtctatcgcctttttacagaccgtaatttcgctatcatcgataaggagggcaagaagattgggtatgcacgttccgtttgggcgatgattagcatgaatacccgtaagccggcagatttgctggctcttcatagtggcagcattgtagattatgtttgcgatgagccttgcccgatagaaaaaccttcgcggataaaggtggcctcaaaggaaccggttgctgctttggtagccaaatacagtgatattgacattaacgggcatgtgaacagcatccgttacatcgagcatatccttgatttgttcccgatagagatgtataaggagaagcgcatccgtcgttttgaaatggcatatgtagccgaaagctattatggggatgagttgactttgttcatggatgatgccggtgagggcgtttacgatgtggaggtgaaaaagaatggcagcgaagtggtctgtcgctctaaagtgatatttacagagaaataaataaatttatcaacgttggcgtaagccacaaataaaaattaaaacaaaaaatggcacaattgaattttggcggtgttattgagaatgtaatgacccgcgaagaatttcctttggaaaaagcacgtgagattttgaaagatgaaacaattgcagtaatcggttatggcgtacaaggcccgggccaggcttgcaacttgcgtgataacggtttcaatgtgattgtaggacaacgtccgggtaagacatacgaaaaggcggtggctgacggatgggtaccgggtgagactttgttcggcatcgaagaggcttgccagaaaggtactatcgtcatgtgtctgttgtctgacgcagctgtaatgtctgtatggccgactatcaaaccttatttgactcccggaaaggctctttacttctctcatggttttgctattacctggaacgaccgtaccggcgtggttcctcctaaagatattgatgttattatggttgctcccaaaggttccggtacttcacttcgtaccatgttcctcgaagggcgtggcttgaactcatcatatgccgtctatcaggatgctacgggtaaggcttttgacaagacgattgcactgggtatcggtattggttcgggatatttgttcgagacaactttcatccgcgaagccacttccgacttgaccggtgaacgcggttcattgatgggtgctatccagggattgctgttggctcagtatgaagtattgcgcgaaaacggccatactccttctgaagcattcaatgaaacagtggaagagttgactcaatctttgatgccattgtttgccaagaacggtatggactggatgtatgccaactgttctactacggcacagcgtggtgcgctggattggatgaccccgtttcatgatgccatcaagccggttgtacagaaattgtatgcaagtgtgaagtcgggcaacgaagctcagatttctatcgacagtaactccaaacccgattatcgtgagaagctgaatgcagaattgaaagccttgcgtgaaagcgaaatgtggcagacagctgttacagttcgtaaacttcgtccggaaaacaattaatcagctttatataaataggtgaaataccctcttcggtgttaccggagggggtatttctttattattgattccctatattttgaataaactccagtagcttccggtaaaaaccgtgatgtttcagcgtatctgcctctcccattatcaccagcttcatacgtgcccgggtgatggctacattcattctccttaaatcattcaggaatcctatctgcccttcttcgttggcacggacaaggctgatgaagataacatcgcgctcttgcccttggaagccatccaccgtatttacagtgaacaagctgcgataaggcttgagtgaagcgtctgcctttatcttgttgcggagatattgcacttgtgccttgtaaggggagatgatgccgatgtctattttttcttccagaatgcggttgccaccgatacggttgatgtagattttcagttctgataggagcaggtccgcttccgccttattaatgcgtccgaaagtctctcccacaaattcttctttgaaatccatttcggaggtgtcaatccagtggatgggggtatcccagtccaggatgccccggtaacgcacttcgggagcggcttccaactcgccattataaaaccattgggaaggaaatttcatgatttcctcgtgcatgcggtattgtactttcagcaaagagacaacggcaggtttgttggacaccactttctccatcaatgttcgttccagacctccacgggcagcttcgtagcattttatggtgggcggaagttggcagtggtcacccgccaataccacgcggtctgcttttcggatagctatccagcaggcagcttctaaggcctgggctgcttcatcaatgaaaagggtgccgaaacggcgtccgttcagcagccggtgattgctgcttactagcgtggaggctatgacatgtgccccatcaaaaagctctgcattgatttgtatttccaatgcggtggcgcggtcgcgcaggcggctcatacggctgcgtactccttcgcgttcgtcatagctgccacggcgggcacggctgcccagttcacggagatttttccggatgctccacagctccggataaagcggatggttctcgaaacgacgctcgtaggtaaaggaaagcatcttgtcgttgacacgggtcggattgccgatacgcaggacattgacgccacggtccacaagtttttccgaaatccagtcgacggcagtattgctttgggcacataccagtacctgcggttcccgatgcagggtttcgtagatggcttccactaaggtggtcgtttttccggttcctggaggaccatgtacaatggccacgtcgcgagcacacagcactttgtttacagctgtttcctgcgtggagttcagccagggaaaccgtacgggatagagctctcggaaaccggctttcgaggttcccagcaatatgtcccgcaattcggccaggcggttgcctttggagcgtaacgtatcttccaaggcttcgaacatggtccgataggatgtttcgtcgaaataaagttgcacgccgaggttgtccgtttcctgcacttccatcacggcaccggctccgggcattatcgctaccatccgtgtctcgtcggcatagcttacggtagcggtgaagttcatataggttatttttccatcggcagactggcggaaaaaacatacgggacggccgaactcaaaattatgttctatatcggtattttctgtgtgtgtaatttctattactaattgattcagtgaattatagtaacttcgtcccggagtggcaggataccagcaaagtccccgtttcactttccgggcaacccccatgttttcggtttggcgtttgaattcctctttttcgtattcgtattccatgcgcagcaaaagttgctgctgttggaggtgaataataggactatttgaatcttgttccttcatggttgcaaaggtaatcattcttcgcttccgacggaaaaaatgctttattttgttaaactattcagcctttttatttgtttatgatattaatttgtaatctttacaataatgaaaaactaaaaaatagtggttatggtatatgatttaacgatgctcaaaacgttttatgccgcttattcggagaagatagaacgcgtacggaacgtactgcggcgtccgatgactttagcagagaaaattttgtatgctcatttgtatgatggggataaagtgaagaactacagacggggagaagactatgtgaatttccgtcccgaccgtgtggccatgcaggatgcaacggctcaaatggccttattgcaatttatgaatgcaggccgtgagcaggttgccgtgccttccactgtgcactgtgaccatttgattcaagcatataaaggtgcaaaagaagatatcgtgactgctacgaagaccaacgaggaggtctataattttctccgtgatgtttcctcccgctatggcataggtttttggcagccgggagcaggcattattcaccaggtggtattggagaactacgcatttccgggtgggatgatggtaggcacggactctcatacgcccaatgccggaggtttgggcatggtggccattggtgtgggtggtgccgatgcggtggatgtgatgaccggcatggaatgggaactgaaaatgccgcgtctgataggcgtacacttgaagggtaaattgagtggctgggtagctcccaaagacgttattctgaagttggcgggtattcttactgtaaaagggggaaccaatgccatcattgaatattttggaccgggaaccgcttcgttgtctgccactggaaaggctaccatctgcaatatgggggcagaggtgggggcgactacctcccttttcccttacgatgagcgcatgggtacctacttgaaagctaccggacgtgaagaagtggcaaaaatggctgtttccgtagctgccgaccttcgcgccgacgacgaagtgctggcaaatccggaaaaatattacgaccgcatcattgaaatagacctctcgctgttggaaccgtatatcaatgggccctttacgccggatgcagcaacaccgatatcgaaatttgccgaggtagtgataaccaataactatccccgccggatggaagtcggtctgatagggtcgtgcaccaattcgtcctatcaggatttgagccgtgcggcctcccttgcccggcaggtaaaggaaaagaatttgaaggttgcttccccgctgattgtcaatcccggctcggagcagatacgtgctactgctgaacgcgacggcatgattgccgctttcgaagatattggcgcaacgataatggcgaatgcctgcggaccttgtattggccagtggaagcgccatactgatgaccccgaacgcaaaaattccatcgtcacctcttttaaccgtaattttgccaaacgtgccgacggcaatcccaatacttttgcttatgtggcttctcccgaaattaccatggcgctgaccattgcaggcgacctctgtttcgaccccttgcgggatacgctggtcaatgccaaaggagaggttgtgaaactgtccgaaccagtcggtgaggaattgccggcacacggattcatcggaggacaaaaaggatatattgctccaaacaagggacagacggaaattacggtcaatcctcattcacagcgcttgcaactgctgactcccttccctgcctgggatggcatggacttgctgaatatgcctttattgattaaagtgcaagggaaatgtaccaccgaccacatctctatggcggggccatggctccgtttccggggacatttggagaatatttcggacaatatgctgatgggggctgtcaatgctttcaatggagagacgaacaaggtttggaaccgctccaccaatacctatggaacagtgtcaggcactgcgaagctgtataaatcagaaggcatcccttccattgtcgttgccgaagagaattatggtgaaggttccagccgtgagcatgctgccatggaaccacgcttcctgaatgtacgcgccattttggcgaaaagctttgcccgtatccatgagacgaatttaaagaaacaaggcatgttggcgctgacctttacggataaggccgattatgacaagattcgggaacgcgacctgatttctgtcatggggttgaaagattttgcttcgggacgtacgttgaaggtggttcttcatcacgaggacgggagtaaagaaagttttgaagtacaacatacgtataacgaacagcagatagcctggttccgggccggttctgcacttaatgcaagatagaatatggaaaaaattactgtaccttttattaccggcgatggagtgggagcagaagtgaccccatccatgcaggctgtcgtgaatgccgctgtcaagaaatcctatggtgaccggcgtggcattgaatggaaagaagtgctggcaggagaacgtgctttccacgaaaccggctcctggttgccggacgaaaccatggaagccttccgcacctataaggtgggcatcaaaggtcctttgacaactcccgtcggtggaggtatccgttccttgaacgtagccttgcgtcagacgctcgatttgtatgtctgccaacgtccggtacgttggtataagggcattgtttctccactcaaagagccacagaaggtggatatgtgcgtattccgtgagaataccgaggatatttatgcaggcatcgaatgggaagccggaactccggaggctgaaaagttctatcgttttctccgtgatgacatgggggtgacaaaagtccgttttcccgaaacctcctcgtttggcgtgaagcccgtttcaagagaaggaacagagcgcttggtgcgtgccgcctgccaatacgcccttgagcatcatctgccttccgtgacgttggtacacaaaggaaacatcatgaaatttacggaaggcggcttcaagaagtgggggtacgaactggcagaacgtgagtttggtaaagaacttgcagaagggcgtctggtcatcaaggactgcattgccgatgcattcttgcagaacacgttgcttatccccgaagaatattccgtgattgccacgttgaatctgaacggcgattatgtgtccgaccaactggctgccatggtaggcggcatcggcattgcaccgggtgcgaatatcaactataaaacagggcatgccatttttgaggctactcacgggacggctccgaacattgccgggaaagacattgtgaatccctgttccatcatcctttccgctgtgatgatgcttgaatatctgggttggaaggaagcagcctctcttatagagaacgccttggaggaaagtttcacagaagcccgtgctactgccgacttggcacgttttatgccgggtggcgtctcgctgtccacttcgactttcacccgggagattgtaaggagaatagaaaatgggaataacgaataaaacgaaacgattatgaagaaggagtatctgatttacaagctttccgaagatttgaaggaagctacccggattgagaatgaactgttcaggaagtttgatgtgaagcgcggtttgcgtaatgaggacggcacgggagtcttggtggggttgaccaaaataggcaatgtggtcggctatgaacgcatccccggtggagggctgaagcctattcccggcaaattgttctaccgcggttatgatgtggatgacttggcacacgccatcatcaaagagaagcgtttcggttttgaggaaattgcctacttgttgctttccggtcgcctgcccgacaaggaagaactctcttctttccgtgaactcatcaacgacaacatgccgctggagcagaagaccaagatgaatatcattgaactcgaaggaaacaacattatgaacatcctggcgcgcagcgtgctcgagatgtatcgttttgaccctgatgcagatgacacttcccgcgataatctgatgcggcagagcattgagcttatttcgaaattcccgaccatcattgcgtatgcctataacatgcttcgccatgccacccatggccgttcactgcatatccgccatccgcaggaaaacctttccattgccgagaatttcctctatatgctgaagaaggactacacggagctggatgcccgcacgctcgacctgctgctggttcttcaggccgagcacggtggtggtaacaactccacttttaccgtacgtgtcacttcttctaccgggacggatacttactcttcgatagcggcaggtatcggttccttgaaagggccgcttcatggaggtgccaatatccaggttgccgatatgttccaccatctgcaggaaaacattcaggactggacgaatgtggatgagattgatacttacttcacccgcatgctcaacaaggaagcctataacaagaccggcttgatatatggtatcggacatgccgtctataccatttccgacccgcgcgccattctgctgaaagagcttgcccgcgaccttgcccgcgaaaaagggaaagaacgcgagttcgctttccttgaactgctcgaggagcgcgccattgatgtgtttggccgtgtgaagaataatggcaagacggtttcgagtaatgtggatttctattcgggctttgtttacgagatgattgggctgccgcaggaaatcttcacgcctttgtttgccatggcacgtattgtcggttggtgtgcacatcgcaatgaagaattgaatttcgaaggcaagcgtattatccgtcctgcctataagaatgttttggatgaggtggcttatgtgcccattaagaaacggtaaggattagacttgtatcttttaaatcgttccatcacggggaaaaaatcgttccaccatggtagaacgattttttctccatggtggaatgaaatttactccatgatggaacgattagattttcgtatctctactgcttaatcttctcagtaaaaaacactggtttttgcatgaaaaaacaattatccggggaaaacgatttgtttgttgtgagttttctttatctttgcttcgcataaataaagaactatgaatcaggaaacttttcagatatttctgtgggtaatgagtgctgtggcattggttgtctttattgcactctattttgtcaaagcgggttatggcatgttccgtactgcctcgtggggaatctccatcaataataaactggcgtgggtgcttatggaagcgccggtattcatcctcatgtttgggttgtgggggaagagtggagcgggatttgccgtgccggtatatttcttcttcctgctgtttcagttgcactatcttcagcgggcctttatttttccgttcctgctgaaaggtaaaagccggatgccggtagctattatggcgatgggtatcgtcttcaaccttttgaacgggatgatgcaggcgggcggtttgttctatttcgctcccgaaggcttgtatgccgatggctgggcctatttgctgaaacctcatgccttgttgggaatcattctgttttttgcaggtatgttcgtcaatttgcattccgactatgtgatacgtcatctgcgcaggccaggtgatacgaagcattatcttcccggaaaagggctttaccgatacgtcacttctgccaattacttcggtgaactggtggaatggacggggtttgccatactcacagcttctcccgccgcctgggtgttcgtctggtggacgtttgccaaccttgttccccgtgccgatgccattcaccgccgttatcgggaggagtttggtgatgaggcggtaggaaagcgcaaacgcatcattccatttctttattaatggaaaatggagagttgaaaatggaaaatgaataattcataacttataacttataactcataactcataacgatggaatccaagttattcacccccgtcactttcggaccgttgactttgcgtaaccgtaccatccgttcggctgctttcgagagcatgtgtcccggaaacgctccgtcggacatgttgctcgactatcatcggtcggtagcggcgggaggtataggtatgactactgttgcttatgcggcagttactcagagcggcttgtcttttgaccgccagttgtggatgcgtcctgagattatccccggactccgtaggctgactgatgccatacatgcggagggggctgcggcaggcatccagttgggacactgtggcaatatgtcccataagagtatttgcggttgtatgcccgtcggcgcatcttctggtttcaatctttactctcctacctttgtgcgcggactgcgtgccgatgagctgccggagatggcgcgtgcttatgggcgttcggtgaatctggcacgggaggccggatttgattctgtagagattcatgcagggcatggctatctcatcagccagttcttgtccccgtccaccaaccatcggaaggacgagttcggaggctcgttgcagaaccgtatgcgttttatggatatggtgatggaagaagtgatgaaggctgccggcagtgatatggctgtgctggtgaagatgaacatgcgcgacggtttccgtggagggatggagctggacgagacgatgcaggtggcccggaggctggagcagtcgggagcacatgcgctggtcttgagcggtgggtttgtcagtaaggcgccgatgtatgtcatgcggggcgaaatgcctatccgcagcatgacgcattacatgacctgctggtggttgaaatacggtgtacgcatggtaggcaaatggatgataccgagcgtaccgtttaaggaagcttatttcctggaagatgccttgaaattccgtgccgccttgaagataccgttggtttatgtgggtggcctggtttccagggacaagatagatgaggtgctggatgacggcttcgaggctgtgcaaatggcacgcgctctgctcaatgagccggggtttgtcaaccgcatgcgtgccgaagagaatgcacgttgcaactgccggcatagtaattattgcattgcccggatgtattccatcgagatggcatgccatcagcatttgaaggaggagcttccaccttgtctgaaaagggagatagagaaaatcgaagcgaaaggctgatttttagtttttaattttcaatttttaattattaaagtgaatttagctgttataaccggggcagacggtggcatgggcatggaaattacccgcgcagtggcaactgccggctatcaggtcatcatggcatgccgtgacccccaagctgccgaacccaagcggcaactgctgatgcgtgaaaccggtaatccgcgtattgagactgctcccattgatttggcatctctggcttcagtggccgcatttgcagagcatctgttgaagcggggagagccgttggcgttgctgatgaacaatgccggaaccatggaaacggaacgccgcattaccgaagacggactggaacggacggtgagtgtcaattatgtagggccttacctgctgacccgcaagctgctgccattgatgggagaggggagccgtattgtgaatatggtatcttgtacgtatgccatcggtcatcttgactttccggattttttcctccggggaaggaagggtggcttttggcgcattcctatatatagcaacacgaagctggcattgactctgttcaccatcgacttggccagtcgcgtcaaacacaaaggtattgttgtgaatgcggccgacccggggattgtgtctaccaatatcatcaccatgcatatgtggtttgacccgctgacagatatacttttcaggccttttatccgtactccccgtaagggagctgcaacggctgtcggcttattgctggatgaggatgccggtaaacgtacggggacattgaatgccagttgccgtcccaagtctctttcggagaagtacacccggcatgtacagatggaagaactgtgggagaggacggaaagtatagtgaaaaaatggttgtaaaaaacagagaaggcgcatatgtcgccttctctgtttatggggtatctgaacagtctgtcattagatagacagttctctcaatacatttacaaggtctttcttgatgggtttgtcattcttgatggccttcgtgaagggaacgtataccacttcatcgtggtcaatgcctatcatgacattgcgctgtccttccatgatggcgtcgatggcggctgcgcccagacggctggcaaggatacggtcgtgtgccgtagggctaccaccgcgttgcaagtgaccgaggatggttacgcgtacgtcatattgggggtattcgttctttacacgctctgcatagtgcattgcaccgccggtcagttcactctcggctaccagtacgatactgctgttcttggatttccggaaaccgttcttgatgaattcttccagttggtccacttccgtactgaattccgggataatggctgcttctgctccggaggcgatggcgccgttcagagcgaggaaaccggcatcgcgtcccatgacttctacgaaaaacaagcgctcatgggaagtggctgtatcacggattttgtccacagcatccaggatcgtgttcagcgcggtgtcgtagccgatagtggtatctgttccataaaggtcattgtcgatagttcccggcagcccgatacaaggcacgtcaaactcttgtgcaaagatacgagcaccggtcagcgaaccgtcgcctccgataatcactaaggcgtcaatgccttctttcttcatgttgtcgtaagcaatctggcggccctcgggagtcgtgaactctttgcagcgggctgtcttcaggattgtaccacccagctggatgatgttgctgacattttggcttttgaattctttgatttcgccggttaccagacctttgtaacctctatatatacctttaaccgaaagtccgttgtaaatagccgaacgtgtcacggcacgtatggctgcgttcattcccggagcatcacctcctgatgtcaagataccaatgcacttaactgttcccataacaatctttttgtttagtattaataatcatgatgaaaaatagatttggactattttttcatgccgcaaagatagtaaaaagctgaggcggtgactaataaattacgttaatttgctgttccaaaaggatgacaaactgttatttaagttttgactttatggcttctgaaatttcttccatcagccatttgggggtggaagtggctccgcagacaccgatggaattggcaccggctaacagagaactatctatttcttcggcactgtctatcaaatgtgaattggcattgacttttttacactcactgaacagcatcttgccgttagagctttttttgccgctgacaaagaatattaaatcatgggaagctgcaaatttccggatattaggtatccggtttgccacttgtcggcagatagtgtcataggactcgaaagtgactttcggtgagatatgtccctctatgtatttcacaatgttttgaaatccgtccagagactttgtggtctgggagtagagacggatgtctttgctgaaatccagtttccttgcctcttcctgcttttcgatgacgatggcctttccggtggtttgtcctaccagacccagtacttcggcgtgtccatttttgccatagatgacaatttgcttgtcgcggttgtcttcctggacgtactcttgcttaatcttcttttgcaggcggagtacgaccgggcaggttgcgtcaatgatttctatattgttgcggcgggcaatgtcataagtttcagggggctctccatgagcacgcagcagcactttggcgttgtggaggtggttgaattcctcatggttgatggtaatcagccccattgccttcaggcgttccacttcacggctgttgtgcacgatgtctcccagacaatagagggttcctcctttcgccagttcctcttctgccttgtttattgcggtgacaactccgaaacagaagccggagccttcgtctatttctacttttgccatatccggttcagttcttctcctttataacccgttcgaattgttccgccagccattccttttgttgggaaatgctcaggtggctgttgtccaacaataaagcgtcagaagctttgcgcagcggacttacatcccggttttggtcaatatagtcccgttgtttcacattttccagaatttcgtcaaagctggcttcttcccttttggcctttagttcgtcatagcggcgttgtgcccgtatctcgggggtggcggttacaaaaattttcagctcggcatccggaaaaacggtagtgccgatgtcgcgcccatccataacgatacccttggccttgcccatctcttgttgctgtgctaccatagcttcgcgtacgaaatccaatgttgcaatggggctgacacgtgaagatacttccatggtacggattttgttttctacatttactccgttcaggtaggtatctgggcgtccggtttcggggttcaggcggaaagaaatatgtatatcctttattagacttttcagtttttcggcatctatgcggtcaccctggaaaataccattctctatactatataatgttactgcccgatacatggcaccactatctatatatatgtaaccgatttcgcgggcgaggtctttggccatagtgcttttcccgcaagaggaaaaaccgtcgattgctattgttatctttttcatgacttttatgctatagttatataggtataacacctgcaaaacagaaaatttcaatatttcatttaaaattcttgccaaagatacggtatttttaaaatatctcgttacatttgtggcacaaaagcacatggaggtttttgaaggattaaaaaaatgaaaatggagcgcctattgtgtaaaaaaaaacagcagagcgtgaacattcttgggaaaagtgctatatttgccccaaatgagaaacactaaaattatattataaattatggaaattaagaaatcacctaaggcagacctggagagtaagaagtcgacttggctgcttgtcggttatgtaatcgtgctcgctttcatgtttgttgcgttcgagtggacaaagcgtgacatcaagattgacacgagccaggctattaccgacgtattttttgaagaggaaatcatccctattacagaacagccggagcaggttactcctccgcctcccgaagccccttcaattgcagagacgttgactatcgttgaagacgatgctgacgtggaagaaacggccattgtatcttctgaagaattgaaccaggcagtggaaatcaaatatgttcccgtagcagtggaagaggaagaaccggaagaacagactattttcgaggtggtagaacagatgcctgagttcccgaatggtggtatggctggtttgatgcagtatttgagcaagaatattaaatatcctactattgcacaggaaaacggaactcaaggccgtgtaactgtacagttcgtggttaataaggacggtagtatcgtagatgctaaagttctgagaggcgttgacccgtatttggacaaagaagctgtccgcgtgattatgggcatgccgaagtggaaacccggtatgcagcgtggtaaacccgttcgtgttaagtataccgtgcctgtaatgtttagattgcagtaataaaatatctataagtgggagaggctgccggaatgcagcctcttttcattatccgctattccctaaattctgaaaatgccatgtttacagcttccgagcttttagaaagaataaattctcatattgcagaattgcagtttacccgtactcctcaaggtttatatgctcccgttacctatgtgttgtccatgggcggaaaaagaatccgtccggtattgatgttgatggcctacaatctgtatcaggaggatattacccgtatttttaaccctgcaacggggattgaagtgtatcataattatactcttttgcatgacgacttgatggaccgtgcagaccgtcgccgtggtaaggagacggtacataaagtttgggatgacaatgctgccatcctttcgggggatgcaatgcttgtattagcttatcagtttatggctcaatgcccggttgaacacctgaaagaggtgatggatatatttagcctgactgcactggaaatctgtgaaggacagcagctggatatggagtttgaacatcggaaggatgtgaaggcagaggagtatctggaaatgattcgtctgaaaacttcggtattgttggctgcaagcttgaagattggcgctcttttgggaggggcttcttctgaagatgcggagcagttgtatgattttggcatgaacttgggtgtcgcttttcagttgaaagatgatttcctggatgtttatggcgatgctgccgtctttggaaagaatattggaggtgatattctgtgcaataaaaagacctacatgctgataaaggcttttgaacatgcggatgaggagcagttgacccgcttgaatgcttgggtggatgctgttgcattcaacccggaggagaaagttgctgcggtgacggaactgtataaccggattggcgtcaaggaactgtgtgagaaaaagatggaagagtattgtgaacgcgcaatggaaagtctgttggcggtgaaggtggcagatgaaaagaaagaggaattgaagaacctgatggctaacctgatgcatcgggaagtataactttaaatccgggagaaaatgccttatagaagattgcctaatacagatcaagcgagaatacgggcgctgaaagcagtggtcgtcaagggtgatatatgtaatgtgtatgatttggccgtatctttgaaggcgttgactgatgcgcggaattttcttacaaagtttgaagctgcgcaagcttattatgccgactgttttgagcggcaggctcgggcgggacgtaagcatcaggctaatgtaaagactgcccgtctgtatatttctcattttatccaggtgttgaatttagctgtcatccgttctgaagtgcgtattgctcataaggaatattacggtttggacacaagcaacaataatgtgcctgatttatcgacagagcctgccttggcagagtgggggcgtaaaatcgtggatggggaaaacaaacgtatatcccagggaggaattcccatttataaccctacgattgcaaaagtgagggtgcattatgatattttcatggatagttatgagaagcaaaagaatcttcaatctttgacagcccgcagtttggacaccttggcttcgatgcgtgcagaggcggatggtttgattttggatatatggaaccaggttgaaaagaaattcgaggaggtcactcccaatgagaaacgtttggatttatgccgtgattatggaataatctattattaccgtaccggtgagaaacgcaaagagtaagttgaagaatgagattgattgattcacattcccatctttttttagaagagtttgcagaggatttgcctcaagtgatggctcgtgcccgtgaggcaggagtcacgcatatttttatgcccaatatcgatagtaccaccataggacctatgcttcgggtgtgccgtgaatataaagggtattgctatccgatgattggattgcaccctacctctgtggatgcggattatgaaaaggagttggaaatagtggcccgggagctggcttcaccgaatgaatttgttgcggttggcgagattggtatggacttgtattgggataagacttttcttagagagcagcaaagggtgttggacaagcagattgagtgggctttggaatacggtttgccggtagtgctgcattgtagggaagcgttcgaccatatatataatgtgttgaaaccctatcagcagactcctttgaaaggaattttccatagttttacgggaacctcggaagaggcctgcaggattatggaatttgcggatttcatgataggaataaatggtgtggtgactttcaagaaatcaactttacccgaagtcttgaagaatattcctttggaacgcatcgtgctggaaaccgattccccttatctgactccggttcccaatcgaggcaagaggaacgaaagcgcatatgttaaggatactttggtaaaggtggccggaatctatgggaactctcctgaaaaggtggcccaggttacttctgataacgctttaaaagtgttcggaatgctcaaataagttctttaagattttaaagtttattaattttgagattttatttaatataaaacggggagaatgaggcagaacaacaaaaaaaagaatacatttgtagctgaaaacgctggtggttcgcattttttttgtaatttgcacccgatttcagaaaaggcgtctattggagagatgctcgagtggttgaagaggcacgcctggaaagcgtgtatacccctaaagggtatccggggttcgaatccccgtctctccgcagtgtgataaaatggagataaaacaacaaattataataaataaattaattaattaatcttaaaaattagacacacaatgaaaaagttatttgcaattgttgctgtgatgggagtcttaacatttggctcaactcaacttgctcaggctcaagatgctcctgcagctgaacaaactgaacaagcagctgtagcacctgctgctgacgctgctgctcctgccgcaatggaagctgcagaaggtggtatccacaaagaactcaaaactaagtttattgaaggtactgcatctttcatgagtttggtagctatcgcattggttatcggtcttgcattttgtattgaacgtatcatttatttgagcttggctgaaatcaacacaaagaaattcttggctgctattgaagctgctttggaaaaaggtgacgttgaagctgctaaagacatcgcacgtaacactagaggtcctatcgcttctatctactatcaaggtctgatgagaattgaccaaggtatcgacgtagtagaaaagtcagtagtttcttacggtggtgtacaagctggttacctggaaaaaggttgctcttggattacactgttcatcgctatggctccgtctttgggattcttgggtactgtaatcggtatggtgcaggcatttgataagatccagcaggtaggtgatatctctccgacggttgtagcaggtggtatgaaggttgccttgattacaactatcttcggtttgatcgttgccttgattctgcaggtattctataactacatcctggctaagattgaagctttgaccagcgaaatggaagattcttctatctctctgttggatatggttatcaaatatgacttgaaatacaaaaaataattaagatggctaagttatcatataaagtatcatactatgcactgtatgtcatgttcgctatcatcttggtagtgttgggcatgttcttcttcggtggagatgctcagggcgatgcagtgttggcaagcgttgacgcagaaatgtggcaaccggctcatacagacgcattgatttatttgatgtacattctgttctttgtagctattattgctaccgtggttggtgttttgttccaatttggagctgcactgaaagacaatccgggagcagcgttgaaatctttgattggtttggttatattggttgcagttgttgttatttcttggactatgggtagtgaagaaccacttgttattccgggttatagcggaactgagaacgtacctttctggttgaagcttactgacatgttcctttattctatctatatcttgtttgctggtacagtcttggcaatcatttttagtagcattaagaaaaaattatcataatcaattgaggtaactcaatttaaagatataattacaatggctaaaaagaaaagagaagttcctgaaattaactcaagttctactgcggacatcgctttcttgttgctgattttcttcttgattacaacatctatggataccgaccgtggtttggcaagacgtttgccgcctccaccggaaaaggaccagaagttggacgatgcaaagaagaaggaacgcaacgtattgcaagtcttcttgaacatgcaggaccagttaatgtgcgggaatgattatattactgttgaccaattgcgtgcaaaagcaaaagaatttattgccaatccgtataacgaagatacaaaaccggaaaagatttctaagaatgttcctttcttcggtacagtacaagtgacggaaggccatgtgatttctttgcgttgtgaccgtggttcttcatacaaagcatatatgtctgtacagaatgagttggtagcagcttataacgagttgcgtgatgaattggctcaggaaaagtggcagaagaattatatggagttggatcaagaacaacaagatgcaattcgtgaaatttattctcagaagatttctgaggcagaacctaaaaagtacggagaaaagaagtaatgggaaaatttaataagactggtaaacgtggaatgccggcgttgaacacttcttctctgcctgaccttatcttcaccttgttgttcttcttcatgattgtaacaacgatgcgtgaggtaacattgaaggttgagtttaaggttccgcaagctacagaattggagaaacttgaaaagaagtctttggttacgtttatctatgtaggaaaacctactgccgaatttcgtaagaagttaggtaatgagagccgtatccagttgaacgacagctatgctgaagttgctgaaattcaagattacattattggtgaacgtgccagtatgaaagaagaagatcagccgcagatgacagtgtctttgaaagttgaccaagatacgaaaatgggtatcgtaacagatatcaaagaagcgcttcgtaaggcttatgctttgaagattaactattctgcgcaaccgcgtcagtaaaagttagtttaatgatataataaaggtcgtttcatttgttgaaacgacctttattgttttaagtatattgggtttttaagatttcacattatatacttcgcggtagatgtgttcctttacagagtcaaaatcctttccacattctatatctccataggccatgatgagcataggcaggtagttgtcgcctgttttatagggtggttgttggtagggcttttcccataaggagaatccttgccgttgatagaagttaatgcggcgtttagccatttcttcttcgggtatttccacttccaagacgatgggatgttttaagagttggcataaatggtttagtacgctctttccatatccgccgttacgctgtgcggggtcaatggcaaaatgctctatatagtaaaaatgtccgaaatcccagtaagtgatgagacctaccggggtgttgttatggaagatgatattgttatagaagtgcgttttggtatctgtatacttgcgcaattcctccagttcccggtactcctctgaagggaacgattgggtcattaatttctccatgtagctgtacaagtctgtgtcagctgttgtaatacgttgaagtctgatcataagttcttttagtttagtttgtttttattcagtataaaattcaatgacgcggcggatggcccgttggcagaccgggcagaaagtagggtattcattggtgcgcatgcggcaattgtctgccggacggtaaatgcctttggcagaatagccagctccttcatatacacctacgggatatgttccactttcagaagagggagtaggaacgggagttccttgagcaagcatatcttcccatttggaaatgaaatcgattcttgtgctgatgttctgttcccagggttccacatctagtggataggtatctgtcatcacgtcattgtcgtagaagtattcatcggccagtccgccaaagctatgcccgaactcatgtaccacaacggggcggaacattggatggtgggcggtagtaagggtataggaattatagattccaccgccgccgtattcttccgtattggcaaggatgatgatgtgttcatacggtattcccgccagcgcatcgtgtatggatttgacacgggaggtggtcagataccggtctgaatagaatgtgctgaaatgagagctgaatgctgtccgtttccattctccgaggcgtggtacgcttactccgctgtcttcggaggggctagccactgctacaatgttgaagtgctttttcatggaccggaagggttcgtgggcaaacagactttcgcaggcaatggctgcgtcttcgtagaataccggcatctcttcgggagtatatccttctgcaaggatggctacgtcgatgcatttggccgtattgccgctttgcagcagatatttatgtggtgtgatgtgggcagtacctttctgatgtatcaggatgtcgtcgggactgaccgtatgtttcatgcttgcccgtacatttctacgcgggtcgagaagtgttatttctatttctgcaggacggaggggatagggaaggagaaaggtgttttcgaatcctttggtcaccgctttggcttcatccgtttccagccactcctggaagagcgaagaaaaggatgttttgtagattacgctgccattggctgcatctcgcataatgatttgtccgtttccttgcaggggcaactcaggtaaatgatgcttccttcctgcccaagaggggagacaagacaatccgtccaggcatatctcttgtttggctgcatttccggtaaagatatagtcgacacgcagggttttatctgcaaaataatcggcaaaactttgggcatgcaaggatattgctgccatcaggcataataggaataaggaatactttttcataacggttcattattattgctactacaaagataatatctttaaagctcatctgcaattttccggtcatgcgagatggaattttgcatatgcactttgaaatgcctgatatgcggtattattcttttttttgcaagaaaagttataaaccgtatttttattggcgaaaaaatagctaactttgcatgttgccgtatagatatgcgggagatatagtaatttattaatcattagaatttgaaatgggacatcatcaattggatactttagacgaacagattttaaaacttatagccgataatgcacgcattccttttcttgaagtggccagagcttgtaatgtatcgggagcagccattcatcagcgcattcaaaagctgacaaacttaggtatattgaaaggttctgaatatgtgattgatccggagaagataggatatgaaacatgcgcctatatcggtatctatctaaaggatcctgcttcttttgatgctgtaacgagagcattggaagctattcccgagattgtggaatgccattttacaacgggcaagtatgatatgttcataaagctttatgcccgcaacaaccatcatttgctgagcatcatacatgataagttgcagccgctgggactggcgcgtacggaaaccttgatttctttccacgaagccatcaagcggcagatgcctataacggtagaagaagaggaagattaattttaccggtggatataatcgacgaatgcataagggcagggatgcttctcatctgcgggatgggactccctgcttttttcttgccatacagtcggagcgacttcgggaaagtaggcgtccacctgaggggcttctgcatccacttcggtcaggcagagggtatctgcaaaggggagtgcctggcgataaacgcttgcaccgccgatgatgtagacgtgttcgtcgggctggcaactgcttagtgcttcttccaatgagggaaaaacttctgtaccgggacagatcaaatctttttgagtggacagaacaacgttgcggcggttgggaagcgcgcctttggggagagattcaaaggtctttcggcccatgatgatggtatttcccgtggtgagggctttgaaacgcttcaaatcattgggaagccagaataacaaccggttctgataaccgatacctctctttctgtctactgcagcaataatactaatcatatgtgtgtaaaattcttttctctttctatctttttattgtaggatttatactgacacttttcctgcaatatgcggatgcgggttatagttgaccaactcaaaatcctcgaacttgaagtcgaagatgtttttcacatccggattgattctcatctgcggcaaatcccgcggttcacgagatagttggagttttacctgctccaaatggttcagatagatgtgagcatctcctaaggtatggatgaaatctccggctttcagtccggtgacttgcgccatcatctgcaggagcagggcataggaagcaatattgaagggcactcctaaaaaaatgtccgcactacgctgatacagttgtaggctcagccgtccgttggcgacatagaactggaagaaggcgtggcagggagggaggttcatgttgtccaaatcacctacattccatgcgctgactataatccggcgtgagtcgggattgtgcttgatggtttctacagcttcgctgatttggtcgatgaatccacctttatagttcggccaggagcgccattgatacccgtaaatatgtcccaggtcaccgttttcgtccgcccattcgttccagatgcgtacaccgttgtcctgaagatatttcacattggtgtctccttggaggaaccatagcagttcgtatatgattgatttcagatgcagcttcttggtagtaaggcaggggaagccttcatccatgttgaaacgcatctggtggccgaatacgctgatggtgccggtacccgtacggtcgcttttctctacgccttcggtcagtacgcggttcagcaggtctaaatattgtttcatgatgtaatgctctgtttttatccgaacgcaaaggtaggagaattaattaataattaataattaataattaaaaattagaggaagggggtcatcaggtttcccacccagcctacgaatttcttccatccggaacgctttttccagacttcgggagtgagtagcgtactgttttgcacgtcccgttcgaacatggcattcagctcattggtggtcttggggtcgaagatgaaagcgtttgtctcgtagtcatagcgcaggctgcggctgttgagattggcagtacccaccgtgcagaaagtgctgtctaccatcattatcttggaatggtggaagccgccgttgaagagatatatcttggctcctttcttcatcagcttgtgtgctatgtagaatgaggcatccggagtaaaggctatgtccgacacggcaggtatcatgatttccacttcagtaccttttttcagtgcgttcttgattgccttgcggattgatttggtcggaacgaaataaggattcacgattcggatgctcttctgtgcggcttgtatggaagctgcataggcatggctgatggagcgtggtgtttcgcgtggcgtgcggtccacgatggctatttcttcggcaatactgtcgggcagttgctgagtatccgggaagtaggcaggtccacctacgtgttgtcccgtttcccggttccacatggtcaggaagatgccctgcagatagcgcacggcatctccttcaagatgtatgtgcatatcgtgccatttaccgattttaggtaatccgttgatgtagtagtcggcaatgttcatgccgccggtataacctattttgccgtcaatcactactattttccgatggtcgcggtgtatggcatgattcacccagggaaaagtgataggatcgaacttaacgatttcgatgccttgggcgcggatggatttcagatggcgttctttcaatggttggttgttggaccagttgccgaaggcatcgaacatggcgcggacttcaactccctccttggctttctctgccagaaggctgaacaaggcattggctatggagtcgttgcggaagttgaagtattccaaatggatatgatgccgggcatggcggatattctcgaagagatcgacgaacttgtcatggccggtcatcagcaatttcacttcattgttataagtgacgggggcgcccatttccttcaagtaattcatgacaatggaatcgcttgttgcttgcgccccggcattcccaatagaaaaaacgaataatatgatgaatagaatctttctcaaaactttctcctcttagttagttttatgaggggacaaagatacgatttatcattgaaaaacaactatgccatagatgaaatcttgcggtaaccgaaatagagcaataccactccggcaatgattaacgacttggggtcaagctccgaagctccgctccggatggcagtatcgaaggtttcgcgcaaggtgtccagtatcagctgcactccgtcgagggagacgaacagtacgagggccagagtaaagcagaatgctgtccatatctgcgccaagtggcggctacggtcgggcagatgtcgcagtacgcggcggctgaacccgttatcggctatttcctgccggtgttcggcaaagaatgaagtcaggagtttatcatcattttccatcataaccattttgttttaagtaggaagccattttgtctttcgcccgcgagaggtggctttttaccgttcccgccggacatccggtgatacctgcaatcttttcgatgctttggtcttccatgtagaagagcgtgatgcaggtgcgttccatttccttcagtgtggccagggcacggtaaatgtccatgtgctgtcccacgtcctgctgcagtgtgctgcattgagcgtccactcggtacgtatccaaatcgtctgtttccttccggctgcgaatataatcataaaaaacgttataggcaatacggtagagccaggttgagaagctggacaaattcttgaacgaagcgatgtttgtataggccttgataaacgtatcttgtgccaggtcgtcactcaactcgctgtcgccgcaggtctggtgcaggaagaaccgccgcacgggcgactggtacttctttaccaactggtcgaaggccctggtgttgtgaaacaccacgacctgtgcgactaacgatatgtcacccatctgactcatttttcttcgttcttcttctgttggctgtagaaaatcaccaattgtccgaagccggtgaacatgacgagcaagccgatacatccgagaccgaattctccggtaatggcccaaaggaagatgaacaggccgatgccgacgaatatgttgttgatgcctttgctgcggatatccgttgctgcggcttctttgaagaagttttcaggcagttgctgtccgctggccagggcctgttccgccaggcggtacttggctttccggtttttatagcggaagaagaatactacgaatatgatgagtagcggcagtccgaatacaaagacgatggctgttacggcaatcacggtttccgaggtcttgctcccgaggtcgaacccgttccagtccataccgctgctatggtgggttctccatttttccggagcattgctactgccggcaccgttttcataagtcatgacactgagtgtgtctgttacggtttctccattgatgacagtgtccctcaattcgatgactcttttcttgttcccctgaccgtcgttctctgttacggttctgtttgcgccttgcaccagtgtgcagaacatcatggcgagcattaatccaaaaatgatacgtttcataatctatggtcttttaatttgtttctttgttggttagacgtgtcgtcacctttataaagttgcaaagagaagatattttttttagaaaaccggaaataaggcgatatttttccgtgaaaatgtcttattgtcttttttccggaataacaagaagtaggtatttgcgactgtaaatagaggtaaatatacaaaccgggttgtttcttattgtaaatactgttatctttgcgcatctgtttttattgggaagtcttgatgaagttgaggaatataatgaagtgtttcctccctctgctgttcattgcctatctgggaggaattacgctgtttacccactcgcatgtggtgaatggtgttatcattgtgcattcccatccattcaagggccagcatgagcatacagaggtgcagttggaaaccattttctatctagcctctttcgtctcttcttcccttccgttgcttccggttgccgcgacggttttccttgttttgttgtgtgtactgagcattcttaccacggaatgcatcaagtgtgtaaagcttcgtggcggtatttgcctgcgtgctcccccttctttttttcaaatccgatagattaaggcaattccgttgtgggattgcgtcaacctcattgattaacatattattttagaagtacatgaaaaaatatatattttttgtggtgggagcagtatgtctgttactctcatcaaccgtttatgccgaagatttgaagagtaccgatgccaatattgtcggtcatgtaatagaaaaaagtacaagggaacatttgccttatatgacagtttcgctgaaaggcaccaccatcgggaccatgaccgatgccaccggtcactatttcctaaagaatctgcctgaaggtgagttcacgttgtccgtcagtgccgtaggttataagtcgcaggagcgcaaagtcgttctgaaacgtggtaagaccttggaagagaactttgagttggaagaagacatggtggcactggacggggtggtagtcacagccaaccgcaatgagactgcccggcgcttggcacccactttggtcaaagtggtcactcctaaactgtttgagcagacaaactcgcatactttgtcgcaaggactggcctttcagccaggtgtgcgggtggagaccgattgccagaattgcggttattcacaagtgcgcatcaacgggctggatgggaaatatacccaaatattgatagactcacgtcccatcttttcctctctggccggtgtgtatgggttggaacagattcccgccaacatgatagagcgtgtggaagtggtgcgtggaggtggttcagccttgttcggttcttcggccattgccgggacggtgaatatcattacgaaggaaccgattcgcaattccggttctttctcgcataccatttccaatttcgacggttccggctcgttcgacaacaacacgaccctgaatctttccttggtttcttcggacagtaagatgggggcttatgtgtacggccagagcaggcatcgttcggcatgggactccaacggagacggtttttccgaattaccgaagctgaagaaccagactgtcggtctgaatgcttactaccggacaagtgcctattccaagctgagccttgaataccatcatatggaggaattccgccgtggtggaagtggcttcagccttccccctcatatagccgaggatgccggattgaacggtaccggggcgcccggactggtggaacagctgaaacattccatcaacacgggtgggctcaagttcacggctttctccaaaaaccagaaacatacgttcagtacctatgcttcggctcagcacatcgtgcgcaatagttattacagcgcttatggaatgactacggactttaccggtgtgctgggtgcccagtatatttatcattttgacaagtgtctgtttatgcctgccgatttgaccggaggcattgagttcaatcacgacaatctgcatgacaaggcaacggacgtacagaagtatcgtgatgctgctttggccgaagatcctacggcaacgggtgaccgcttgcaacaactgattgagaaatatacccccgccccgttgaaccaagtggtgaatatagcaagcgtctatgcccagaatgagtggaagaacgaacagtggagtttcctgattggcgggcgcgtagataaaaacagcatcatggacaaggctgttttcagtccccgtgccaatatccgttacaatcctactcaggatgtgaatatccgtttcagttatgctgagggattccgtgctccacaagcgtttgatgaagatctgcatatcagtaatgtgggtggagagttggtttccattgtccgcgccaaaggattgaaggaagagcgttcgcgcagcttcaatgcttcggtagattggtaccactatttcggagatttccaggcaaacctactggtggaaggcttctacacgaaactttccgacccgtttgtcctgacgcctccggtgaaagacccggatggtagcgcttatctgatacagacccgtatcaatggttcgggagctaaagtgtatggcggcacattggaaggaaaggttgcctataaggataaggttcagttgcaggcagggctgacgcttcaacgaagtatctatgactctcccgaagaatggagtgcggatgaggagcacttgtcggagaaagaacgttacagcgacaagatactgcgtactcccgacgtctacggctactttacagctacctatatgccggttaaagccttctcaatagctttgaacggcaattataccgggcggatgtacgttccccatttgctttcggaggtgaacggtgaggcggatgtattggtaaagagtccggacttctttgagcttggaacaaagatagcttacgactttgattttcaagggttctgtttgcagctcaatgccggtgtacagaatatattcaattcttatcagaaagattttgataaaggagcgagccgcgattccggttatatctacggaccgggtgcaccgcgttcctattttgcaggggtgaaactcagtttttaaaaagagtattgaaccgtgctttttgtttagccccgtagattggtgaaacgtattttgcactatctttgctgccataaaacagttcaaagcatgaagctaccctcatctttcaccgattatacacgcgccctcttgggtgtggaagaatatgaaaagctggctgccgccctggaaggagagcagccggtcagtatccgactgaatgaagataaattaccggaatcttcattcagtctttttcgttcctcttttaggcatgtcccttggtctactgccggatactatctggacaagcggctgacattcacttttgacccgctgtttcatgcaggctgctactatgtgcaggaggcttcgtctatgtttgtggagcaggctttgaggcggtatgtgggcgaaggaccggtggtgatgcttgacctctgtgcggctcccggcgggaaatccacgcatgcccgtagcgtgttgcccgcaggcagtctgctggtggccaatgaggtaatccgcaaccgctcgcaggtattggcggagaatcttacgaagtgggggcattccggtgtggtggtcactaataatgacccggcagatttttcttccttgacggacttcttcgacgtcatattgacggatgtcccctgctctggcgaggggatgttccgtaaagaccccgttgcggtaagtgagtggagtggggagaatgtggaaatctgctggcagcgccagcgtcgcatcgttacggatatctggccttgcttgaagtccggaggcattctcatctacagtacttgtacctataatacaaaggaaaacgaagagaacatccgttggatacgggatgaattcggggcggaggtattgccgttggaaatttctactgactggaatattacgggtaatctattgtcgggagaggactttcccgcctatcgtttcctgccccatcggacgaagggggaaggattctttttggcagttctccgcaaaccgggcgtgagcgatgggaatacctgggccgggcaggtgaaatcctgggaaaaaggaagaaaacctcaaggaaaaggagcgaaaactccgggtgtttccaaagaacagctttcggcactgcatgagtggtttgcggttccggataattacgaatttatcgtcaatggcaacaacgtcagcgctttccctaaagcgtatctctccgaactgtcggctttgcgttcgtcactccgtatcgtgcaggctggggtagatgttgccgagttgaaaggaaaagactggatgcctgctcatgggctcgccatgagtatagcactgaatccggatgcctttgcccatgaagagataggccgcgagcaggccatcagctatctgcgcaaggaggctgttgtcctttcggagactgctccgcgcggcattgtcttgctcacctacaaacagatacctctaggatttgtcaagaatataggtaaccgtgccaataatctttatccccaggaatggcgcatacgcagcggatatttgccggaaggggtgctggaattggcaacaataaccgggtgaaatcaatcacgttactgcaaagctgctgtatatattttgcagtagcactgcagagctgttgcagtgacactgcaaatatatatgcagcgcgactgcaacacatatgcagtggtgctgcaacacatatgcagtgcgactgcaaaaaatatgcagaactttgcagtataataatagagtaggaatgtactattttttattgtttcttcaatgcagtattttgtttgttcaagcattttctatatagataactgttttaaaactaatactatttgcttatgcttaaaaaaacgattactgccttaagcctactttgtatccttgcagcctgccagagtgacgacaactcttcaccacaacccaagcctcgcaaagacattgccttgacccgtgccgagcaggagatgatggatttaggaacggatttcgctttccgtttctttaatcaggtttgtaaaactgaggtggaaaagcccaatctgttcatctctcctttgagcgcttcgctctgtctgtctatgattgccaatggagcgttgggaaacacactatctgagatgacagatgtcctgggcttttcgggctattcgttggaagaaatgaacaactataataagaagctggtggaggcgttgctcgatttggacaataccacacagttgggaattgccaattccatctggataaagaaagggttcggtgttcatgacgactttgtaagcgtaaacaaaaagatgtatgacgcgcaagtgcaggagctggattttgcctctcccaaggctccggacattataaacggctggtgtgccgggaaaacgaataattgcatccccaaagtcttgaatgagattccggagacggcgcgtctttatctgttgaatgcgctttatttcaaggggatttggaagaatcaattcaaaaaatcggatacggcagaagaggcttttacgaatgctgacggaagcaaatcgactgtacacatgatgaatcttcgtgacgagagattcaactatgccgagaatgagtatttctcaatggcagagttgccttacggcaatgaggctttcagtatggtggtgctcttgccggcagagggaaaatcgttggatgagtgcctgccgcagctgaatgacgagcgctggggggaatggaacagtagtttatcaagctctgccttgaaccttaagttaccccggtttgaaatggaatatgataaagaactcattgacgatatgatggtaatgggaatgcaagaggcttttactccatcggccgatttttccggaatggcggatgaggatttgtttatcagtttgctgcaacagttcacttatgtgaaagtgaatgaagaggggacggaagctgcggctgtaactgtcggaggaatggacgtggccgctcccggaccaagtatggtaattccgttctatgtggaccgtcctttcatcttcctgataaaggagaagagtacgggagttattctgtttatgggtaaagtcacaaaactataactacaatatattgaaatagaaagagctgtctgtcaaccgcagacagctctttctatttataaccggctcttgtatatctgtgccattgccttctgatactggttttccagttgcaggaggtttgtcttgctttgatagacaaccgatatttcaacgaagtattcaatcatactgatttgtcctcccataagtgcttgtttcagtaaagaaaggtcttgctgttgatggaaggtgcgctcgtattcctccatggaagcgtgcaggttcttggcctcttcatagagttgccacaaggcagagctggcttgcagtgcggcgttctccttttggtagtcaatgttgagcgcttgtgtcttggctatcttgaccttattgcggttttcgaaaagcgggaaagagaagcctactactacaccgtttagcggatgccccgattcggtatttctacggtaacccagttccagtttgggcagccagccttgcttgcttgccgaaatctgtttccgggcggcagaactttcaccctgcaaggattgcagggtggggtctgaagccagcagttcgtcggccagcgggtggaagtcggccggcaacggcactgccgggtattctgtcaatccgagtgtttgggcgtcgggtgtggtatcgggtctgggacgtcccggtgtgagcggctggtttccgttgaggacaagcagctctttcagtttattgttaagtgccgtctggttcatgcgggcttccgtgcgtacattcagcaactccagattaatcttgttggtttccagtgcattggcatctcccgtttccaaacgccgggtgtacatggccgacagttcctccgcattcttcaaccgttcgtcgagcagggcttgctggcgttgcagcatgatgatgtccaagcatacttccttcgcttgcaacaatatctgctggcggaaggcggtggcttgtgcatccagtgcatttgtcttgagtcggttcatcttccctcgggtggcgtaaagcgtggggaagtcgaagctttgcgagatgaccatttcgccgactgtctcgtcactgttcttggagtcccaaaggtgggcgtatgacagtgtagggtcggggaggttgttgtttgtcttgttctccagtttttgtgaggaaatgaggtgggagttagcctgcaattccttgttgttggcctctatctgctggagcacggcatcaatgccggacgtttgtgcgctcatccccgcaaaagcgaggatggcggcgctgaatatgaaaaatcttttattcattgtctgacgttttaggttgttggttatggtgcatcatcaggtaaacaatcggaatgatgaaaccgttcaggaacgtggatgttaaaaggccgcccaagataacctttgccatcgggctttgtatctcgttgcccggcaggtcgccactgagagccagcgggataagtgccagtgcactggatagggcggtcatcaggattggattcagacggtcgagcgaaccgcggataacgctgtcgtagacgccatagccttcttcctgctgcaagtggttgtaatggctgatgagcagcattccgtttcgggtggcgataccgaacagtgagatgaaaccgatgatggcggggatactcacttctcccgttgtgatgagcagggcgaatacaccgcctatcaatgccagcggcagattgataaggatgatggcactctccttcacactgcggaattcatggtagaggagcaggaatatcaccacgatggacatgaacgaagtaagtgccagcgtgcggcttgctgcctgctcgctttcgaattgtccgccgtattcgatgtggtatccttccggcagtttgatttgtgcgtctacctgggcttgtatatcattgactacacttcgcaggtcgcggtcggccacgttggcggagatgacgattttacgctttacattctcgcggctgatggtgttcggacccatggccgagcggatttccgctacatagttcagtggaattttctgtccgtcgcccgtatcaatcatcaagttgcgtattttttccatttcgtcgcgtaggttgtctttcacgcgtacggtcaggtcgaagctctttcccttttcgtaaacttgggaaacggcttcaccggccaggcagacattgacaaactccgaaaattcgggcagtgaaatgccgtatttggcaagcatttcccgtttgggtgaaatgacaagttgcggacgctcaatctgctgttccacgttcaggtcggcaataccgggaatcccctggatggcactcttgatttcattgcccagagtgaacatgcggttcaggtcgtcgccgaacagtttgatggcgatgttcgcctttgtaccggatagcatggcgtctatacggtggctgataggctggcctatttccacgtttgcccctacaatggtacccagtttttcgcggacttctgccacgagctcgctgcgcgagcggtctttcaactcaaacggtgcctcgatctcagagacgtttactcccagagcgtgttcgtccagctctgcacgtcccgttttacgggccacggtctgtatttcggggatggaaagcagcagctcctcggcacggtgccccatcttgtcgctttcttccagggaaatgcctggaagcgaggagatattgatggtgaacgaaccttcattgaaaggcggcaggaacgagcggcccagggtgaagaaacagccgagcgctactacaaatagtccgatagtacctcccagtacccctttcttatgccccaatacgaaagtcagtgcagaaccataccattgcttcatcttgcgtgctacggcagaatcgctgttttcgttgttttgttttttcgttttctcttttcccaatagataggagcaaagtaccggcgttacggtcagtgccacaacagttgaagccgccaatgccacaatgaacgcaatacccagtggtaccaacatcctaccttccataccactaaggaagaacagtggtacgaagctgacaatgataatcagcgttgaattgaggataggcatacgcacttctttcgaagcattgaacaccacttccagaataggaagttgctcgccggcaggtttcagtcggttttcgtgcaaacgcttgtagacattctccacgtccacgatggcatcatccaccagcgaaccgatggcgatagccatacctcccaggctcatggtatttatcgtaaagcccatatagtgcagggcaaggatggaggcaatcagtgacaacggcagtgtcaccagcgagatgactgtggtacgtatgttggtaaggaacaggaaaagcacgatgacaacgaaaatacctccctccaacaacgacttctgaacgtttccgatggaactttcgatgaaacggctttgacggaagatgtctgtggaaacctttacgtccgccggtagattcttctgcaggtcttgcagggaagcttccagtttgtctgtaagctccagcgtgcttgtggcgggttgcttggtgactgtcagcagtacggcatgcttaccgcgttccgaggcggtacccagtttaggaagtttggctccgacttgaacgtcggcaatatcttccagcaggataggggcgccggagactccgttgctccgcaccacggccttggctatctggtctaccttgtcggtagaaagtacgccgcgtacgatatattcattgccatattcatagagcactccaccattggcattcaggttcatttcgcgggtgatgttcatcacttcgctcaatgttacgccgtaatggcgcatccgttccgggtccagctgcacttgatattccttgatgtcgccacccagtacggcaacttgtgccacaccgcccgtagagagcaggcggggacgtatggtccagtcggcaatggtacgcaaatccagcatagaggtcgaatctgctgtcagacctacaatcaacatctcgcccaaaatggacgattgtgggcctagtgtcggcttgcctacgttggccggtaaggattcgctgacgactgccagcttctcactgacaatctgccgggcaagatagatatctgtatcccagtcgaattctacccagactacagaaaaaccgttcgttgaggaagagcgtacacggcgcacacccgttgcaccgtttacagccgtttctacgggaaaagtgaccagctgttccacttcctctgctgccataccatttgcttcggtcatgatgaccacggtcggcgcattgaggtcagggaacacatccacttccgtatgcatggcggtataagtaccgccaatcagcaacagcaccgatgctaccagcaccaggatgcggttctgaagagaaaaaccaattattttgtttaacatctttttatttactatttacaatgtacaattgggctgcgcaatgtcagccgcacttgctgttttatctaatatttcttgtttatctgactttacactccccattcgtcacgtaacccttatactgcatagcgaaatggtactttgtaaattgtcaaattgtacatgagattagtgttcatggctatgtgccggaatagcattcgttgccgatgccagcttcacttgataggctccttgggttacgacgcgatcgcctgcttttatgccggaaaggatttgtacactttcgccattgtcggcacccagggtgacaagctgttttttgtagccctcttcatccagttgcaggtagacaaagaagctgccttgttcctcggtcagcgcactgtgaggaagagacaacacgttctccattggtgaggataataggaatacttctacaaacgagccgggaataacgtctcccttattgtcgaattcaaaagttacgggtacataatatccgttctcacccgaagcctttccataagaaagcatgcgcccgcccagttctttcaatgtatataccttattattataaggagtacagaagttggcagaaccgatgctgtttaggtaaggatagtacttttcggatacatccgcacgcaggaaaagcttgcggttctgggtgacgcttaccaacggctggccgacgctgacgtagtccccttctttcaccaacagattcttcacataaccgctgatgggagaaacaacagcctggccgcttgccgaatggttctttgcgactgcctcgtaactgatacgggcattttcgtaaatctgttcggcttgcgcgaattccttttcagatacgattttgttgcctacaagcgctttcatacgctcgtattcttttttggaaacctcgtaggctatccgggctttctgcaccgggtctccgtcggccatgtttttggatgacaataccaccaaaggagtacctttgctgacactcattccttcgataacttttcccttgaaggaaaccacgcctgctactgtagctacggctacgctctcgtctccctgggctgccatcacctggccgctggtcttgatgacttgatggaaactacccggttcaacagtgctgactgctacgccggcagcttgcgcctttgctggtggcaggatgatttcatcgcttcctccggcatggttttcctgctcttcgtgctcatggttgtgttcctcatgttcgtggtcatgtccctcgtggtcatgtccgtcatgattgtgctcttctgtttcgtgattatgtccttcgtggctgtctccggacttgctgttacaggagcctaaaaggaataatcccaagactcccatgaaaataacttttttcatgatgatatttgttcttactttttgattttgaatacaaagttagggcatagggcgtgcaaccaaattgcattgttccttatgccggatagaaatctgtcccggtgatgttccggtaacagttaagcaagaagagacggaggggcacgaagtcccgtagcacatatgataaatgtgctatgaagagattccagatagatacactcctgcctgcttatgtcaaactcgggtaggatgagtaacttggaaaaaggttcaatgagtagggtaactgcccacaaggcatccggatgtgaacacacatcattggaagagctgggcgtctgttgtacaaagtgggttgtcatgcatcccgtgtcgcaacagcagtgctcgttgcccgggctatgacggtgtccgcagcaatcggcggtgatatcattcttcatgcatatcattccgtcggcatgatgatggtggggaatgacgggtatcaccagcattatcaagctgatgaaaaaaagaatataggttatgtactgtttctttttcattcctctatctttggacggatgcaaagatagaggttaaggacttaattaccaaatagaaaatgctaaaaaggtttgaataacatattcaatccctcattcatgctggggtgggtgaaaatgaagtcccgcaggaaatggtaacgctgtcccgttttcatgattgatgctacggtattgattacttctggtgcatcggcacaaagtagggtacaacccagaatccgtccggtatggatgtctacaatagctttgagcataccgtctatgctgtgtagcgtacgggcacgtggaatcatggcagcagggatacgtgccacatgtatggaataaccgttcttcatcgcttcctcttccgtcagtcctatatgtgccagcggtgggtcggtgaaaatggcaaaggggattggataccggtcttttgtactcctttttttgttttcaaagagttgattacggatgatacggaaatcatcgatggacaagtagtcgaactgttcgtctccttttacgtcccccagggcccatacgtgtggggctgtagtccgtaattggttgtcgacaacgatggctccccgcttgtctgtttgtatacccgctttttccagattcagctctgcagtcataggcttgcggccgatggctaccagcaaggcatctcctttcaggtagtagggagtgccgtttgcactgtccgtataggtcagagttattccttcggctgtgtcgtacacggattggacacgggcgttcaaccggacattgatacgctttcggttcaatgcttccagcatggaggcggcaatgtcgcggtccactttaggcagaaagcggtttcccgcttccagcagtgtgacatggcttccaaagcctgcatacatagtggcaaactccaatccgacagcaccgccgccgatgacgagcaggtgtgcgggcagtttgttcgattgcagcaaggtctcactggtatatacgtacttgctctccttgagtccgtcgatggcaggcaggataggggtggacccggtgttgatgaatatctcttttccctcaagaatcgtttcgtccttgccggagactatacggattgtattttcggacaagaaagaagcagttccgtcatagagggttatattaggcttgttttttacattttcataatttttctcacgcaggaaggatacaagcttgtctttccgcgccacggcaagtgcatacagtttggactggttcttataatcgtcatagtatcttttttccgcatattccgattcgtgaatcagagttttggtagggatacatcctacgtttacacatgttcctccgtacatctgaggggaacgttccacgatggctactttccaattccgttcggccagttcggcggccaataacttgccgcccttgccgaatcctattatgatggcatcatattgtttcattttaatatctcttagttaagtgtttagtaaaatgaaaacaatatgtatcggccatttgttcggacgccgggtttagcagatgcttatcgttccagttcgcggagggagtccattttcttcttttcaaggaattcgtagatgccgctcaagtgctctttcacttgtttgttgccgaattcatataccttgcttaccagtccgtccaggaagtcacggtcgtggctgacgaggataagggtaccgtcaaaatccagtaacgcttgcttcaggatatctttggttttcatgtccagatggttggtcggttcgtccagtatcagcagattcaccggttcgagcaaaagctttatcatggcgaggcgtgtgcgctctccaccggaaagcaccttgaccttcttcatggactcttcggggccaccgaacatgaaggcacccagcaggtcgcgtatcttgttgcggatttccccttttgccacatcgtcgatggtctggaatacggtcaggttctcatccaacaatgaggcctggttttgtgcgaaatatccaatctgcacgttgtgtcctatcgtgagggtgccttcatgttctatttccttcatgatgcacttcactaacgttgactttccttccccgttcttaccaacgaaagcaaccttgtctccccgttctatggtgaggttggcattcttgaagaccacatggtcaccgtaacttttccctactccctccatgatgacgggataattgcctgagcggggagaaggagggaatttgaggcgtaacgctgaagtgtcttcttcatccacttccagcagttccagcttctccagcatttttacgcggctttgcacttgcagggttttggagtaggtgcctttgaaccgttcgatgaattccttggtttcggcaatgaacttctgctggtcgtcgtaggctttctgttgctgttcgcggcgttccttgcggagttccaggtatttggagtagtttactttgtaatcgtatatccgtcccatggtcacttcaatggtacgggtggtgatgttgtctacgaatttacggtcgtggctgatgacgatgacagcctttccattgctgataaggaaatcttccagccattgtatggattctatgtccagatggttggtaggctcgtctagcaacagcacgtcaggcttttgcagcaacagcttggcaagctcgatgcgcatgcgccatccgccgctgaagtcactggtctggcggttgaagtcttcgcgtacaaagcccagtccgagcagtgctttttccacatcctcctcgtaattggtggagtcgatggcatagaacttttcgcttaaggcggagacattctcgataagttccatgtagctgtcgctttcgtagtcggtacgcgtttccagttccttgttgaggcgctctatttcagcttccatttcatgcaggtgggcaaaggcttgcgccgcttcctggaatacggtacgtccgtcttccgtcataaggtgctgtggaaggtaagctatgacactgtccttgggggctgagatttttccacgggtaggttgtcttacacctgccaggattttcaacaatgtacttttccccgctccatttttacccatcagggcgatacggtctttttcgttgataacgaaagatatgtcactgaataaagtagttccgccgaattctacggccagtccgtctatagaaatcattatatatttttttaatgagctgcaaagatagtgcaaatctattattttttatatctttgcccctatataaacaaaacgcataggtcatggaaatagaaaaagtgtcaggagattaccgtccgcttattctggttgcggaagatgatgatagtaactttaaactgataaaggctattatcggcaagaaatgcgagatactatgggcaaagaatggtgaggatattgtaaatttgttcgaagagaatcgcgacaaggcggaagctattctgatggatataaaaatgcctattatgaacgggctggatgctacggtgattattcgcaagaaggataaagaacttcccatcatcatgcagaccgcttacgcctttactgccgaccgcgaaaaagccttggagtgcggagcctcggaagtgttggtaaaacccatcactctgtctgctttgcgtacatgtctgagccgttatttacccaaattggtttggtaaggctttactgataataaaaagggaaccggatgactaagtaatgaatatatcatccggtttccttctttttattcttgtgcattgtcttttctctcttccatcttcttttttacaaattcgattttgagattggcttcttccatattcttctttatttccgtcatggatgacagcagttgtgccagttcgtagatgctggcaagggcctggcggtcggcggcagtcatggtgatggaataggggcgttccccttgatagttgactttgatattcttgtccttgttcagataaaggaaccccatgacgtttccgtcttctcccagtttgaagtctgccttttcaatcttttcaccgaggtcagtggtttcgtagctgtctttggcggcgggtgtttcggcaaaactaccgtcgggagcagtgactttgacggccacatggtggatattatgggctccgcaataaatggaagtcatgctcatgactccgttttcgtctacctggaagcgaaggaaagagcgatgcagatttttttctatcacttgggaaggatgaaggtaattgccgatattctggtattcggcatctttttcaaaggtgtatttccctttgattgcatcgaaatccttttgcttggcttgaagcatactgtccagatagaccaggctcttttcctgctctttcagttccacttcctgcatcaggccgatgcctgcacggcgagtttcaaacgctttgggatagagcatcttgatgctgtcaatcagaatcttcgcttcattgtagttgccgagttcaaacgcttcgcgggcagcttgtagtttttcaccagccttcttctccacatcttcgcaagagaagagtgtacagcataggcatgcaaggagtattacttttttcatatttgttgttcttggagttagagtccacaaaaatagaaataatatctttatctttgcagcattttaatgtgcaaatgtgctaatagaccattaacacatttgcgtattcattacattagcgcattatttatgatagatttgacggcagaagaactgaagcaatattttagtgatgatatattcaagcggatatccgaaacggctgatgaattgggattggaatgttacgtagtcggtggatatgtacgtgatattttcctgcaacgtccttccaaggatattgatgtggtggtggtaggcagtggcattgccatggccgaggcgctgggtaagcgtctggggcgtggggcgcatgtttccgtcttcaagaatttcggtacggcacaattgaagtactatggtacggaagttgagtttgtgggtgcaagaaaagaatcgtatacacacgattcccgcaagcctattgtagaggacggtacattggaggatgaccagaaccgccgtgattttaccatcaatgcactggctgtttgcctgaaccgggtgcgttatggcgagttggtcgacccctttggcggtattggagacttgaaggaaaagaccatccggactcccctcgaccctgatataactttcagtgatgaccctttgcgcatgatgcgctgtgtccgttttgccacccagctgggattctatattgacgatgagacattcgattctctggagcgtaatcgcgaacgcatctccatcatctccaaagaacgcattgcagacgaactgaacaaaatcatcttgtcacctattccgtctaagggattcattgagctggaccgctgtggtctgctggaactgatattcccggaacttgtcaggctgcaaggcgtggagacgcgcaatggacgcgcccataaggacaatttctaccatacgctcgaagtactcgacaacatcagcaagaagaccgacaacctttggctacgctgggcagctcttctgcatgatatagccaagcctgccaccaagcgttgggaaccccgtgcgggctggacgttccataaccataatttcattggcgagaagatgatacccgatattttccgcaagatgaagctccctatgaatgagaagatgaaatatgtgcagaaaatggtgagcctgcacatgcgtcccattgtgatagcggatgatgtagtgaccgactcggcagtgcgtcgtctcttgtttgaggcaggtgatgatatagacgacctgatgacactgtgcgaagccgacattacttccaagaatatggagcgtaagaaacgcttccttaataattttcagttggtacgccagaagctgaaggatttggaggaacgcgaccgtatccgtaatttccagcctccggtcagtggtgaagaaatcatgaagactttcggcctttctccttgccagcaggtaggtgccttgaagagtgccattaaggatgccattttggacggcatcattcccaatgaatacgaagccgcccgtgcatttatgttgcaacgggcggagaagatggggcttaaggagttatgagttataagttgcatgttatgtaccatgcgttataactcataacttataactcttctttttctacttggaacttgcggcttactttcatcaggttgatggtgtaggtcactacgttctgggcttcttgtatcatagtcaggtataccatgctgactttgatgctgccgctctggctttggatgcgttgcagctcttcgcgtttcaggtgagacaactgtccgttgaggtcgttggctttgcgaatctctgtttccagttcatcataattgttcgtttccagcttgtggcggcatacttgtaacagatagcagatgtcttcggctacgtctgtaaattctcctttctgaatggcatccagcggattgaagttattgtctatgtgctctaagcaaggttcgcaaagacggcctacgctgtacaccagttcgctggcaaagtcgttgccttgatagtaatagagtcctttttccagtacggtattgttgtcgagacggcacatggcaagtgttccggtacgcttcatctgcttgatgagttgtttttcgaattttactgagcccatggcacgacgcagtccgcgtagattctcgtgtaggaaggaagtgacggtacgttcaaaattctcttctgtgaattccataatcttcaccagttcttcacgggtatgcttgcggagcaattcgatgacttcattgttgtccgtactcttcatcaactgttttagggtctcgttgcctttttctttttccttgcgctttttgtacatcacttggctacgaatcagcatgaagactgccagaccaatcagtgccaggatggcaaccgtaccgccgaaatggataatcagtgctacgaagaaacagatggtgaacgctgctccggcagtgatgaaccaaccgccgataacgctgagcacacccgtaatgcggaataccgccgaatcacgtccccaggcacggtcggcaagcgatgtacccatggctaccataaaggtgacgtaagtggtggaaaggggaagtttcaaggaagttcccaaggcgatgagcagaccagccaatacgagattgacggaggcgcgaaccaagtcaaaagcggcgccgtcggctatgatggcttcatccttctggaagcgtgtgttcatccaccgcttgctgctttcaggcatcgttttggatattccgttagccagagtcatgctgaagcgtaccagcgtacgggctatcggggtacttccgaagttctcttcaccgtcatcctggcgggcaaggtccacggaagtcttgataacgttgtgggctttcttggatgtgcagagtgcataaaccataatggcgcctgcaccgataaggaaataccacggggttttggctgcaccgaggagtgaggacatcaggaatccgtcggggccggcggccgtaccattggctgtatagtcaataaatgaggaatatcctgcgagggggacaccgataaagttcaccaagtcattgccggcaaaggcgagggcgagggcgaaagtacccatcagaaccactactttgaagacgtttatcttgcaccaatgcagtatctgcatcagtatggtgaagaatacaaagaaaccggttattagcaatgcggtattgtcgtgtatccattgcttattttcaggagtcatgaatgaactgtctttcagcccctttatcagcatgaagtagatgatgctggtggcagctataccaccgaacagcgcgatgctgtatttcatgttcttcttgtagttgaaggtgaacacgatacgtgccagccactgtaccagcataccgaagaagaaggcaatggctacggatacaaaaatggccatgatgacagacagcgccttgtctgtattgatgaggtcgcccagtcccaatgtatcgctgttatagaccttgatgagcgccagtgcgaacgtacctcccagcagctcgaacaccatggatacagtggtggaggtaggcattcccatagtgttgaagacatctaatagcacgacgtccgtcaacatgacggcaagcagaatgcacatgatttcggcaaagtagaagtgctccggttgatagatgccgtgtcgtgcaatgtccatcatgccattgctgagtgccgcaccgatgaagacgccaatgcctgcaatgaacagtatggttttgaaagatgctgcctttgctccgacagccgactgaagaaaattgaccgcatcattactgacacctaccacgaggtcgaaaatcgcgagtacgaacagaaagatgacgatacccagataaattgtttccatagacatgtattttatttccggctgcaaaggaaagagtttggtgttgcagggaaatgtcatacatgttacagaaatgttacaaatgttttggaatagaatggtattgtgttaagagcgattgctcttattctcctaataatcattaatgttaagcatttaagagtaacaatataagtataatagaagagtggatgcttttgtgtttcgtatttggttatttctatgttaagcagccaaattactagttaattgtttgcagatgtcgagaattcttgcgaatattgcatacaagttgtgtgtagaattgattgtaattagaactttgatattaaaaatcaaagatgtatgtaacttttttaattcatttattaaataaatgaattctaccaacgaatatagaaatatgaaaaaccatttttgtttaaacctattcttcttactatatttgtttttttgtgctggatgcaagcagcatatctcagatagtgctgctaaggcaaatgaggcattgtttactcaattagatagtctgatagataattctgataaacttattttgcagaaagaggagcgaatagaggcgttgaagcattcactaagacaatctaaggcatttgagaaacagtatgaacttaatcaggctatttatcaagaatatcgcgtgtatgatgcagattcggctatgaagtatactacacaaagccttgatttagcacgacaatatcatgataagaatcgtgagattgaatctttattaggtattggttttgtttatacggctaatggcttgcttagtcaagcctctgaagtaatgcattcactctgttcttccagtatgcctcgctacttacgttcgcgttattatggtcagatgcgtactctctgctcgcggttgcaactctattcattaggtgatgatgcattacatgagcattatggtcaactttatgcgttatattcagattcagtattgcagacggccactcctgacgagccacgctacctttatagccgtgtgtggaaatatcaagatgttcccggtgcacaacgtattgccattagggatgagttggaaaaggaaaaacaacgtcttctacctaatagtcgtaattattctattttagcttataacttggctctactttatgaaaaagaacacaaccataccaagtggctggaaaatatgattctctcaggtattgctgatgtatatgctgtgaatcgtgatattggttcgttgtatgcattggcttcctatttatatgaacaaggtcagttggaccgagcctatcgttatagtacttattgttctgatatcggtataacttttaagagccgtgtacgactgcttcatcagcagaagttgcagagaaggatacatcaaagctacattgaacgtgatcatatgcaacagaagcagctaaagctattccttttatttattagttttctcactattgtattgctgatagctcttttctttttgagaaggcaaacaagaagacgtaggaaagctttggttgagctacatgtggccaatggtagattgaagagtcttaatagtgaactgcaaaagctcaatttggttctacgtgacacaaattatattaaggaggagtatattggtcaggtattcaaactttgttcatcctatatttgccgtatggaggagtatcgtaaaaagttaaaccgtaaattaaaggctgggcaacttgaagatttaaagaagatgattagttctacttctaccatgagcgatgaaatgaaggatttttatgagaaatttgattccattattctacatttataccctgattttgtagagcacttcaatagtttgctacgtcccgaagaacatattgaagtgaagtctgggcggcttaatacagaacttcgtattcatgctttgatacgaatgggggtaacggatagtgagaagattgcagaatttttgcactgttcactgcaaaccgtatataataatcgttctataactttaaataaatcttcgctcagtaaggaggaatttcttcgagctgtgaaagaggtttgtaaaaagtaatttgaagactgagcgtttctctcattttttacccacatgtatatagataattgccattcaatagcttaatactatcgaatggcaattatctatatacatgtttttgattaccgatttaatttaaatcactactgaaaatctattgagtctgtctgtaattgaaagataatcagtgatatataactttgtgaatttaccaaatcctctacctgtgaatataatcggttgttacattgtctaattttgctctcgagattttttacacacaagttcctattaacttaaaaatgtaatttatgaaaaccagacaaaaatcgagagacgcaagtggtattttgcttgtctgtcttatgtggatgctgtcactttcaagctcacttcatgcacagacatggaatattaacggaaatgtgacagatgaacaaggagaaccgataatcggtgccaatgtagtgatacaaggtacgggtacgggcaccattaccgatgtagaaggaaactttaaactcgcttcagtgactaagggggcggtaatggagataagtttcattgggtatatatccaagacattgcaggtgaaagacgcatcatcgttaaagattgtactgaaagaagataaccaggcactggatgaggtggtagtagtaggttatggtgtacagcgcaaaagtgatcttacaggttcggttgcttcagttaactcggatgtacttgaaagtcgcccacaagctaatttgattcaatctttgcaaggagcagttccaggattgaatattagtgtgacgggtagtaatgctgaaggttcgtctactactacacgtattcgtggtaacaactccattacggccgataataaacctcttgttattcttgatggaataccttttgatggtccatggtcggaaatcaatcccaatgatgtagagagtatagaagtattgaaggatgcctcttcagcagccatttatggtgctcgcggttctaacggtgtaatccttattacttctaagcgcggtaagaaagacagattgacggtatcatacgatacttatgttactattgaccagcctatcaatttacctcgtatgatgaatggcaaagaattctataagtataaatctgaagctttcaaggctaccaatactactcctcctacagaagagaatcctgaaccttggttagataactttactcctactgaattagctatgtatgctgccggtcagagtactgattggatgaagttggcaacacagaccggtataaaacaacagcataacctttctttccgtggtggagctaacaaaaccagctatttcatttcattgaactatacggatgtgaaaggaactgcggtaggcaatgagttcaagcgttataatgtacgtttcaatcttgatcaggagtttaatagttggttgaaattttctactactacacagttaggtcgctacgatcgtagtggtagcagtgcttctttttggcgggctataaaacaagttccgttgggacgtgcttataacgaggatggttcacttacactttctgctactgaggactcctcttcagctttcagcattaatccgttgggatctcttaataataagacaaaagatattcgtgcaaaggttatcactaataatgtgcttgaggtaaagtttccctttattaaagggctgagctataaattgaatacaggcttcacttaccaaaacagctcctataagaattatcaaggtttggatacctacgaaggagctagtgctaatggcgtattgaatactgatgactggcattcagaagaatggattttggagaatattatttcttatcaacgtgaatttggcaaacatcgtatatttttcacaggattatattctgctcaaagcaaggaatatgaacagaatacaatggaaggtaagaattttcccaatgatgtgatgtattattaccagatttctaaagctgccacaatgtctggtaattccaattattataaagaaaatcatatttcacaaatggggcgtttgaattatacttatgatgatcgttacttgttgactcttactgctcgtcgtgatggttactccgcttttggtgaaagttctaaattcggcgtttttccttcagccgctattggatggaatatttccaatgaatctttttttaaagacaagcctataagtgaaaccattagcaatctgaaatatcgcttgtcatggggtaaaaatggcaatgaggctatcagtgcttatagtacactacctaatctttcaacttacaattatctgaatgatgatcatactgcacagtttggtttctatccgtcgaagttagcttcgcccggtttaggttgggaaactactacatctattaatactggctttgatattgcactttggaatggacgtattcagagttcatttgatatttattggtctaaaaccaaagatttgctgctttcccgttctattcctaccattaatggtactggctctattactgagaatcgtggacagacccgtaatcgtggttttgaattccagataacttctaataacattacacataagagttttagctggagcacctctttcaacctctcacactatcgttcggagattgtagatgttggtttgtatgatgctaatggaaagccggttgatgatgtggcttccaagtggtttattggtgaacctatcaatgtgaactatgattataaaattatcggtgtatggcagattgctgatccgtctaacccgacagggcagcaagatcctaactatcgtaattcgtatcctggatatgtgaaataccttgatgtagatggtaacgatattacaacggctgataagactattatagggtcggctattcctaaagtaaatatgagtttgatgaacacttttgagtacaaaaacttcactctgagtgtgttcttaacggctcagttaggacaaacccatctgaatgccttgtatgatacaagccataattcatatcgccagaaccgctttttggtggatttttggactccagagaatcctacgaatagctatccgaaaaatagtttgaatagtgatgtgaatccagagggagccagtttctatgaaaagacagatttcttacgtatttccgacgttacattgggttataatttcccacaacaatggttgcgtcgtactttcatcaaacggctcaatctttacatgaacattaagaatttggctacaataactggctggacaggtatggatccggaatttctcaatgatcaattggctgctcctccagtacgttcgttcacttttggactaaagttagatatttgatgagagtaatatatcataaaaagctaaaatgaaattgcacatatgaaaaaaataacatatttcaatgtcttagtgtttacagtattattgctcactatgggcggctgtaatgaggataagtttcttaaggaagatcctcgtgatgcactttatcctgaaaatttacttgtagattacaatggatttaaatcgatgataacgcctctttatggtcttatgcgtgcagagtatcgccgtgctgatgcaatgggaggaagtattgcgctctgtctgcattctgcctggggtggaggggtagataattcatgggccaataatagtcatgcggaaatgaagttcctctacaatcccaaagagataacttacactgatcttgctatttggaataatattttccagtggggatatcgtatcatcaacactgccaatatggttatctcaagagctgacaatgatggcattaactggggaagtggtgctgatgctgaaaatcgtaaaaatgaggtgttggccgaagctcgctttttccgtgcttgggcttaccgtcaccttacctattcatttggtgcagtgcccctttcaacacaagaaattacaggattgaattatcgtgatgattgggaccgtgcttccttgagtagtattcgcgaagtgatggcagaagatttccagtttgcagtcgataaccttcctttgcgtacttctaataatagtaaagtctctggtgctgtggcacgtcactatttgggtgaactttatttggcagaaggtaatgctgaaaaagcagtttcagtactgaaaccattagtggaaagtggagaatattcccttataaatcaacgctttggtagtaatgcttccaatgatggatgtccttttattgacgtattttatactcctatgtatgctgatggaaatacggaggtgttactggctttcattaacacagaagaggagaatagtgcctatggtactgcaaatgtctatatgactacaacttataagaactattatgctaatgatggcgattgtaaaaagacaaaccagcataatccggactatatcaataacggtggtgaaggttcatttgcacaagtcttttggcaagctaatggtggtaagggagccggacgtgtagttccttccagaggagcacttcgtttgtacaattataaaggaatgggagaacaagatgaccgtgtatctgccaatgctatcgtatggagtattaatgatgtagatgctgccggcaatgtaaccaaggtatttgatttaggtggtactgcacttattgatactacggttaatgcagccatgctaacttctacttccattaaaaaatatgattggcctactactcgtaaatgggattatactccacctattttggctaatgcagctaatgatggacactatgcggacattgtttatttacgtttggcagatacatatttactttatgcagaggctctttacaagagtaatcaagtaggcgaggccattaaatggataaataaagtacgtaatcgttccaatgctgtaagtattactgaagatgatcttagaatcggtggtatggatttcattcttgatgaacgcagccgtgaactgcttacggaggaagaacgtcgtcatacattggtacgtgtttgccaagaaaatggtggtgacgaacgtgataccaataactatttcaaacgtcgcatgcgtgaactcaatgagatagctggtattgcaggacgtggtatggatgaatatgaaactcctgtccttttcccgctgccgcaatcattcattgatgccaatactggtaatcctttggaaaataatccggggtattgatagataatagtcagatataaataccgcatataaacggctttgtatatatcggtgtttatatctgatttagattcatatattcaaaagaaaacaaaaacttaatatcttgatacatcatgtccgaattggctttcatttttagtcttcttatggtagggattacagcggtaggtctttatcgtaagctcaatcctcaaggtcttttgatgctttccggtttattaatgcttacagctgcttttttcatgcaagtgcattcggtagtacctagtaaagctacgggaatggtggtgtttgatttggtaaggatgatagaggaagtttttctttctaatttggcgcgtgcagggtttatgataatgacaattggcggttatgtagctttcatgaataacataaaggctactaatgcattggtctatatttccatgaagccattaggtctttttcgacgttatccttatttggcggctactatagttattcctattggacaattactttttattactactccttcagctgccggattaggattgttgcttgtggcttcggtttatcctgttttaattagtttgggagtaagccaacttacagcattgtcagtcattgccgctgctactctatttgatcagggaccggggtcggcaaatactgctatggctgccgaattgataggacaatccaatgtggaatatttcatcactcatcaacttcctttagtaattcctacttccttggttgtaatggtactcttctatttcaataaccgttattttgataaaaaagatgcaaagaaacagcaggatggcatattgcaggtgtcaaatgtgactgcaacctcattagtagaaaaaccggatgttccattggcttttgcgctactcccggtattacctttggctcttctcattttcttttcaccttttgtgggactgtttcagcctactgtaacattgggtaccactactgctatgcttttttctctgttcttatcattggtatttgtgttgtttcatactcgtagtgtgcgtactacttttaacgtttttgcaagtttttggaaaggcatgggaaatgtgtttacttcagttgtaacattgattgtagcttcagaagttttctctaaaggactgattggtttgggatttattgattcattggtgggttattcctctcatatcggactttcgggattagctattgccgcaatctttactctcattatttttggagctgccatgctgatgggaagtggcaatgcagcctttttttcatttggtcctttattgccgggtatagccactcagcttggtttgccgattttttcattgatacttcctttgcagttggcggcaagcatgggacgtgccgcatctcctattgccggagtcattgttgccattgccggggtagccggtgtgtcatcagtggagttggcaaggcgtaatacatttcctttaataggaggaattgttttcttgatactttatcatcttatcactttctaaaattaatcgacagctatgtttacattgataaagaatgcaaatttatatgctcctgcctatcttggtaaaacagacattttgctatgcggagaaaagattgcgcatatttcaaagacaattgaactgaatgaatcattttgccatactattgacgtgcaaggtaaaattgttactccgggatttatagatcagcatgtacatattactggtggaggagggcaacaaggttatgcctcattagtccccgaggtgactatgagcgaactggtggcatgtggtactactactgtattgggtatgcttggtactgatggatttgccaaagaacttactacgctttatgccaaggccaaagctattgacgatgacggattgtcggcttatatgctgacaagttattacggattgcctaccaaaacattgatgaatagtgtggctgacgatcttatcttcatagataaagttattggctgtaagctggcgatgagtgatgaccgtagtccgtttccgacagagcaagagatattacgtattatacatcaggtacgtttagggggatttacatctggtaaaggaggaattctccacattcatttgggagcacttccggaaggtattgagcccttactcaatattgctcgtcactatcctacactgatatcttatctgtctcctactcatctgatacgtactgaagctctttttatgcaggctgtagaatttggtaaattaggtggaatgattgatttttcgactggtggctcaaagtttgatactccccatcgttgtgtgatacgtgcattgcgagctggtgtcccccttgatcgcattactttttctagtgatggccatggtggcgtacgcagagtgaatcctgaaactggagaaataacttatcgtcctgctcctttgaatttaaatttcaaggaggtagttgcattagtcaatgaggagggggtaccattggaacaggcgattacattgataacatccaatccggctcgtaatctgaaattacgagctaaaggtattgtggcacaaggagcagatgcagacttgtgttttttggcggaagatttgcagcttacagatgtcattgcccgtggtaaatttgtaatgcaagatggtacaatagtaaagaagggaaggtacgaattatgaagaagctgattatattttatattggattcctctgtatttgtttatctgcaatagcgaaacagactttggaaaggccaagaggtgaacatttcttcacttatagtcaataccctccttttgccgatcgcccggtagatgtacattattatataccttcccagggggatattaaacaaatgcctattgtatttgtctttgaaggaggagaccgcggctatcgttatcttttggacggttggaaagaagaagcggagagaaagggttttatgctttttatacctcactttgatttgaaatcttatcctttggcagactatcaggaggtgggggtgatgaatgctgcccatacagtagctaatgctcccgaaaaaattacaccagtgttggttgataaactatttgaatatgtgcgtcaatttacgggaagcatgcgcaaaggatatatgatttatggtcattctgctggtgggcaattcgtacagcgtttcatgctttttcacgatagtccttatgtggaaaaagctattataagttctcccggttggtatacttttcctgatttggcccagacatatccttatggtacggctggtatcccctatatttcatctgaacagataaaaaaatacttgtcaaaacctatcatactacagctggctttgggagatacgatacgtgagtcttttctacgcaagactcctgaagctgaacgacaaggacgaaaccgtatggagcgtgggcgtagtttctggctttatattcaccagttggctgcatcccgtggttgggaatgccattggcgcaagatagaagagtgcggcatcgggcatgaggctgtccctatggggaaacaagctgtgccattattgacgacagattctttacgggtactttttataggtaacagctatactttttttaatcgtttgccatggcaagtccaatcgttagcatcctcatgtggaaaaaaaatatcagtgcgccaggttgctaaccctggttggtacttgagacagcatgcagccaatacgcaaacattagaggcgattcgtgaaggaggatgggattatatggtgatgcaggaacagagcaaggcacctactcgtgaaaaggaatgggtaaagaagaatgtattccatcctgcggcgcagttagatagtttacgccgtctttatgccccaaaaggaaaaagtgtctgttatatgacatgggggcgtaataatgatacttatgaaggaatgcagcagcaacttacggaaaactatttggaaatggctgatgtccttgatgcttattgtgctcctgtgggtgaggcatggagacgtgtacgtagagagtgtccaagtttgcagttgtataattctgatggcagccatcctagtcctgcaggcagttatttggcggcttgtgtcttttatgcaattttttttggtgagccttttagcagcgattattatgcaggtctaccgtctgaaacggctctttatttacagaggatagcacaagaagtggtattagctaatcttgtgttatggaatagaaatcagtcgaagcaacctgccggagtaactgcaagtttctatcctgaccccaaatttgaccgtgagacacctactctaagtaaaccttacggtagcggattggcatcggttgatgagataaaggactatttacaacaattggttgtacgttctccgggtttggcatatatggagaatattggtgttaccaaacaaggacgtaccattccggtactttatttgggtactcccgacaagaagaaggtaagggtatggattcaagcggcactgcatggtaacgagccggcaggtgctgaggctgtatgcatgcttgtccgttacttactttgtgaaaaagaaggacgtgaattgctgaatcatatagctgtggctttggttcctatagccaatgttgatggttatgccattcagcaacgtcgttcggccgatggttacgatttgaatcgcgatcagagcaaattagaggatgctgtcactttgctgttgaagcagtcctatcagcaatggaatccggacgtagctcttgatattcatgaatatacacctttacgtcgtgagtttaacttattacgtggagtgccgacagcaaatgctgctgatgtactttttttacctacaggacatcttaatgcgcctttagctttacgtacgctgtctgaagaactttttcgtcgtgaggcagaggtcgttttaaatagtgccggttatgcttccggtttctactttactcctcgtgtggcagatggttcccttgttcttgtaaaaggtgccaaaagtccgcagtccagttctacttttcaagcattgacgggggctgtatcgctttttgtcgaaataagaggtattggattgggaccggagtgttttgcacgtcgtagtgagtgcggtttcttggtggcacggcaaacgttggttactgctgcgcaacatcgtgcttcaattaaacgtaagatagaacaagccaggaagcgcaccttgaaagctactgaaccgatatatgttactttcacttcggatactgtacgtcatgtagtctcttttatcgattataaggccaatgaactgtttaagactgaactgccaacccttgatgccatgcaggcaacacctcaattgatgcgtactcgccctaaggcttatctgctcgatgctccctgtacagaagcagtatgtaagcttcgagcgttgggtgtacacattgagcaagttacccgtgtacaaaaagcaaaagttgagcgttacaaagtaacccgtctgtatcgtgcagagaaggaatgggaggggattcatccggtaaatgtagaaacggatgtctatgaagataatgtagaacttccaataggtagttggttggtacctttggcacaacctttaggaaatttggttgccacgttgcttgaaccggagtctgtctgtggtttcgtaaacttctgtgttattccggctgaggaaggaaagggactgtttatcagtagacttataaaataagaattggatatataaaattaaattcggtaatgactatgaaactaaaaaaaacgctacagattatacttgctttatgtttaggcctatggatgatttcatgccagcaggaacatatcaagttgacctctccaaatggaaaactttctttagagtttacacttgatgaagaaggtgctccccgatattgtttaagacatgcggggaagaatattttacttccttcacgtctgggattggttttgaaggatgcgccagatcttttgactggtttcgttctaaaagaggttaagcatgattcgcataatgatgtgtggcaaccagtatggggggaagaggctgaaattgtaaatcattataatgaattgagggtatgcctcaaggaagaaacatcgttggagcgggaactgaatattatttttcgtctttttgatgatgggatgggattccggtatgagttcccgcgccagcaacagctacaagagtttcttattgatgacgaagtgactgaattcgtttttcctgcagattatgatgcttggagtattccagtgaaaggagttcgtttttacgaggccttatttgagaaaaaaactcttagtaagatgggatgggtaagcactccggtgacgattgagacaacagatagcctttatttggctattcatgaagcaaatcttacagattatgctgccatgaacttgaagccggttgaacaagttgaagataataaaacggttacattacgtgcggctcttacaccttggagtacaggtgagaaagtacgtgttaccgatacccgtgtatctccttggcgtacaatgatagtggctgaatctgccggtgatttgcttctttcccgtctcatgttaaatcttaatgaaccttgtcgtataaccgatacttcctggatacaacctatgcgctatattggaatttggtggacttatcacatgaagcataacacctggcatgccggtccccatcatggggccacaacagagaatacaatgcgtcacatcgattttgctgctgccaataacctgggaggtgtactggtggaagggtggaatgaagactgggctacttggaagtttagtttcacaaaaccttataccgattttgatatacaacgtattactgattatgggcgtagcaaaggagtagctttgataggacatcatgaaactggcggtaatgtttccaattatgaaaatcagatggaagatggtttcaagttctatgagaaatatggtgtgcatcaagtaaaaacgggttatgtgggcgatttgcttgatgggaaagaatatcatagcagtcagtttggtgtacttcattatcgcaaggtaatagaggctgctgcccgtcaccgtatctgtattgataatcatgaaccggtgattcctacaggtttgcagcgtacttttcctaatctgatgacacaagagggagtacgtggacaagaatgggacgcttgggatgtagatggtggaaatcctccctctcataccgtaatattgcctttcactcgtgggttggcaggcccgatggactttacaccggtgacgtttcggtttgttaacgatgtaatgccacagacacgtgtacataccacactggccaaacaattggcgctgtttgtggtgctctattcaccgttacaaatggcttcggatgaaatagagaattacgaggctaatccggaaccttttaattttatagtatcttgtcctacagattggagcagaacagtggtgccggaagcatgcattggcagttatgttactattgcccgttgtgataaaggagagggatactggtatataggcagtatcacgggagatgaggaacgaacggctaatatcagtctgtcttttctcgatacagataaaagatatctggctactatttatcgtgatgctcctgaggccgattatgagacatgtcctgctgctatacttatagaagagcgcgaagtgacttatagtgataccctcaccattcggcaagcacgtagtggaggaactgccgtacgtctgtgtcctataaaagacagttgagccggaggtatattggggcagagttgtttatattttctctctcaagtattcgtaaaagctatattgcgaccgtaccttctccttttgcggtcgcgacgacttccagcggtttcgcaaccggtcgtccacaaagcaggctttccgtttgtccgacagttgtatggatagcatatcgatgagctcttgcttcaagtccgggtccagaatgggggtgacggcttcgatacggcggtacaagttacgccgcatccagtccggcgagccgaggaagagcttgggtgcgccgccgttgccgaagtaccacacacgggcatgttccagaaaggtatccacgatgcgtgtcacgcggatgttgtggctgtactcctgcccggggatgaggcagcagatgccgcggacaatgaggtctatctctacaccggcttgcgaggcttcgtagaggcggtctatcatggcggggtcttgcagggcattcatttttaggataatccgtccttgcttgccttgccgggtcagttctatttcgtgattgatgaggcggttcagttcaggaatcaggttgaagcgggccacaagcaggcggtggaacactggattttcctttccctgcagagtacggaacaagttgtgcaggtcgtttacaatcaccgggttgcaggtgaatagtccgctgtccgcatagagggtggcggtcttttcgttgaagttgccggtgctgatgtaggcgtagcttgtcagtttgcgcccttccttgtcgcggcgtagcacgagggctactttggcatgtacctttagtcctggtatgctgaaaatgatgttgatgccggcggctttcatcatctcggcggtggcgaggttgttttcttcgtcgaagcgggctttcagttccacaaagacggtgactttctttccgttctgtgcggcggctattagggtgttgatgacggtggagttctctgccacgcgatactgggtcaccatgatttcacgcacggtgggttcgtggacggcttcatatagaaaatggatgaagtggtcgaaggagtggtagggataatgcagcagcaggtccttcttctccacatagcggaagatggattcgcgttcgtccaggcaggtcagcttcatgggctggggtttcttgatgggacgtacgctttggttgggattaggcagatgccgcaaatcctccatgttgaggtgcttgtctcccggcaccagctcccggcggtctatgcggtaggcatctaccagaaagtcgaggaagtcctggggcatggcgcggtcgtatacaaaacggcacacggcgcctatcttgcgtttctttaccttcttcttcacctgctcgatgatttcggaggtattggcggcatcgtctatcagaatatccgcatcgcgtgaaatcttgatgcaataactgctgtccacttcataaccggggaagatggtatccagattggccttgatgatgtcttcaatgaacatcagataatagtctttccccaccttgggcagctggatgaagcgcggcactttgctgtacggcagtttcatcacgaaatactggatgcggtttggagaactggcgggagctcctttcagatgaagccgtacggctagatagagacggttgtcgcgcaggaatgaaatcaccttgtccttgcttacgggcaccggggccagataggggaatatctcttcgcggaagaagctgcgcacaaagtcgcggtgaaacggttctacgttgcggctttgatagaatatgatgtgatgtttccgcagggcgggcagtatcttctgttcgtagatgcggatacgttcctccagttggcgattgacttcttggttgatttcatctaccagttcggcggcagactgcatagtctcttcatcgctttgcgaggctccggtggctatggccttatggtcggctacgcgtatcttgtagaattcttccagattggaagagtatatagaaataaagttgatgcgttcgtatagcggcaatgtctcgtcttccgcttccagcagtacgcggtagttgaaggaaagccagctgatgtcacgtttgaaatatctgttgtccatggtgttaaggtgttaatgtggcatattagcacattaccacattgtattcttcccaaatataattacctttgtcttaataaacaaaggaaagatgacaaaagttggtttattatcggatacgcatggctactgggatgaaaagtacctgcaatattttgagggctgtgacgaaatatggcatgccggtgacatcggttcgctggaagtggcacagaagctggcggctttccgtcccttccgtgccgtgtatggcaatattgacgggcaggagatacggcagctctatccgcagattctccgtttcacggtggatggggcggaggtgctgatgaagcatatcggcggttatcccggcaactacgacccttccatcaagggcagcattctggtgcgtcccccaaagctgttcatcagcgggcactcgcatatactgaaggtgaagtatgacaagacgttggatgtactccacatcaatccgggcgctgcgggcattcaaggtttccataaggtgcgtacgatggtacgctttgcggttgatgggggaacgtttaaagatttggaggtgatagaacttgctgaccgatgatgtagtttgtttattttcaatggattgtatttaccgattgcttgcgctatagtgtaaaagccgttacatgctaatgtaaaggttgttacgctattgggtaaaggccgttacactatttggtaaaggtcgttacacgctgaggtaaagaccgtttcatcaaggggtgacggccgttacgcactgaagtatgtcttttcctgatttagctagacgctttttctttttataaccgatatcagtagacggttcttggaatgtt

SEQ ID NO: 4403 - DNA, 71222 bp, Unknown
  gut microbiota DNA sequence
agaaataatagccgaattcaacaagcaacaaaaagcccgccaccttaatggagacgggcttgaaaagtagctccgaggggaatcgaacccctatctaaaatttaggaaattcttgttctatccgttgaactacagagcctcaactgataatcagcggaatatgtagaatatttatagaacttctacactatttttacacgacgcaagctgattacggatgcaaagataatgtattctgccgattttccgaaaaaagttttgttaatccgattaactttccgaaatttgctgcctatgtaaacggaatagtaatcctcaaataatctatagtaattcgtaagttatggcaaacgacatgatggtcaaagaactggagcaagtggtagtccgcttctccggagactccggcgatggtatgcagctcgccggcaacatcttttcaacagtttcggctaccgtgggcaatgatatcagtacattccccgactatccggcagatatccgcgccccgcaaggctcactcaccggtgtttccggttttcaggtacatatcggtgcagagaaagtctataccccaggtgacaaatgcgacgtattggtagcgatgaacgccgccgcactgaaaacccaatataagtttgctaaatccactgcttgtatcatcatcgatacagatgctttccagaagtcagacttggaaaaggccgctttcaagaccgataatccgatagaggaaatgggtattaagcaggatgtcatcgccgcccccatctcgaagatggtgaaagactgccttgccgacaccggaatggacaacaagtccatgctgaaatgccgcaatatgtttgcagtaggcctggtatgctggctgttcaaccgcgatctgaaaatagccgaagatttcatccgcgagaaattcgccaaaaagcccgaaattgccggagcaaatatcaaggtcatccatgcaggatatgactacggacacaacacccatgcttccgtagcccatacatataagattgaaagtaagactaccgttcccggcagatacatggatatcacggggaacaaagcaactgcttacggtttcatcgccgcagctgaaaaggctggcttgaagctgttcctcggctcctatcccattactccggcaaccgatgtactgcacgaactctccaagcacaagtctctgggcgtgatgaccgtgcaatgcgaagacgagatttccggttgcgccacttctatcggcgccgcttttgcaggtgcgctggctgtgacctccacttccggtcccggtgtctgcctgaaatcggaagctatgaacctggcagtcattacagaacttccgctggttgtgctcgacgtgcaacgtggcggtccttctaccggtctgcccaccaagtcagagcagacagacttgttgcaggcattgttcggccgcaacggtgaaagcccaatgcccgtcatcgccgcctcttcacccacaagctgtttcgacgcagcctacatggcaagcaaaattgcactggagcacatgaccccggtcgtattgctgaccgacggctttgttgccaatggctccggcgcctggaagctgcccaaactggcagactatcccgccatcacccctccctacgtgacttccgaaatgaaggacaactatactccgtacaaacgcaatcccgaaacaggtgtccgctattgggccatccccggacaagaaggctatatgcacatcctcggcggtctggagaaagacagcaataccggtgccatctccaccgatcccgaaaaccatgacttgatgtgccacctgcgtgccgagaaggttgccaaaatccccgtacctgatgtagaagtgcaaggctgtgcagacgatgccgatttgctgattgtcggtttcggcggtacatacggccacttgtattcggccatggaagagatgaacaaggcaggcaagaaggttgccctcgcccacttcacttatctgaatccgctccccaagaacacggaaaccgttctgaagaagtacaagaaggtggtagttgccgaacagaatctcggacaatttgcaggttatctacgtatgaagatagacaacttcaccccgtaccagttcaacgaagtcaaaggacaaccgttcgtcgttgccgagctggtcgcagcgttcaataaattaattgataattgacagttgacaattgataataaccatgcgtaatatgcggattatcaatgaccagccaccaattatcaactatcaattatcaactatcaattaaaaaagattatgtgcgaatatacagcaaaagactataaaaaaggacaaccccgttggtgtccgggttgtggtgaccacttctttctggcttcactgcacaaagcaatggcagaaatcggcaaagctccttgggagaatgccgtcatctcaggtatcggctgctccagccgtctgccctattacatgaatacgtatgcgatgcagaccatccacggacgtgctgctgccatctctacaggtgccaaggttgccaatcccaacctgacggtatggcaaatctccggcgacggtgacggtctggccatcggcggtaatcacttcatccacgccgtacgccgtaacatcgacctgaacatgattctgctgaacaaccgcatctacggtctgaccaaaggtcaatattctccgacctctccacgtggtttcgtcagcaagtcgtctccctatggtacggtagaagatccattccacccggcagagctttgcttcggtgcccgcggccgtttctttgcccgcgcggtagctaccgatgctccggggacagtggaaatattgaaggcagccatggctcacaaaggggcttccgtttgcgagattctgcaaaactgcgttatcttcaataacggtacgcatgactccgtagccaaaaaggaagaccgcgccaagaatgccatctacttgaaacacggcgaaccgatgctcttcggcgagaacaacgaatacggactgatgcaggaaggctttggtctaaaagtcgtgaaactcggtgagaacggcattacagagaaggatatcctcatccacgatgcccactgcatggacaacaccctgcaactgaagcttgccctgatggaaggtcccgacttcccgattgcactcggtgttatccgcgatgtggaagctcctacttacgacgatgctgttcatgaacaaatcgaagaggtgtctgccaagaagaagtatcacaacttcgaggagttattgatgacgaatgatacgtgggaagtaaaataaaccactaagatttattaatatcatgtttgcacgaaacaaataaggtgcaaacatgatattaatttcctaaaagtaagagtacctccctatcctttctctcccaaacatagatacttattacgccaaacatgcagttcttccatcaagaataactatatttgccacagtaaccatagtagtcacattttgaaagtaattctctgatttatactggcttaatatcaatctcacaaaccgcaggctgatagctctttcgttcgagtaatccttcccggataaaggtcaaaaacactcccaccctgaaaaaaaatgcaaccactgcaactgcaccagattttattgtagtgatagagcatacctccgatgaacaaggctaccaataagggtcgacaacaagacttcaagggaagagagggaaattgtggaatacctactgtggattttttccacatctccacaccacaaacacccgaacttccctttttcccgatagaaaataagcaattgattatcaacattattcatccttaaaaggatagtctgcctttcgtttggcatacctcttgctaaaatatctgccgaaaggacgtaacatttataataagataaatcaattatttttcagtagtatgaaaatcaggatgagaaaacggtgtgacattccacattcagcgtcgcacttccaaaaaagtttgattattgcaagttggttattaacatttcttttcaccggaacagcctttgcacaagagaaccgaaccattacaggcattgtaagagatgtaacgggagaaccgcttatcggtgccagcgtcatacagaaaggcaccaacaacggcgtcattaccgatgtggacggcaacttcacactgaccgttcctgcagatgcaacactctctatcgcttacatgggctatgctactcgggagataaacctggcaaaacgaaaaaagcaaggcgacctgaagattacactcagcgaagatacccagcaactgaaagaagtcgtagtaacggcaatgggtatcaaaaaagacacgaaacgtgtcggctatgccatcagtaccatcagtgcagacgaattggtaaaggcaggagcacccaactttgcctctgccatgtacggtaaagcaccgggagtccgcatcacacagacacaaggcggttctgccggagctgtctccatcaacgtacgcggactgacttccatcactggaaataaccagccactcatcattctggacggtgtacccatccgcaacggcggcacgggtaaaagcacggacttcgccgaatttggcaacgacggacaaatccgttccaatggtctggtagacatcaacccagaggacatcgagagcctcagtattctgaaaggagcttccgccacagctctctacggctcggaggctgcaaacggtgcggtagtcatcactagcaagcgcgccaaaagcggcaagctgacggtggacttcaatgcccaagtcatggcaaacttaccggcttatctaccaaaagtacagaccgtatacgggccgggaacctacaacaccgcatacagcgattatgagaaacagacgggaggcttctatcagagaaccctaaacggacaaagctacaaaagcctccgttccaccaccttgtccttcggcccgaaatacgacggcagcgaggtactttactgggacgggaagatgcgcccctaccaggcactgaccgacaacccgtggaaagagttgtttcgcaccggctggacccagacttacaatctcgccatctcacaagggacggaaaccaccagcaaccgcttctcctacacattcatggacgagattcccaatgccctgaccggaagcttcaccaaacacaacttcaagctgaccggttcgtatcaactggcgaaaccgctgaaactggaatactcccttaactacatcgtacagaatgtagaagaccgcccgcaaacctcgctcaacctatacagcggtttcggcaacatgttctccaccttcctggacattccctatctgaaacaaagttacgtcaccagtctgggataccgtaatacctttgtcggaggaaacgccacgctgactcctgaggaatcatgggcctacgaccccagttacgccaccggagtgaacaacatgctgtggaatatgtaccatcaccatagcgacgagacagagaaccggctcatcggtatgattcgccccacctggcagataaccaactggctgagtctgcgcgcccaggtttcaactgatatcacagatgtgaagcaaacactgaaatatgaaagcgaacaacccaattccctatacgaccccaacggtagcttccagtccatcaaccgccgttacgacattgtctatggagatgttatgttgaacttcaactataatatcaaccgcttcgacattgccgccaccgtaggctggaccggacgctacgaaaatatgaacaatatgagggtctccaccaatggcgggcttgtcacggaaaactggttcgacctcaatgccagccgctacacgccaagcagtaccctgcaacgtatggaactactgaaaaccggatatatgggtacactgagcctgggatgggacaactatctattccttgaactgaccggacgccaggaacgatcgtctaccctaaaagaccagagttttttctatccttccgctaatctgagttttctcttcacccaagccttccacatgccgtcatggtggaactatggaaaactgcgcctctcatacggtatcgtaggaaatgctcctgaaacctataccgccaatatcgtctacgagcaaggttcggacaacggattcacctggaacaccattccctcttcatgggggaatgcagatatccgtccggaaaagaaatacgaatacgagataggtctggaaagcaagtttttaaacaaccggttgggtatagatatatcctactacaacaaccgtgtaaaggaccagatactctccacgccgcaaccttccacatcaggcgtaaagaatgtgttgatgaatgtgggtgaggtagccaaccgcggctgggatatatcaatcagtgccactcccatactgaccagagatttccgctgggacctgacagccaactatggtgtatataagaacaaagtggtgaaactggccgatggagtgccctatctggaaatactcaactccggaggcagcggaataaaaatacaagctgtggaaggccagccaatgggtgacatctatgcacaggttccccaggtgaacgaaaacggtgagtacctcgtttccgataaaggtctttacctcaaccaaactgaattgcagaaagtcggcaacatcaatccggcaggcgtaggaggtctattcaactctttctcctacaagaatgtattcctcgatttcagtatcgacttccgcatcggaggggatgtcatcaacgaaatgaaccaatatgccaccgcagtgggtctgacacccgaatccctgaagtaccgtgatacggaacacggcggactatcctattactatccgggcgacaacaattccagcggaattccggtacaagtagacccttccacgggtgccggccccaacggagagataatctaccacgacggcatcattcttccgggtgtagtggcctccactggcgaaagaaacacacgtatcattccggcaggctattactacaacaccacctataattggggaacggaggccgaacagctgacataccgccattcggtattcgacaattcttatgtcaaactgcgtgaattgaccatcggctaccaatttcccgaaaagatgatctccaaactgggactgggccggctgagtgtgtcggtcttcggacgtaatctcttctacttctacaaagcactgaaaaactacgatgcggagtcgtccgtcggaacatcctgggccaaccaggctaccgtgggaagttctaccacagctacccgcagtttcggtgtttcacttcgtgcaagtttctgacaaaacaaccatccaaaaaacaacaaagagtatgaaaaagacaaagatattatctcttgtttcattgggagcattcctcttgacaacatcaggctgtacggattatgacttcgacagcaaatacgaagacccctccaaagtaacccaagtcaccatcagtaatctgatggtaggagtcttccaaaaagtaaaggactatgatgtttacgaatacaaccggttcttcggattcgattcacagtttacgggcaagtatgcacaaaccttcggctactccaacactacggatatgtatacccccggctatatacccgctattgacggacagtgggacaatgtgtattcggcactggcccagttccgcaagctggaatctctctacgaggaagaaagcgcggcagaacaagcccaggacgaggcattctatcttgccgccaaagtacagttgtacgatttctttgccgccacagtggacgttttcggggatatgcctttctcggaagcttgtacgctgccgcttaccaacgatgtaggtaaatcgtatgctcattatgacaaggccgaggatatttataaaaccattcttgatgagctcaaagaaattgctccgcggttccgctccatccccacaccgaggaacttcaatacacaagactttatcaacaacggggacatggacaaatgggaacgctatgcaaactccttgcgactgcgccttgccatgcgcgtagccgcgcaaggagacttgcaggcggaaggccgtaccgccatcaaggaaatcctggaaaatccgtcagcctatccgttgatagaggaacaagaaaacaacattctcattgtcaaccagaagtctgggcaactgaacttcaccgcaggccacggactgggtgactgggtaactaaccgacttgcttcgggcgccatcatcgaccgcatgctgggccatggcaactatgatatgaccagcaatgacccactgagcggcgtttatgtgaaaggagaagacgacccgcgcatcctgctcaacttcaatcccgtgaagattaccaaccaaaacaccggtcaattggacgaacaccgttatctgggcacagaccttaccgtggcagatgagctgacggaatattacaactcgcaggcacaagacgaagtcaataccagcaacaccggtttctcacaaatcacgcagaaaggtttcttttgggaaaacgataaattcgacatgctgataatggcctcacccgaaatccatttcctgaaagcggaatcctatgaaatggggtatggagtggcaaagaatgaagcaaaagcggaagaagagttcaaaaaggctgtcagccagtccatcacgctttactactattacgactcggtaagtacgggtgaaaacgcacgccggtataatgcccccactgccgaagaaacagcctctttcgctgctgccaaatggaacagcacggaatatgcagacaagctggatgctatcattacccaaaagtggctgcatttcggtttcctagccagtcgtgaggcatggagtgatatccgacgtaccggctatccgtccggcctggccttccccgaagtggccggtaccatcacaaatgtgccgaaccgctggagatacccgaatacggaagtcaactacaatccctactataaagaggtgtcagccgaagacacttactaccacaaactgttctgggcaaaataaggactttgttcgcaaacccattttgcccgaagagtatatcatactcaccacagaataacacggattaacacagattgccttaggagttctgataataaagagcttttagcagtgttaatccgtgttatcctgtggtgagtatgtatttgccccctctgtttcttttattccgaacagtatccctccttttttagaaatcttaaggatttcccggtagggagattgcgggaaaccactgtctttaatgaacgacggacaaacatcgcttccgcaaaaactgaactataacataacggactaaatgaaaaagtatccaaatgacttgattggcgacatcatgaaagccttcggcaaatatgccgaccgaccggcattcgtcatcgaagacacggcctgcacttatggagagctggcaacttgcgtacagaaaatatcctccctattcaaggacagagaagacaaaattatcggcatcgtcgcagaaaacagactggaaacatacgcatccatactatctgcactgatttgcggaaagacatacgtcatcctgcatccttcctaccccaaacataggaacgacagaattgccgactcggcaggcattcgcctcgtgctgcataccgagaatatccatgtcttgaacctcgacacccggaatctggaactgatatgtacctccgaaatagagcaggcagagaactccgccacgttccatgccgcagaagacatcctccatacggcagaagaggaaaatgcctacatcatctttacctccggaagcacgggcgaacccaaaggagtacccatctcccgccgtaacctgaatgctttctataccgcctaccaccgcctcggctggcaactggacgagaacgaccggatgctgcagatgttcgaactcacttttgacgtttccatcgtatcctttctatatccgctgacgctgggtgcttgcatatacaccgtttctccggaaggcgtgaaatacatcaacgtaattgaaactctggaaaaatacgacctgaccttcgctgccgtggccccttcactgctccagctgctacgtccctattttccggagatacacctccccgcacttagatatctagtggttactgccgaggcttctgacgcggagctgttggatgctttcagaaaatgtgtccccaatgcctctttcataaacctatacggaccgacagagggaaccatctactgcactgcctaccggatacccgtcacctcctgcaagcatcacaacggcatgaccgctatcggaaggcctttcgaaggcatcgatgccctaattatggataacgacggtcgcccgctgcctaccggagaaaccggcgaactatggattagcggcaatcaagtgatgggtggatactggaatgctcccgaaaaaaacggggaatgcctcgtagagaccgccaatggaaaagtatactacaagacgggagacctctgccggatggatgccgacggtgacatcatctattgcggacgaaaagactcacagataaagatacaaggatttcgcatcgagctgagcgagattgaacatgtggcaaaaaactttttcaacggtgaatgccgtgtagtcgtcattcccaaatacgacaacggcaatcagtgcgaactacatctcgtcgtagagaagaaacagctcgacaaacagcagatggaggaatatctgtatagcaggcttccctactacatgattcccaagcatatgcattgcctggaacagtttccgctgaacaccagtagcaaaacagacagaaagaaaatacaagaactaatttaaacttgacaatggatacacagactattttgaatgaaatgagcctcatctttcgggaggtactgaaaagagagaacattgtacttgacaatgagaccaccgcccaggatgtggaaggatgggattcactgaccaacatgcaactgataaacaagatagagaagaaattcaatgtacgcttcaccttcagagatattgtaaaactcaaaaacgtgggagacatctgccatgccattttaaccaaaaccaactaggaaatgtcattcatatccctgaacttcgtcgtactgtttgcatgtactttcattctataccatacgcttccttcacgattcagaaaagcgaccttactgacagccagctgcctcttcataggcttctaccacctcacttttctgataacggccctcatcctcacgcttaccaccttctaccttggcaaatggataggacagaccaagcgggaaagcagcatgaagggaacttatttttcaggtgtgtgttttctggtcgtgagctggttggcattccggtatgccgaccggcttacagactgccacatcctttttccgctgggaatctctttctatactttccaggccatttcgtacctgacagaaatctattggcaagaagaagaaccggaaaagagcctgcccgacttcatgatatacatgctcttcttcatgaagttcctttccggtcccatagaaagggcaggtgacatgctcccccaactgaagtcctgcaaagctacggactatgcatccatggtctacggaatgagactgattgtcgtgggactgataaagaaactgatactggccgactccatcgccccatacatagacggtgtcttcgggtcggtatacacagcctcaggcgtgcaattgctgatggcatgcctcctatatccgatagagctgtatgccgacttctccggatataccgacatcgcattgggaggagcgcgcatgctgggattcaagctcagcccaaacttcaaccggccgttcattgcgcagaccactgccgacttctggcgccgatggcacatgtcgctttcattctgggtacgcgactatctgtacctcccgttgtcctcgagcctgcgtggatggggacaatggggcgtatttctaagtctggcgctgaccttcacgggactgggtatctggcatggtgccggatggaactttgctgtctacggactaattcaaggtgtcatcatcttctacgagatgaagaccacgacatttcaccgcagactgaaagcccaattggggagccgcttatatgccacactatccgtcgtaaggacctacctgctttttgccgtctctctgatattcttccgagcgggctccatggccgaagcgttccactacatcagccacctctccttcgatgtgcattacagctggaaggaaatgaacatcggaatgccggaccacaacagcattgtggcaggaagcgcactcgtactgatattggtttacgaatatttcatgtccaagcatgatttgctggaagccttcggacgacagccggcagccgtaagatggagtatctattatctgctcgccataatactcttcacactgggacagttcaactcggacagcttcatatatttacaattttgacaataaagacacatgatgaagaaaaacagcgaacgaaacgcagccatacgtttcatgaaaaagctatttatcctttttatcccttttatagccctactggcagtctatttcctggacgaccctttcatggtcctgaagaactatgaacgatacgaccaaaccccggttgtactaaacgaagggcacgtggggtggcagatgtatctgaacaaccgggatactatccccatcgactcctatatcatgggaaactcctgcactatggcttatcaatgccatgaatgggaaaaatacctccacggtggaagagccgtacggttattcggaaatgccgaaagccttgccgccgtctgcctgaagctgaaggcactggacaaggcaggtgcaacaatcaagaacctgctgctgattatcgacaaggaatcattgcacaacgaccgctgcctgaccggacattccaacattctgccgcccgccatatcgggaataagcaacttcaagttccagaaggaattctgccaagccttcttctacccgaactttctcctcccctatctggactacaagctgttccacacctatcgcccttacatgaaaggggtgataaatccctatggctccacccgaaacccggtaaccaatgatgtgctgaatcccagggaggaaatgataaaggaagagggagataagtactgggaaaaccggaaaggagaattcaccaaagagaaaatgaagaattatagagacgggaaataccgggaagccccccaagtgctcagggaaaaacaagtcagcttgttgcaggaaataaagtggatttgccggaagcatgataccgatgtgaaaatcattatcagtcccgactacctgcaggtcaacataagccctgccgacgtaaagacactgaagcgcttcttcggaaaacggaatgtatttgatttcaccggtatcaacgaatacacggaagacatccacaattattatgaaccgggtcattataggcccgcacttgggaaaaggctgatggaaaagatatatgaaccttatatcttgtcaccgaacgccaaatctccggcatctcccagcccgggaacgatataggaatgctcgttcatctccgggtcgattgctgcacaccacaaggtcacttcatctccagggaacagcttttccagatgctctacgccctgctggctggctatgacacaagctatctgcaacttggctggcatccccttcgtaatgaaggccttccaggccaattccatactttctcccgtggcaagcatcgggtctacaatcaataatgtcttcttggacaaatccggagtagcgatgtattcgatgtgtacatccaccgtgcggcattccttatccttataataacggtaagcggaaacaaaagcattcccggcatggtcgaacatattcaaaaacccagtatgcaagggcagcccagcacggaaaacagtggcaatcaccacctcgtcatcgggtgtgctgaccgacgccactcccaagggagtctgtacctgcttgacagaatacgtcagttccttactcatttcatacgccattatctctccaatgcgttcaatattacggcggaaacgcatacggtcgccctggactgctacatcacgaatttctgccacgtattggttcaagacagaatttgtctcggcaaagttgataaccttcataattatagaatgttttgatgtgcaaagtaaacgaatttcacccaatttgcaacattcagttagcagatattgttatggttttataaaagatttcctattagagaaaaatttctctaatagagcttttctttaaaaagaaagtattacttttgtaggcgaaaaacaagggacctgctgaaaagcaggaaaaaaagagcttttctacacccgtttttccttgtaaatcaaaggtaaaagagattaaggaaagagattataaaccaaataccaacattttaaatcattaaaagaaatggcaaatttagatttaagcaagtacggtatccaagacgtgaaggaaattatccacaacccgtcttacgatgtactgttcgcagaagaaaccaaaccaggtttggaaggttttgaaaaaggtcaggtaactgaactgggtgctgtaaatgtaatgacaggtatctataccggtcgttctcctaaagataaattcttcgtaatgaatgaagccagcaaggattctgtatggtggacttctgaagaatacaaaaacgacaacaaaccttgctctgaagaagcttgggctgacctaaaggctaaggctgtaaaggaattgagcggcaagcgtctgttcgttgttgatactttctgtggcgccaaccccgctactcgtatgaaagtacgtttcatcatggaagtggcatggcaggctcacttcgtaactaacatgttcatccgcccgactgctgaagaactggctaactacggagaacccgatttcgtatcattcaacgcttctaaggcaaaagttgacaactacaaggaactgggtctgaactctgaaacagctactgtattcaacttgaagaccaacgaacaggttatcttgaacacttggtacggtggtgaaatgaagaagggtatgttctctatcatgaactacaagaacccgttgcgtggtatcgcttctatgcactgctctgccaacactaacatggaaggtactgactctgctatcttcttcggtctgtccggtactggtaagactaccttgtcaactgacccgaaacgtctgttgatcggtgacgacgaacacggatgggatgacgaaggtgtattcaactacgaaggtggttgctatgctaaggttatcaacctggataaagaaagcgaacccgatatctacgctgccatcaagcgtgacgctctgttggagaatgttacagtagctgctgacggtaagattgacttcgctgacaagagcgtaactgaaaacactcgtgtttcttatcctatctaccacatcaataacatcgttaagccggtttccaagggtcctcacgctcaccaggtaattttcttgtctgccgacgcattcggtgtattacctccggtatctatcctgaaccctgaacaagctcagtactacttcttgtctggctttactgctaagttggctggtacagaacgtggtatcactgaaccgactccgacattctctgcttgcttcggtgctgctttcctgagcctgcatcctactaaatatgcagaagaattggttaagaagatgaacaaggttggtgctaaggcatacttggttaacactggttggaacggtagcggcaaacgtatctctatcaaagatactcgtggtatcatcgacgctatcctcgacggttctatcgacaaggctccgacgaaggttattcctttcttcgacttcgtggttcctactgaattgcctaatgtagatccgaagattcttgatcctcgcgatacttacgaatgcgcttgccaatgggaagaaaaagcaaaagacctggctggccgcttcatcaagaacttcgctaagttcactggcaacgaagcaggtaaggctctggttgctgctggtccgaagctctaatctgacaataaagttagaaacatatggaaaaggtatctcctccgggagatgccttttttcttttttaatatctctatctcattgataatccgaaagttttagtagttttgcagaaaccattattcaaataaagcaatatgaaaagtatcagattgatgttggcaggcgcaagtttgttgctgttctgcagttgcggtgcccaagtccagaaagagacccaagttgccaatgcaaatgaaagcaaagagaatgcggtgattgaaaccatcatgtcacgccgcagcatccgccagtacaaaccgcaagccgtgaatcgcgacaccatgcagattatcctggattgcggtatcaatgcacccaacggccagaacaagcaatcgtgggaagtgcgtgtagtggataacccggatttcatcaacggcattacggaaatctacaagaaggaaaatcccaaagccgccgaagacccgaaattcaagaacatgtttcgcaacgcttctacagtagtatttattgccaatgacccgtcttatgacctttcgcagattgactgcggactgctgggtgagaatatgattctatcagcctggtccatgggaatcggttcttgctgcttgggcggtcccacgcgcttcatgacctctactccggctgctgccgaatacctgaagaaactggatattccggaaggctatcagctactttactgtatcgctttcggctatccggacgaaacgcccgctgccaaaccccgtaatgcggcaaaggtaaaattcatcgattgactttcgtttgaatgacgacaataaaaaggagtgcctcacctttcggcggggcactcctttcatatataacaactaaaactcttctgtttatcagttcttgtttgcgcgtttacgctcaagctcatcgaggataaccttacgcatacgcattgatttaggagtaacttccacatattcatcctccttgatgtactccagtgcctcctcaagagagaactgtacgggaggaatcagacgtgccttgtcatccgaaccactggcacgcatattggtaagcttcttggacttcgttacattaatcaccaagtcgttgtcatgggaatgctcgcccactacttggcctgcataaacctcttcctgcgggaaaatgaagaatttgccgcggtcctgcaacttgtcaatggcataggcaaaagccgtaccggactccatggcaatcatagaaccgttggtacgccgttcaatctcacccttatacggttgatattccttaaaacggtgtgccatgatagcctcgccggcagaagcggtcaacacattggtacgcagaccgatgataccgcgcgacggcatgtcgaactcaagatttacacgttcgccggcactttccatcttcaccatttcacctttacgacgggtcaccatatcaatcatcttgctggcatattcttcgggaacattgatggtaagctcttcaataggttcgcatttcacgccgtcaatctccttgaagattacctgcggttgccctacctgcaactcatacccttcacgacgcatggtctcaatcagtacggaaagatgaagcacgccacggccggaaacaatccacttgccgtcttcctcgctcttgcgcacgcgaagtgcaagattcttatccaactccttcatcaaacggtcgtggatgtggcgggaagtaacaaacttaccttccttaccgaagaacggagagtcattaatggtgaagagcatactcatcgtaggttcatcaatggcaataggcggcaacgcttccggattttcgtaatcgcagaccgtatctccgatttcgaatccttcgatacctaccaacgcacagatgtcaccggaagacacttcctgcacctttacacggcccataccttcgaatgtatgcaattccttgatttttgatttcacgatactcccgtcacgctttgccaaagacacattcatgccttctttcaatatgccacggtgtacgcggcccacagcaatacgcccggtatacgaagaataatccagcgaagtaaccagcatttgcggtgtaccctccaactgttcgggggcaggaatattctccaagatacagtccagaagcggataaatgttatcagtcggctgctgccagtcggtactcatccaattattcttggcagaaccgtagataacggggaaatccagctggtcctcggttgcattcaggctgaacatcaagtcgaacaccatctcgtacacttcttcgggacggcaatttggcttatccaccttattcacaacaacgataggtttcagaccaatctgcagagctttctgcaatacaaaccgtgtctgcggcataggaccttcgaaagcatccacaagcagaatgcatccatccgccatattcaatacacgttccacttcacctccgaagtcactgtgtcccggagtatcaataatgttaatcttggtgtctttgtagttgatagaaacgttctttgagagaatcgttatacctcgttcacgctccaggtcattgttatccaacattaattcacctgtgctctggttgctgcggaaaaggtttccggccaaaagcatcttgtcaacgagcgtcgttttcccatggtccacatgggcaataattgcaatgtttctaatcttttgcatataatacctattattttcaagcgacaaagttagtgattttggattagatatgcagtatagatatgatttttttgctgaatatcattgtgatataaaagtttatccctatctttgcagccccgaaagggaatatttataataacttttaattaaacattatgtatttagacgctgctaaaaagcaagaaatcttcggcaaatacggaaagtctaacactgatactggctcagctgaggctcagatagctttgttttcctaccgtattgctcgtctgactgagcaccttaagctcaacagaaaggattatagtacagaaagagctttgactatgttggtaggtaaacgccgtgcgttgctgacttatctgaaggaccgcgacatcaccagatatcgtgctatcgtcaaagaactcggcttgcgtaagtaatctacttgcggcaaaaccatcaaaaaaggaagttttccaaaaggaaacttccttttttgtttataatccgatttatacctaattttgtatccatgaaaagaaaagtatcagcagcaaatctttcgatagcaatcacttttctattgatactgctatcattcggcttcggttatcgcagctattcgcaggcagaacaacgtgtggtctctgacctgaaccaggcactgcaacgcacagtattgcagaacaagggattatggttgaatgcggacacaatccagacttatgccaaactacaagaagtgataggtgcccccgtttctgtaaacggttcccacagagcctttaccgaagcattgtccatcaccggattgaaagatgtctctaccctttcgctgcatatactgaaaaagaactctcccgccaccgtattcaatgagattcctgccggatgtcttgccagcgacacattggtatggctctccaccacagccgatgcatctggactgacactttccttccggggatatgcccgttgctcagctaccatgctgttcagcttatccaagcagacaattccggcaacattgctattggccgccctgctgtggggaggattcacctttttctatttccgtcggcgcacaaagactaatgccagtaacgggcagcaacaagaaaacttcattaccttcggcaacctttcgctttccctccaggaagcctgcttctataacgaacagcaggaaaagctaaaactcacccccatgcagtacacactgatggagatgttctacctttcttcctcacacctacttttcaaatccgacatctgccaatcgctatggccgggaaaagacaatgcagacgaaacgctttacacattgatacggcgtctgaagcccattgtcgaggataacagcaacctcagaataacaacagatcgtggccgcgcctacggactggaaataaaaacctaaacattatagaatcatgaagactaacaaacttatcctattagggctaatctgcctgactgtcgcaatgccgacaaccgcccaaaaccgtaacgaaaagaaagagcgcactgaacgtgctgtaaaagaagctattgctgctaaacaatacaaaatcaacgtagatcggatgcaaccgatgagaggcggtagccgtaacttgaccaccaactacacactggaaatcagaaacgactccgttttctcttacctgccttactttggagtggcctacaatgctccgtatggaggaggcaagagcctgaatttcaatgcatccatcaccggatacacaaccagagcactcaaaaaaggcaaaatccaaatagacttcaagacccgtagtgatgaagacaattatgagtaccgcctcaccatctttcccgatggttctaccagtatccatgtgcaacccatgaacaaacagtccatctcgttcaccggagagatggatacagaaaagtaatcatcttccccctttaaaaggacaaaagaaagtattgtcagtctattgtcaggcaaatgtcagacaactatccgctttttgtttcttccatcccggcagaaagcggataccttcgtgtcccgaaatcaaacaacaaccggaacatgaaacagataatatgtattcttgccctgctcctaatgagcgtcacgacaacaaaagcacaaaccagcccggcaacaccctccatccgaggtaaaattctcacagaggaaaagcaaccgataaagtttgccaacatcgccctcctttccgaagattccaccttcatacaaggaacgtgtagccgaagcgacggtagttttgaacttctccctcccgctcccggaaactatctactacaagtttcttccatcggttacaaagccctttgccagccttgccccaccgggagtacccacaactggatattgcaaaccgatgccgtgctacttgcggaaaccgtcatcaccgccgcccgccccgttttccgactaaagggcggaaagttggagacaagcgtacggcaaaccctgctcgcatccttgaatgatgccaacgacgtattgaaacatatccccggactacgctcctctgatgaggggtataccgtttttggcaaagggacaccggtcatctatatagacaaccgccttctacaagacaactccgagctgcaacgcctctctgccgccgatattgaaaaagtggagctcatcaccaacccgggtgcagagtacgatgctaccgttaaagccgttgtacgcatacgcaccgtacgtaacaaaagagacagttttggcggtaatttccgtgcaggaatcacccaacggagacgcaacagccattacggacaagtcaatctgaattatcagaagaaaggactgtccctgctgggcatgctgtacaccaattatgaaaacagaaaacgccaccaggaggttcgctaccagataccgtccgaaatacaatgggatgtaaataaccgggttcacttatataataagggactacttgccggaggaaaagcaagcgccagttacgacttcaccccccaacacagcctcggtgcctcctatgagtttcatcgtacccccgattatcacagcagtgaccattcggcatataccgtccgggcaaatgaagaattggccgatcataccatacattcctcccaaaacttgcagcaaaccaaccggcaccagctgaatgcctactatcagggcagcataaagcaactccacataaacttcaacaccgacctggtatacggaaaaagttataatcaccaggaggctaaagaagaaagccagaccgaaggcaatcgcgacatcagctctttcaaccacgccgacaaccgcctttatgccgccaagttgattctgacccatcccctttggaaaggtgaactgaagaccggtgccgattacaccttcatccggcgaaatgacaatttcctgaaccggcagcacatacttcccgatacagacagtcgaatcgacgaaagcaagtccgccgtctttgccgaatactcactgacattaggaaaaatcagccttcttgcaggactgcgcttcgagcatgccgtctccgactattgggagcaggaaaagtacgtgtccggtcaaagtcgtacttacaatgactggtgccccaacctatcggtagactttcctctcggcaaagcccaagccaatctcagctatacagccaaaagcaaccgccccagcttcttccagctacgtagcacactgagttataacaaccgtttcatctacgaaggcggaaacccactgctcacccccgaaaccaaccacgacctgcagttcacggccctttacaagtgggtacaattcggacttaactaccaataccgccgcaatgccattgccttcatgaccaaagaatacgaggacaatccggatgttgtcatcttcactaccggaaatttcaaacggatgcagtatctcaccgcctctgcccatctgtcacccaccgtcggcatctggaaaccggagctcggcatctacttcgcccaaccgttcttcaaagtcaccaatcaaggcagtagcaagaatatgaaccgcggcagcatttacctctttctgcaaaacagtctccagcttccggacgagtggattctctcccttgatgccgactaccagagcgaaggcaacttcggcgccatgctgcaacgttcctattggggcatagacgctggcatccgcaaaacattcttcaacaaaaggctgacgctcggactgcaagccaatgacctgtggaattcccggtatggctccttcatgctgttcggtccccggctgacctatacgaaaaaggcaaacccggactcgcgcagcttctccctgaacctaagctatcgtttcaatgcagcaggcaaagcgtacaaaggaaagcacgtatcggaacaagacttgaagcggctataaacagaactttggggaagaaagagaaacagaacagaagaatattatacaaataagccgaccaccggagatatttcagcaatattttccctcagaatgttgcatcaagtaaaagtttctcttatttttgcggtttaacagctataaattataacctttagacagaaaatactatcattatggataccagcaaaatcgtaggagaaaaaataaaatcactccgtgaaagccaatccatcagtatggaagaactggcacagcgttcgggacttgctatcgaacagattgaacgtatagaaaacaacatcgacctcccgtcactggctcccctcatcaagatagctcgtgtgctgggtgtacgtttgggaacttttcttgacgaccaggatgagaacggtcccgtggtctgccgtaaggacgagtcgcagaacagtatcagtttctccaacaatgccatccacagccgcaagcatatggagtatcattcactctccaaatccaaagccgaccgccatatggagccgtttatcattgatgtggccgctacggacgacagtgactttgtactctcctcacacgaaggcgaagaattcatcatggtgatggaagggaccatggaaatcagttacggcaaaaacacctacctgctcgaagaaggtgacagcatctattacgattccatcgttccgcaccacgtacacgcctatgaagggcaggcagccaagatacttgcagtagtttatacaccaatttaaattaatggaaaattgaaaggtgaaaatggaaaatgataaatactttctattttcacctttccactttcaacttccacatcatgttatacgaacgcaccctcggccaatggttggaacattgggccgaaacaacaccagacaaagaatatatcgtttactccgaccgcaacctgcgtttcacctggagccagttcaaccgccgggtggacgacatggccaaagggcttatcgccatcggcgtggaacgaggaacacacgtaggtatctgggcagctaacgtacccgactggctgactctattatacgcttgcgccaagataggtgccgtctacgtaacggtaaacaccaactacaaacagtccgagctggaatatctctgccagaactccgacatgcataccctctgcatcgtcaatggcgaaaaggacagtgactttgtgcagatgacctataccatgcttccggaactgaagacctgccaacgcggacacttgaaaagcgaacgtttcccttatatgaaaaatgtcatctacgtggggcaggagaagcaccggggcatgtacaacacggccgaaatacttctcttgggcaacaatatagaagacagtcgcctgaatgagctcaaaagtcaggtcacttgccacgatgtagtgaacatgcaatacacctccggcactacgggattcccgaaaggcgtcatgcttacccactacaacattgccaacaacggtttccttaccggtgagcacatgaagtttaccgccgatgacaagctctgcgtctgcgtaccattgttccactgctttggcgtggtacttgccaccatgaactgcctgacacacggctgtacagaagtaatggtggaacgcttcaacccgctggtagtgctcgcctctatccacaaggagcgctgcacggcactttacggcgtacccaccatgttcattgccgaactgaaccatccgatgttcgacatgttcgacatgtccagcctacgtacgggtatcatggcaggttccctctgcccggtagagctgatgaagcaggtggaagagaaaatgtacatgaaggtaaccagcgtttacgggctgaccgaagctgctcccggaatgaccgccacccggatagacgacccgttcgatgtgcgttgcaatactgtaggacacgactttgaacatacggaagtaaaggttatcgaccccgaaaccggagaagagtgtcccgtaggcgtacaaggcgaaatgtgcaaccgcggatacaacaccatgaagggttactacaaaaacccggaagccacggccgaagtcattgacgagaacggtttcctgcactcgggagaccttggagtgaaggacgaggacggcaattaccgcatcacaggacgcatcaaggacatgattatccgcggtggtgaaaatatctatccccgcgagatagaagagttcctctatcaactggaaggcgtaaaagacgtgcaggtagccggtattccctctaagaaatacggtgaagccgtaggcgctttcatcatcctgcacgaaggagtggatatgcacgaatcggatgtacgagacttctgcatcggcaaaatatcacgctacaagatacccaagtatatcttcttcatcaaagaattccccatgacgggaagtggcaagatacagaaattcaagctgaaagacctgggattacagctttgcaaggagcaggggattgagattgtgtgataataaaggataagagattaagggttagggattattggggtcgcatagactttaatataggcataaacccatccctaatccttaatccctaaccccttatttttcttctttttccggatatttcatattctcctctttcatctgttccaatacctcatgcaggtatttggcagactcccatttagccatcggaaggtcgtggagcaagtagttgccacaatcttgcggagcggtaccggggacttcaccttcatattcggcaacaaagcggaaagtatcctgcatcagtgccagtatgtcctgcggcttcaagtcacctttcatcagcagataattaccggtgaggcagcccatagggccccaatagataatcttgtcctgccactgcgggtcgttgcgcaggtaggtggcggcaaggtgttcgatggtgtgtagagcaccttgtcccaaggcaggctcacgattgggctctttcatacggatgtcgaaagtagtgactgtttctccgttcacttcatcctggcgggatacgtaaataccgcgcaacaagcggatgtggtcaattgtaaaactgggaatcttcttcatgagttatgagttataagttatgagttataaattgctgggaagggtggagaggaaggtccatatcgtgaggaacgaacgctctgccatggttccccagaaatcggcatactgcgaagcatggtcctctactccgggtgtgtcgctgatgatgcggaagctgagaaaaggaacattgtacagatagcaagtctgcgcaatggcggcagactccatatcaacggcaagaccgtcggggaaacgttgcttgatggtatccagctccgtacggttggtgatgaactggtcgccggtacagacaagtccgctgtggatgcggctttccattccggcttcgttcagcgacaaggcatgtttcaacagagaggaacatccctcgtaagaggcgggaaaaccttgcacttgtccgtactcgttaccgtcgccgcaccagacgtcgtgatacaccagacgttggcttgccactacatccgtcaccttcaggcaagcatcaatgccgcccgccacaccggtgctgacgatgcagtccggagaaaagcgccgtatcagttccgaagctcctaccgctgcactcaccttaccgatgccgcattgcgtcaagattacatggttaccgcccaatgtaccttccacatagcggaaactaccatcgcccgacgtattcttatcctgcaagcgctccaccaaccggcggtgttcgctgtccattgcactgattatccctattgtcatatctataataatttaagcttgcatattatcgttaaagcactttaatctttttttggaaaggcaaaggtacaacattctgccgataacgtgacaataacaatctgcatttatgtatctttgccacaaaagcgaagataggctgcacctcaacaaaactttttcatgcaagcatgaaagttctgtattcggtttgcactatctttgccccacaattgattaattgataactcataacttataactcatgaagaagcttcttcccgaccttattgccatcttggcattcgtcctcctttccttcgcctacttcttcccggcggatatagaaaaccgtattctctttcagcacgacacggctgcaggagcaggggcaggacaagaagtcaaggagtattacgaacagacgggcgaacgcagccgttggacaaactcgctgttcggcggtatgcccatgtatcagatagccccttcgtatgactccaccaagtcactgcagtgggtacagaaagcctaccaactcttcctgcccgactatgtgtgcctcacattcatgctgatgctcggcttctacatcctgctgcgcgtcttcggcataccggtctggctggccggactgggcggtatcatgtgggcattctcgtcctatttcttcatcctgatatctgccggacacatctggaagttcatcacccttgcctacgtgccgcccaccatagcaggcattgtgctcgcctatcgtgggaaactgctgtggggaggcatcctcaccgccttgttcgtggccctgcaaatcacctcgaaccacgtgcagatgtcctattacttcttcttcgtcatccttttctttgtgggagcctacttcgagaaagcatggcgtaccaagacattgccccagttcttcaaggcaagtgccgtactgattgtggcagccctcgtcggcatagccgccaacgtatccaacctctatcacacctatgcctacagcaaagaaaccatgcgcggcaaaagcgaactggtgcagaccggcgacgctgccaagcagaccagtagcgggctggaccgcgactacatcacccagtggagctacggcatcgacgaaacactgactctgctggtgcccaacttcaaaggcggagcatctgccgccctcagccagagtgaaactgccatgagcaaggcaaacccgatgtacagcagtctgtacggctcactgacacaatatttcggtacccagcccatgacgtcgggtcccgtctacgtcggagcattcgtcttgtttctgttcgtactgggatgcttcatcgtgaaaggaccgttgaagtgggcattgataggagccaccttcttctccatcgtcttgtcctggggcaagaacttcatgccgctgacggatttcttcatcgattacgtcccgttgtacaacaagttccgcgccgtgtcctccatccttgtcatagcagagttcacgatacctttgctggctatctttgccctgaaacgcctgctcgaagagccggaaatcttaaaacaggaaaagaagcccctcggcatcagcctgctgctcactgcaggcatcgccctgctgcttgccattgccccgggcagcatcggctccggctacgtgcccgcccaagaggcacagatgctgcagaatgccgtcaaccagcagatgatacccgccaacgaactctccgacatccttgccaacttgggagagatgcgtgccgaactcgtcagcagcgacgccctgcgtagcttcatcatcataggcatcggctgcagcctgctctggctctatgcaagcggcaagctgcgcagctcgctgaccattgcaggtatcaccatactctgcctggcagatatgtggggggtcaacaagcgctatctgaatgatgcccagttcgtgccccactccatccgtacggaaaccttcaccaagacgaatacagacgagctgatactgcaagataccagcttggactatcgtgtattgaactttgccaccagcaccttcgatgacaacaacacctcctactggcacaaaagcgtcggcggttatcacccggccaagctgcgccgctaccaggaaatgatagagcatcacatctctcccgaaatgcaggcggcctacaaggccattgccaccgccggaggtgagatggacagcgtggatgccaataagttccgcatactgaacatgctgaacaccaaatacttcatcttccctgcagggcagcaaagacaaaccgttcccatcctcaacccacacgcctacggcaatgcatggtttgtaaacaaggtgcagtatgtgaacaacgccaacgaagagattgacgccctggacagcatcatacctacggagacagccgtagtggatgcccgcttcaaggatgtgctgaaaggtgccacggaaagttataaagacagcctctccagcatccgcctgacaagttacgcacctaaccgcctgacgtacgaaacgaacaatgcccaagacggtattgccgtattctccgaaatctattatccggacggctggcacgtaaccatcgacggacagcctgccgaactggcacgcgccgactatatcctgcgcacaatgtatgttcctgccggacagcacaccatcgaaatgcgctttgaccccaccagcctgcacgtgacggaaggcatcgcctacggagcactggcactgctggtgataggtatcatcgtggcagtgctgatagccaaaaggaagtatgtaaaggcataaaaaaaatatcatatcattcccccataagcactcgacgcattccgctattcataccctgatacggaatgcgtcgagtgcttatgtccgttccgttatcccctcatgtttgttctgtcattcccttatgtctgttctgtcaacccctatatattgatgaaaaaccacggctgtgaagcatattcttcacagctgtggcacgtcttcttcacgactgtggaaaaggcgtaccacagccgtgcgtacatgataaacccaaaggcttctcaagacaaaccaccgtgcaaaacacaacagaagcctatgtaacacacaacggaagcctatgcaagagacaagaaagcccggtcagatgcgcaaaaaaaccgtttctaccctcccgggtaaaaacggttcaagtcaataatacatgaaaaaacgctatttagagagagtctcttctataacggaatggttctcttccttcttcactcatcatcagcagttctccgaactgacatcaaagttagggaagcataacaagaacaacaaatagaatctacgaaaaggcatatctcatcgacagaacggaaaagaatgaaccctacaatagggaaaagaatgaaaaaaaagctataaacagtcggcagaacgatatatttcagtaactttgctaacgtgaaaacaggctgcaccccagcataaaaaaatgaacagtatggaaactaccagacaaaataaaatagcccgtctcctgcagaaggaactgagtgatatcttcttgttgcaaaccaagtccatgcccggcatactgatttccgtcagtgccgtacgcatcagccccgacatgagcgtggcacgcgcttatctcagtatattcccctcggagaaaagcgaagaaatagtcaagaacatcaacggaaacatgaaatccatacgctttgaactgggtacccgcgtacgccaccaactacgcattatccccgaactgaagttcttcgtagacgactcactggactatctggaacgaattgacgaactgctgaaataatgtcccttcccttttttatagcccgccgctacctcttctccaagaagaaacacaatgccattaatatcatctccggtatttcggtgtgtggagtggcattggctacgttggcgttggtatgcaccttgtccgtgttcaacggttttcaggacatggtggcaggctttttcacagccttcgacccggaactgaaaatcaccgtccgcgaaggtaaggttttcgacccgcacgaagcgtgcatccggcaagtacacgccctgtccgagattgacgtgtggacggaaacactggaagagaatgccatggtgcagtacaaggaccgccaggcaatggccgtcatcaagggagtggaggacaatttcgaacagcttacatccatcgacagcttgctctatgggacgggaaagttcctactgagcgactcggtggtggactatggttttctgggtgtggaacttatatccgagttgggcaccggcattcagttcgtagacccgttgcaggtctatgcccccaaacggaacgtacgggtaaacatagccaaccccactgcggctttcaaccgggagtatctcttctcgcccggcgccatctttgccgtcaaccagcaaaaatacgattcacgctacatactgacgtcacttgactttgcccgccgtctgttcaattatgacacggaagtctctgccatcgagatgaaactgaaacccggttccaacatcggctccgtacaaaagaaaatagcaggcattctcggcgaccgattcattgtacagaaccgctacgagcagcaggccgatgttttccgcatcatggaaatagagaaactcatctcttatctcttcctcaccttcattctgggtatcgcatgcttcaatgtcatcggttcgctgtccatgctgatactggacaaacgggaggatgtggagacactgcgcaacctgggtgccgacgaccgcctcatagcgcgcatcttcttgttcgaaggcaggatgatttctgtattcggcgccctctccggcatcgttttaggattgttgctgtgctttctgcagcaacgtttcgggttgatttcattggggggaggcaatggaagttttgtagtggacgcttatccggtaagtgtacatgccacggatattattctggtattcttaacggtcatcactgtaggcttcttgtccgtatggtatccggtgagatacctcagcaagcggctgctgagaaaaagataaaaaaaacagttacttcttacggataatcgtcaatccgtcacgcagggggagaatgactttctccacacgcgcatcccacgccaccaaatcattgaaggctttgatactgattgtctgcaggtctgtgcgatggggttgttcttccagcacatggccatcccacaaggtattgtcggcaatgatatatccaccgccggaaaggcgggcgagcaccatttcataataatcgatgtatttgcgcttgtctccgtcaatgaaggcaaggtcgaaagtgaggtccagttgcggtaccagctccaaggcatcgccaatgtagaacctgattttatccgcgtaatcggaattctccagccacggacgggtgaagtcctcctgctcgtcgttgatttcaaacgtatgcagcatcccgccctccggcagtccttctgctatgcaaagtgcggaatacccgctataagtccctatctccagcacctgccggggacgaatcatccggacaaacatcttgagcatacgcccctgcaaatgtccggaagccatgcggggatatagcaacttgacatgcgtgtcgcgatagagcgctttcagataatcgccctcatcatcaatgtgctgcaaaatgtattcgtcaatcgtcactttgttaatggattataggttagggataagggattaggggttaggggttagttctgcgcacaattattaattaatcattaaccgctaatccctaaccccttatccttaatcccttatcctacaagtatctgttactgttaggcagcacactatcttcagcatgcttcaaggcatcttctacgacattgatttcaaggaaagaggtctgtgtgccttccttaccgctactcaggtagcccaccatgtccgtaggacataaacggccttccttcaacaagcgacgcaaggctgcaaagtaatattcctgcccgttggcaagttcgggcatatagatagcttccacaccgtaggaaagggcaaggtgccgcatggtcttttccttgtagcagatggccaacaccggatatttgccacggaaagcggcaaggttacgggcagtacggccgctgtaactgtcggtgatgattgcacggattttcagtttggtggtagcctttaccgcttgtttggccaggaacgcagtcacgtcgttgctgttctcgtccaacggaatacggatatcgttgtcagacagcttgtctttctccgcttgggcggcaatcttggtcatcgtcttcaccgcttctaccggatactttccataggcggtttcaccgctcaacatcaaggcatccgtacgataatagatggcattggcaatgtccgttacctccgcacgggtgggacgcggattggaaatcatggtatgaagcatctgtgtggcaacaatcaccggcttcttggcaagaatacacttgcggatgagcacacgctggatgcccggaatacgttcctgcggaacttcaataccgaggtcaccgcgagctatcatcacaccgtcggctacttccaggatttcatcgatattatcaacgccttcctggttctcaatcttagcaacaatacggatatcgctgttatgagcgtcaagaatcgccttgatgtcgagtatatcctgcttattgcgcacaaaggagtgggcaatgaagtctatgttcttctcaatagcataaaggatattggtgcggtccttctcagtcagagaaggcagattgatgcggacgccgggaacgttgacgctcttgcggctgcccagagtagcctcattctgtacttcgcagagcaggtagtcgggggtcttctctacaacaaccaactccaagtcaccgtcatcaataaggatatggccgtccacattcaagtctttgacgaaatggggataggataccgagatacattcacgggtagtctcctgctccgggttgcctaccaccttcacgcggtcgcccgccttgaaaggaatgggctcagccagaaccgtcgtgcggacctccggtcctttcgtatccatcaggatagcgatgcggttggaaaccgaacgcacattgttaatcaacttctcggcaccttcacggccaagatgtgcagtattcatacgtacaacattcatacctgcatcgaacaactgctttataaaatcaacatcacagcgctggtcagaaatcgttgcgacaatcttcgtttgcttcaataacataatctatatacctattttatttaataatcttttaatgcctccatggccagacggtaggagttcagcccgaaaccgagaatgacacccttgcaagcgcaggaaatcatggacacatgacgaaaagcctcgcgggcatgtacattagagatatgcacctcaatcaccggagaagtgaccgaacggatagcatcttgcagagcgatggacgtatgggtgtaagcacccgcattcaaaatgatgccgtccacatcaaaacctacctgctgaatcttgtctatcagctctccctcaatgttggactggaaatagtcaatctgtacatccgcatatttcttacggagttcggcaaggtagtcttcaaaagtaacgctaccgtaaatggaaggttcacgtttgcccaagagatttatattggggccgttaataatctgtatcctcataacacaattttttatacctttgcggtgcaaagatagtgcaaaccgaaagcagatgcaaatttatttgcaatttgctgaaatgcagcctattttcgcgaagcaaaggtagaaaaaagaaatgaaatcagaagaaaaatccacgaataaggagaaacaaacgctgataatcagaaagtaccaccagtatctgaaactggaaaaagcactctcacccaatacagtggatgcttaccaaacagacttacagaagctgctgcactttctggaaggagagggtatcgctatccttgacactaccctggatgacttgcagcattttgcctccggactgcacgacatcggcatccatccccgctcgcaggcacgcatcttgtcgggcatcaagtcattcttccatttcctcgtcatggccgactacctggagggagaccccagcgaactgttggagggacccaaaatcggattcaagcttccagaagtactgacagtggaagagatagaccgcatcatctccgccattgacctaggcacaaacgaggggcaacgcaaccgggccatcctcgagactctatacagttgcggcctacgggtatcggaactgtgcaacctgaaaatctccgacttgtatttcgacgaaggcttcatcaaggtagaaggtaagggcagcaaacagcgccttgtacccatatcgtcccgtgccatcaaggagataaggaactggttcgtggaccgcaatggaggctggaaaatcaagaaggacttcgaggactatgtattcctggcacgctggggcaaaaatatctcgcgcatcatggtattccatctcatcaaggaactggcggagaaggccggcatcaccaaaaacatcagtccgcacaccttccgccattcctttgccacccacctgcttgaaggaggagccaacctgcgcgccatacaaagtatgctgggccacgaatctatcgctacaacagaaatttacacacatattgaccggcacagattgcgcagtgaaatcatagaacatcatccccgcaatataaagtaccgcaaagagcgagaaattcattaaattatgataaaattgctgcacgagttaacaaactgtaataggatttaatatctttgcgttgttatgtccatgcctaaacagcacactaacatggaatagacaaatttcaattacaaacaattaatttatacctaaaatgactaagaaattgtatctgccgtttttaatggcaatgattgttgcattaatgacatcgtgcagcaaaaagatgggtgaattgtcatcagattatttcaccgtaactcctcaagttctagaggctgtaggtggtaaagttcccgctacaatcaacggaaaattccccgaaaagtacttcaacaagaaggctgtggtagaagtgacccctgtgctgaaatggaatggcggcgaagctaaaggccaatcggctgtgttccagggcgaaaaagtagaaggtaacgaccagactatctcttacaagatgggcggcagctacactatgaagacatctttcgactatgtaccggaaatggccaaatccgaactgtatctggaattcaaggctacagtaggcaaaaagactgtcactatccctgctgtaaaagtagctgatggtgtaatctccacttctgagatgctggaacaaacattgggcagcgctaaccccgccaatggtgacgacgctttccaacgtatcatcaaagaaaagcatgacgccaacatcatgttcttgattcaacaagccaacgtacgcgccagcgaattgaagactgccaaagaattcggcaaagaagtgaaaaacatagacgaagctgaaaacaagaaaatcagcaacatcgaaatctccgcatacgcttctcccgatggtggtgtaggcttgaatactacactggctgagaaccgccaggacaacacggctaaaatcatcaacagagatttgaagaaagcaaaaatcaatgcagcagtagacaccaagtatacagctcaggactgggaaggcttccaggaactggtatccaaatcaaacatccaagataaagaattgattcttcgcgttctttccatgtatcaggatcctgaacaaagagaacaagaaatcaagaacatctcttctgtttataagactttggctgacgaaatcctgccgcaactgcgtcgttcacgcctgactttgaactacgaaatcatcggtaagtctgacgaagaaatcgcaaacctcgccgacagcgatgccaagcagctgaacatcgaagaattactgtatgccaccaccttgactaaagatgctgccaagcaagaagccatcttcacaaaagctactcaaatctacccgaacgatttccgtgcttacaacaacttaggtaaactggcttatcaggctggtgatcttgacaaggctgaaagctacttcaagaaagctctctccatcaaggatgctcctgaagcaaacatgaatctcggtctgattgccttgaccaagggcgacagaacagcagcagaaagctatctgagcaaggcttccggttctaaggaactgaacgaggcattgggtaatctgtatgttgctcaaggacagtacgacaaggctgtcagctcatttggcgacactaagactaacagcgctgctttggcacaaatcctggctaaggactacaacaaggctaagaacacactggctgctatcgaaagaccagacgcttatactgactacctgatggctgtacttggcgcaagaaccaacaatacatctatggtaaccagcagtctgaagaatgccattgcaaaagaaccggctttggcaaagaaggctgcttctgacctggaattcgccaaatacttcactaacactgactttatgaatatcatcaaataataaaggttagattgaaaagaacgtgcccggcatagaaatatgtcgggcatttctttttattcacaccaaaaagaagtattttcgcgacgaagtatcagaaaaagaaccggaatgaagaaaatctatcttgcataccttctgcttattatattgtctgcctgcggcagcaaaaatacaaattcagtctacctaaatggtgaaatcaaagggctggggaatgataccctttatatatatggtacggacaagttctataaccgtatggacactctgcttgtcaaggatgacaagttctctgcaaccctcaccaccgacacgcttgtctctacatggctgcaattcagtgacggcacagaatatccgctttacctgaacaaaggagacaaaataaagataaaaggctccgccgccgagcttacttcactggaaatcacggggaatgcccccaatgaagaactgacagcttttcagaaagagttgaaaggtttgagtactccctcggagaaagcattggaagaaaaagcagaagccttcatcaacagccatccttcttcgctggtaagtatctatctgctggagaaatatttcgtgcaaaaaccgcaaccggacttctccttaatcaaagaaatgacagaacacatgaccggaggcttgaaagaccgtccgtatgtggacgaactgcttgaccttatccaagaagaagagaaggtatccgttgggaaaaccatcccttacgtcaacctgcccaatgccaaaggcacacaaatcagccgtactagctttaaggacaaatatctgttgatacatttttgggcatcttgggacccgcaaagcatggaagccaacgctgccctgcgccggatttacaagaaagaagaaaagaacaagctattcgcactctggggcatttccttggatatcgacagaaaggaatgggaagaagcaatcaaaagagataccctgaagtgggaacagagttgtgatttctccggatggaacacagcgcccatcaaacagctcgccatacaagcattgcctgccaatctgttccttagcccttccggaaaaattgaagggaagaatatgagtgaggaagacatcaaaaagaaactggaggagatagagcaaaaggaaaaagagaagaaagagagtgaaaagaaactcaaaaaacaaaaccgacggtagcctatcctgccatcactaacccctaatcactaaaaacgtgctcataaaagtttttggagcggctgttcaaggtattgacgcaaccctcatcaccattgaagtcaacagttccagaggctgtatgttctatttagtcggtttgccggactctgcggtcaaagaaagccatcaacgtatcatatctgctttgcaggtcaacggctaccggatgccgaccagcaatattgtcatcaacatggctccggctgacatccgcaaggaaggtgcagcttacgatttacctttagccatcggcatacttgccgccagcgaagttatccagtccgataagctggaacgctatctgctgatgggtgaactaagccttgacggcagcctgcaacctatcaaaggagcactccccattgccatcaaggccagagaactggggtttgagggtatgattgtaccgcaacagaatgcccacgaagcggcagtagtaaacaatctgaaagtgtacggagcgggaaacatcaaggaagttatagaattctttaatggcacgcaggaattaacccctacgttagtcaacacccgcgaggaattctattcccagcagagcaacttcgatttcgactttgcagaagtaaaaggacaggaaaatgtgaaacgagccttggaggtagctgcttcgggcagccacaatatacttctcatcggttcgccgggcagcggtaagtccatgcttgccaagcgtctgccatctatacttcctcccctctctttgggagagagtctggaaacgaccaagattcattctgttgccggaaagttgggcaaagacggtggactcatctcgaaacgcccgttccgcgcccctcaccacaccatttctacggtagcgatgaccggtggaggaagtttcccccagcccggtgaaatcagtctggcacataacggaattttatatcttgatgaactgccagagtacagccgtaacgtattggaggttcttcgccaaccgctggaagataggaagattaccgtgtcacgcatccgatgcaatgtagagtacccggcaagttttatgctggtagcctctatgaatccgtgtccatgcgggtattacacgcatcccaccaaggcttgtgtatgcagtcctggacaagtacaaaagtacctgaaccgcatatccggacctttgctcgaccgtatcgacctgcaaattgaagtcaccccactcccctttgaagagatggcagattctcgccccggcgaatcgagcgccaccatacgcgagcgtgtgatacgtgcccgacaaattcaagaagcaaggtatgcagacattcccggcatatattgtaatgcccagatgaacagtaaactgcttgctcgccacgcccgtccggatgacaaaggacttgccatgctcaaaactgccatgaaccgcctaaacctttcggcccgcgcctacgaccgtatattgaaagtatcacgcaccatcgccgacctggaaggctgcgaattgatacagccggcacacttggcggaagctatcggatatagaaatctggatagggaggactgggcaggataaatcgtcgcgaaataaaaatataaaattccgtggaacttcccagccccacggaatcatgatcaagaaatctattatctttttataatagtagttctccacatattatacagaagaaattctcacatcttattcttcattttgaataccgagtatcatatacccataaggaggcaatgtaatatgatagtcctcagacaatacaggtggtatattatctccatccaatagatttagaggagtttgtcccagcaagatacccgtattcttcaaattcacagaaatggtttccgtactattctggaaattcataatgactagggccgaaactttcccatctttattgcttcgtttaaagacagtatacttactatcatcatttgaaggaatacaagtgcgctgtcccatgggagccaacccgttatagccattctgcaacctgattaaatcataaaacttcttctggtccttttgaggccacttatcaagaattaattgggctatataatccgaatgatgatcaccataatggtttattactactgtccccatggaaattaaataagccaattcaaaaaggcgctcctcattagtagctggaatctcccacattggtggagtaatagttgttgcccccaatgccacaatacggtctctataactcttcaactttccattcaattcacatgggttctgatttcttctggcatttaagacctcacttctttttccaccaccccaaccatacatatcaaaaccttgaattagtttaaaatcaaacctgctaatccatttttcaatatttgaagctccctccgcattagttagaatgcctctacgatttaaaacttttataatagactcattgataatatcgtcagtaataccatcatagacctcaggagcatccagaagtattccatccacccccttatctgcccaaaagtccagataattccgacactcttcctgccactcccaattgttaaagttgtagcttggaatgcgtccttcagccccatccgagtttccccaacacgaatagtaataagcctgggctctgtcactccaaaaccaattgtcattcaacttcttatcactgaaatgaaaccagttcctctccttactatatacaccattacgctgatcatcacatgctttttcaaagaaaggagctttataccaacaataaccaacatttccaaagaaagtcagcctcatatcccgtgcatgtacttcacggagaaggtcctcaaaatcttccaatgttccaatagacgggtctatggcatagttatttgtagctccaagccctccccacacactaggatcaccttcatatatagccgaaagttcaatattacgataaccttgtgcctgcaatatatccaaactgtcttttatagagttaagcgtttggcgatagtatttggggtaataccttgtcataccagaagtctcttcccaccacgttgcattacgtggtgaaccaaaccccttaatgaccaacgaacggctacctgctctacttttacttttggcatccaatatagttaatttgatataccgatatacaccattcaattcttttacgtactcagtaccggcaatacccgaacgacagtctgccaataagtcccattttttattatcatttgacccttcaataataaaggaccaaacatctttttccacaaaagtctgttttatattccgaacatcacatggcaaacctaaatccgcacataaccattgcggataagcattattgtccgcataccaaaaagtagtattgtcaccatcaaaggccttcttctgagtatgattattgtcgcaaaacgaagaagtggcagctaaagcattaaaggccaaatcctcaagttcccgaccgcctaaagaaaccacatctttttctgttccaaaaactcgaaattcacaactgtgtgcccaatatcccttcgctgagcccaaaatagtcagtctaatataacggaattctcctgaaaccggagttttgaaatcaaatccactaataccatctgtattatcaaccaaaacagcccagtgcaattcatcattggaaccttcaatcttaaacttccagctatcatggtctttaaagatttgctgaattccggataacgtacaaacctcttccagatcaacagtcaaagattggggaaactgctcattatcagcaatccaataggttgacatatttccatccaaagcatcattcggattatgatccttttgcagcaccacattagtgcattgcttacctaaagcaatattcttatccgcatttgttccatttataacaaattctttcgaagaaggcagaaaaccatctttagactcaaggacagttaattttacataacggtacacgccactcacactttctgcaaaaacatcaccggaagctcctttcgtcttatctaccaacagcaaccaattctctttatcaacagagccttctaccttgaatttccaaacagacgattcatgaaatacctgacaaatgctagtcaatgaataagaggttttcaaatctactacaatccatccggcagactggctagattgccagaaagaagtcaaactaccgtctacagctttggctgaagaatgcttccctttggaagaagatgccacagtggacgctcctaccgataaatttcctttccttacttcaagaatatccgttccagaccttgcaaaagagaaactatcaccatacttttcccgagaatagccatgaagagatagcatcatcaccaatacccatacaatcttaaatttcataatcatcttaaatttgtttatcatgtttatttgaatctcatagatagaacgttatcgaattatcccccaacttgagtttcatttccccacagtttggcaccattacccaaattctttcgccactcatgcctccatctatgtatatcctgatcacgaataaaagctttaggccttctatcttctttggtcggagcaggaggtagaactccagcttctgattgataccagtataccacactactaatatccagtgtcaaattattattatgcccatgttctattgtccctcttaacgatttctcaaaataaatcggatctgccacaaagaaacgatacacatgcgttcttcccaaccaaccattgtcattattaacccttgcataaccataataaggatgattgaacaaggtcttcggacaccacgaagtattaaaaaagtcttcagtgcccgtacctaacaaagatgccttttcttcaccatcaatgaatatcatatcatctccttctccataccacattgttgaaggagaatggacataataatttatccctacaaaatgtcctttaccctttatatcagcaaacagatagttattagcaccgtccacattattacccattggtcctaccaatccccattcggtttcaccttctggtaaagcttccgtcaattcatgattataccatgcatggaaacgtcctgaacccaccggcaattttctcatttctacataatctacataaaaatagatgcaatcaatatttatatcgctttgattctctatctctaaacgggcaccattggcaaaaggcatctggaaataagaaaccaaaccagtcccatttgtaggaccaactgccaatgggagtgtagcatattcataatgctcgtcccatccatttccaaaaaaagcagcaatcggagactctactgaaggagtagaccgtccatcccaatatatcctgaatatgagatcatttctcataatatgcatcggggcaatagtaaaccaaatatggttaataataccagtacccggaatatcaacactccatttctctcctggttttataggacctacattatcattattattccccgttttatcggcactacttattctacggttacggacaccttcttgaatagtagtcaaccctcctagttctccacccctcacttgagtatgaccatctaaagttgcgaacatactcaaaaagaacaacataatcaaatttatttttttcattcttaatgtattaatcaattaaacaatacacatattgattttttactgggtattggaagacatggaaggtggagcatcttgcggcctacttccccatttataattaggctttttccccattatcaactccagtttccccccatttaccagttcagagtgatagaaccaaggtttagaaagtttcttcccgttcaatttggcagattgtatataccgattctcattggacacattttttgcttcaattacaaacttaccacctttatagtatttttcatccaaatgaatggttaccttctcaaataatggcgaactaatctcataaaaaggctccacacagcctcctccattcacttcaaacagccccattgcagccattacaaaccaagctccaccttgtccctggtcttcatcacccggccaaccatgaataggggtcgagccataatatttattcatcatttctcgtgcccagtactgcgttaaccaaggctttccagaataattaaacagaaaagccgcctgcatacacggttgattaccgtgattcacataagccgcactgaacctatcacccggaggagagaaactgtattcagaagaaatttcaaatccttcatttaaccgacggttaaattcttccctaccaatcatcttaaccaactcattcatatcatgaggtaccatccacgtatattgccacgagttaccttctacaaatccagagcccagccacgaccaactggtagaatgctcatctttattaataggttcaaaatccggcatccacgttccatcactatatttcggccggacatatttcgtttccgaatcgaaaacatttttataattataagcacgtcttgtaaaataatcataatcctcttcatagccaagagccttggcaaattgtgccgcattccaatcatcaaaagcgtactccaatgtattagaagttggcccctcataggtagttccaaagacattatgatgagatttctcaccataaggcacaaatccatacttcaagtaaacatccaaatgcctattgcctacaataccaccagaagaaagtgctgttccctgtgttgtcaaggtctttttaacagcttcatacgctttatctacatcataattacgaatacctttctgatatgcactcaccataagaggtatctcatgctgagctcccataatatcacaatactccactcccggaggtccattgggtaaccatccacccactctgtaatactccaataatgactctacccacttattcataatgtctggagtagcaagtgcccacaattgattgagattccaaaaagtattccaaaaagcatcacagccataaataggcgaagcaggatctttcaattgttgtgttcgctcatacatatcaacatattgaccgtccacatcactgaaaatagtccttgaacaataagaacgatataaattcgtatagaactttcgtttatcttcctcagttcctccttcaatttcaatggtgcttaagatttttctccattcattaacggcatatttacggactgcatcaaagttccagccaaagcctccagactccacttccaaattctttcgtgcttgttcaatactcacatacgatatagcagtcttaagctggataatctcaccctcctccgtatcaaaattcataaaagcaccgatatcatgtcttccccaacaaatgcttgaagtagtatccacatacccattgacccatgttccaaaagatttcatcggtttatcgacacgagcaacaaaatatactgtataatcattcagcagattggttggctcatcatacgacgattgggtagagaaaccttctatttcataatcactgactttggatatagaagcccatctaacttcatatggatattccgaaccattctccaaatcaaataaaatacgggaactatccgattttggaaatgtatacctttgaaaccccgtacgtgttgtagaagttagttccgcttttatattataatcatccaaaaggactgaataatatgataaagaagctttctcatttttatgattaatacgggagcggtagccgctatcaggttcgttttcttctcccggcttaattttcagaggtccggtaacaggcatggtcagtaagccccccatcgtccaactatgtatatgactaaaacctatgatctgattaattttatactcataaccacctctccatacattcccctgattgtccggactaagctttaccattccgaatggcatagctggtccgggaaattgcatccatctcgaatcagaatttccaatcataggatcaacgtactctgtgacatcccttgactgtccccaaagagaagagctaaagtataacaagaacaataatatcacctttttcatacttataagtatatgaatttcatataaatactttacatgcctaccgaacctctttgattaagttcaaattcagctatcaattaattccaccccatcccggattctgtacaaaaatatcaggattcttattaacttcatcttgatggaacggccacaaatagtgcttaggtgcctcaaatactctttcctcaaccaaggtacgtttaaagaaactattatcacgggcaccaatatccataccatggaccgcttttacctgatcgcttatcttccaacgattacaatcgaaataccgatgagtctccaaagctaattccacttgacgttcgcgtctaattttttgtctcatttcatcttgagacaaacctgccttcaaccctggcaatcccgaacgtttacgaatcaaatttacatatttatagacatcatccaccggaccagaagcctcattcaatgcttctgcataattgaggtaaagttcccccaaacggaaataattccatgtcttatttacaaaaactcctcttaaaatatctacaccatcctcatccaaaaacttacgcatcagataaccagtagttgtatagtcaggtccaccagtacgtccatcaggagctcccatacggaaatcaatctgacgtcctctccagtaagcaccgctataagtaactgttgcatagaatctcggttctctgtctacaaacatattaaaagtattttccggataatacccctctgcatctgcctcttccgtaaacccttcttcagaatatcctgattcagaattaattattggactaccatcagcattatatcctaaaataggagttgtaccatctgccatttcatatgcatcaacaagctcctgagtaggacataagcctgaccaaccgcctaaactgagcggagcggcagcacgttccatctggtcataaatcgccacattctttgcaaaaataatctccttattccagttctctacaaacaagtaacggtaattctccattgggtcacctgacggtgcataatacaacccataacccgccttttccatttcatctatacatgttttggtatattcggcagcaatcttccaacgttccgcttcataagagagggggaacaagtgatttccttctttatctgtaaagtttgcataatcaggattaccattccacaaggggctagccctataaagtaaagccctcgcctttaatgccatagcagcagcttttgtcacacgaccatatctgtctgctccttctttcattttcagcatacctccagccttatcacactcgttagtaataaaatctacacactgatctaacggcattcgtttacacaattctgaaaaatcttcattgggatcaaatactttctctgtaatgtgtatcggcccataaatacgcaataattggaaatgaaaaaatgcacgtaagaaagtagcctctccaatccaaccggcacgctttgactcatccataggaaccttagctacattttcaagaaagatattcgtttttctaataccctggtatgccatattggaaatatcttttaaaacattatcaggtgtccaggacccattattcatgaagtaggcaaaacaatttgtataaggataatccagctcatctgccgcaccaacgaatggattgtgcccccaatcattcgtgaaattcaattcccagggcatattccaataaatggatgataagaattgctctgcataattctctcgtgtaaacacatcatcaagggtcaaatcttcatcaggtgctttatctaagtaatcagcacatgaagtatttactcccaataatatcatcaacaaagtgatgcaaactatattaatacgtttcatattcgctcaagtttaatcgttctactttttaaaaatccactgcaagtccaaaattcacagcccgttgaataggataccaattatcagattccggatcaattgtgtgattaatcttatcccatgtataaaggttagttccgtttacaaacactctgagattattgatcttcaatttacttacaactttctttggcaaagtatagccaacttccagattcttcaaacgcaaataactagcatctttctgccaaaccgtcgaccgccgcatactttgtacattaaagccatccgtaaccaccggatattttgctgcaccagcagtttcaggtgtccaacgattgtcataaatttccttgaatacattgaaaaagcccataccactagcaaatggccagaaagtacgatcttcgaagaaagtactcgtacgagcagcacctgtaaaataggcactcaaatcaaatcccttatattcaatcgtaccaccaaatccaaaaaccaattctggttcacgagtataacctattgcgcattggtcatttgaatcaataatattatctccattgatatccttatatttcacatctcccggtattggacgtccacccaataaagactggtcataccaattgtcaatatcttcttctgattcaaaaaatccagcagctaccaaaccgaacggttgaccgataggatgtcctatctcggacaaatttgaatagagtggatcggctttatcattttcaagtactttactacgagcaaatgttacattcccgcgtaatgaatagaacaatccggaagaagtacgatctttaaattccaacaatgcatcaaagcctttattttctgcttttcccaaattaccccataaaacacttgcagccaagaaacctgctcccgttggtacagattggcgttgcattaaaataccctttcttttttcatagaaaaaatccatctgtaaactaaaacgatctttccacaaacctaaatcaagtcctaaattcgttttaaccgcagtttcccaagtaacattgttgtagccaatcttagattcaataataccgggccatctaatttgatcttgtccaaaatagtacacttgttcccaattctgatccatctttgtcaaatacaaaaaacgatcaccaccaatttggtcattaccaacttctccatgtgaaaatcttaatttcaaattgcttactaaattatctttccaaaaagattctccagaaactaaccatcctaaagatatagcagggaagaagcccattcgctttcctttcggaaagttctctgatccattatagcccgcattaaattctataaagtatcgctgtgcatagtcataagtcgcgcgcatcgccaaaccttgacttcgataaggtaaattcataatagaagtcccagcagacaaattatcatattgtcgacgatttaaaagtaacatacctgcaacagaatgtttatcgaatgtgcgttgataatttaccgaaaaatccatatagatagcacgatttgaattttgttcgatactataccccattgccttatcgtcccggtgtgtaatatattgatcttctccagtttgttcattcttgccaatatattgctttataccaaattccttatatctcaatgctttgtttgcgtgataaaagtcaaaagagaaatgccccttcaccgatagtccttttgttactaaacgagataagtcccaggttaaacctgctgtagattgtatagtagtcaaatgctcatcagagtaacccgtttgcgtagattgtccccatggattagagccgatatacgtaggcagaccactgatacttccatccggattcgtcacaggaaatgcaataggtccagtatcacgtaaaccattaaagatacctgctgcaccagcacccggataattacggtcatcaataataccaccaacacccagctctacaaccaagtctctagtcaagtttatatctacgttagaacgataattatatctggaaacttttgcattcgtattatgaggattacttttatccgttttatatatacctgtctgcattgaatatcccaaattcacgtaataccgtactatttcattaccgccagttacactcaaattgtttattgtctgatatgaatttttattaagaaccttatctatccaatccacattcggatataaataaggatctgaacctgtacggaatttctccaactcttcattagaccaacgaggagccttgcccacattagccaatccctcgttcattaatgaggcatattcataaccgtcaatataattacgctcggccaagctggaaagaatagcagattctgttcggaacgagacttgaggcttaccttgcttacctctctttgtattaatcagaataacgccattagcacctttcacaccataaacagcagttgccgaagcatccttaagtacagacaaactttcgacttcatctggatttactgaacttatagaccgctcaataccatctactaaaaccaaaggtgccttttctccccaagttgcaataccacgaatataaatagacgctgcatcaaatcctggttcaccagatgtctgtcgtgttataatacctggcatgcgaccagaaagcgcatttggtagtgaagtggttgcagtttgcttaatagctttaggagcaatgttggatatagatcctactacactgacctttttctgagtaccataccctaccaccacaacttcttccaattgagtatctccctctttcattatgatttccagattctcttttccattaactggcagttcaagatttccaaagccaacataagtaaacaacaatacaccgtcactaggagcttctaatgtaaattgtccattagcatcagtaatcgtaccgataattgttccttttactacaacatttacaccaggaagagtaataccagcctcatcctttacgatacccgtaactttaatcctttgagaaggagacataaaagcaacattgtcagtgtcaaaggaaacagattcacctaatacattcaagggaaatgccaaacaccctataaatgcatacaacttaaaattccaaagaaaactcttttgaatttctgttcgaacgcttttgtttttcataattttaaataccatatttttagttcaacaaagaagtagatataataatttacccatacctattactaagagcaaaagtagactatagaacagtatttcgatgaaacaaatgtctcattaaataccataaacattcccttaaggagaaaaaaatagattttttttcctatacagaactaataggaactttgttgtttcttatcagaatacacaatatattcccatgaacgcaataatgcattaacattctgtttatcaaccactaccttgatattatgtttaccattgggcaattgataattccagaaaagatctaaacgacgataacggaaacttgttggaaactcagcttcctctacaaaatgattatcaatataaagttttgcttttataatatcatccggttgactatagtccctacgaatcgcctcacccctaattacaaaaccaaccccatctatgtcaaaagataaagtatcaatatctgtacagttcaatcctttcttaaccagcggatacactccttcaaaacattgttctaaacgtacagcagtaggcttttgtatcggtagcattacctgattgtcaaacaccgtccctccatttttctctatcattagaagagcatgtctataactaatagcatataaatcatctaaactcaatgaagtatatttaaatttcttggcttctgctcctctcaaaccttgcatccaatattccggaatctgactatagcccagcatcacacctaaaataccaccggcagaagaaggattacaatcagaatcttgcccagcacgtgtagatatttccattgttttagtaaaatctccattaccatacaacaaaccaagaacaatataagctgcatttatctttgcatcaatatctaatggtgcaaaaactccatcaggacatccaacttcttccgaataatgtttctgcaattcaaaccatgtctgtttccaatcatccgggtattgtttatgccattttattacatccgaaatacattgatagaatgtactttcaataggtatggttttcaaagcttcctccacaatatactgaatatcatttgatataaaagccaaactatacatcgcacccacatatactccaccataccaaccatcaccataacacataatatgtccaatcttatcgctaatctcagaagcagaatttggcataccaggattcatcaagccagcaaaatcagcttcaatctgataatctatatcatccgcatggggattaaacaaccaatgcccagactcctttaccccatgtaaaatattgtatctagcagcctgattagcatgccacaaattatagtctgccgtcgcaaatgcaatagcaaaagaatcaacaggagcgtctagtccaactctttccaatacatctacaaatgtcaaatccatataaatatcatcatacaaatcgggccaagaatccattaactcttgtacatagccttcatgccatgggatagactgataatcttgtataaatgttccctgatatctgaactccgtatgactgccaaaactaactccaatggtttgtcctgcccatcctccttttattttatccaaaagttggcttgtagacatggtatttgtaactgacgaagattgttggtggcaagaagtcattgttcctccagccaaaaacaagattaatacaataactaatttttttccgattgttttcataatattatctcataagtattctgcaaatccaatagcctatagtattctattgcgcataaattcaattacttctttttgataaggaatcgaaacttgcgctccaattcttgtgacagacaaagcagcagctgctgttgcaaactgtacacaatcctgtaaatctactccttccacccactgagctacaaaagcaccacagaacgtgtcaccagctcctgtcgtatctactgtattcactacatatgaaggaatctgtttctccatctcatccgaaacaataaccgaccccttttctcccaatgtcagaattacgacttgtcctactcttctcaatagacttcgagcaatacctatcggttccgaaaagtccaatgactgtcctgctataagcatagcctcagtctcgttcagaataagaatatccactttctccaggatataagaaggtatctgcttggccggagctgggttcaaaatgattttagtgtcaacagtatgagcatactcaatcaacgaaatcaccgattcataaggaatctccagctgcagcaccaatgcatccgcttcttttataactggaagaatagtatccattctttctcctcgcaataaattatttgcccctggagccacagcaatgcaattctctccattttccgcaacaaaaataaaagcaatcccagtagagtgtctcacacacttctgaatataatccacatcaattccactatctacaaaagaggttataagtgtatctgcataggcatcatctcccagacaagaaataaatgagacatgtcctcctgaccgggcagcagcaattgcctggttagctcctttgcctccatatgaaaggcaatattctgcatctcctattgtctcacccggttcaggcaggtgactgacgcgggcaatcaaatcaacattcgtgctaccgaccacaactattttcttacatttttccatttcatcattagatatataaattaccatttaaagtcccgcataaataatcaaaccgattccagacaagaacagaatgaacatacatgtcagtaaagttctgtttattttaggacctcccacaaattctttccaaataaatacgccccagaatgcagccaccatcgtagcaccttgtcccaatccatatgaaatggctgcaccggctttttccgtagccaacaaactgaacagattgccaataccccagattataccacccaatattcctacagcatgcagacggaaactaccagcaaaataatccccataagatgtaggtgtaccgacaaaaggacgcctcatggcggctgtattgaaaatgaagttactggtgaaaataccaatagaaaaaatcaccattgctgtatagggggtcatcttaccgacttcaggacattcaaaattctgcaaatccatagaacttgcaataaagcggaaaaagaaagacatcataatacctgccactatagctatcacaataccttttgttttttgttgctccccaccttttcccatattcttataggcccaagcattaaagacaatcgccacaatcaccagcagaactcctaagaaaaggaataccggactaccttgcggtgcattaaaataattaatgaatactcccagaaccaaagccagccctactcccaatggaaaggccacagacatacctgcaatagaaacagaggcagaaagtagaatattggaaaggttgaatatgacacccccgataagagccgaagccagattagatgcgtcagcctgcaacaaatcatcaacaaaacctcgtcccaattcccctacgctccccattgtaaacgcagccagaagtgacaaaagtaacacacctattacataatcccaatagtagagttcatatcgccagacacgactgcccgccagcttctgggtattgccccaagacccccaacacagcattgttataaaacaaaacactactgccaacgaataattttcaatgataaacatagtattagaattgaattattagaattaaatactcaaacagctactgaccacaaaattaacctgcaaaaaggatttagcatataataaatgtcccaataaataatacaaaagtctcaatcccattccaaactatttcacatcttatatcctgagactattttaccttttctacagtcaaatagtccaatcctatcaatgaattaactgccttttcatttttatccagctgtacaagtttcaagaaattctcccctttcttcagctccaatatacctagttcaactgtcatcatgctcaactttgaattataagtatcaacagagggaagaaccggactttcatttacctcaacagaaaagcgaccataatctggggcaatcgtaaacctgcactttaccgaatattttcctccctcatcaaccacaaaacctaaattagcacaatctcctttcctactttctctccatataaactgtactccattactccaattcatctcaggaatacactgcgttcgttccatgccaccagttacagaaatattcataaattctccctccacttttccatttttgtcaacagagttactcaccaggtcattcttatgcttcgctatatcaattacagccatcttttcttctggtttccggttcgtttttcctcccggaagcatataccaataagtagtcggtgcgtaattgacatatgtcgcactctgatgccaaaattccatatcaaaaacaagagatttcttaaacgttatgccatccaacccacgatatctcaaatttgccacgtgtccaggctgataagctcctgtgccatcggggtgggcaataaaaggatgttcaaagaaatttggcatacaccaagcataaccgtaataatcctccgtcccggtcccaaaatgtgacgggaaactttctccatcaatatataccttttcatccccttcaccccaccaatcaccaactgtattaaagattgttatagcatcaccaacataaacaccttgaccagttaaagttacaaagtttatgtcttctgcatccaatgtcccattgatactcttatgtaaccctgtatatttacgatgatattccatccagcctacgccgaaatacatggttctctcattccattcccaatcagacgaataaacagtaagagatgtactcactacttcagttctcaaattctccagagaaatttcacatttatctttatacggcatcacccaataacaagtcatcatagaatctttgcttacagtagtataaaacgaactataaggcgaaagacgattacccgttccataaaaatcaccaaccggacaccaaactgtctgattaccatcaaaagtaattctaagtatcacggaacgtaaagcttgagccaaatcatcagcagatagtttaagttgtataccacgtatagctcctccaccctctagaacaatccgattctctcccgataaattcgtaatagccttatccccagatacttttttttgatattttccttcaagaataggttgttccatcagttccctctgtgtaccatcaagtacatcagtttcctttttcaaatcatccaaagtaaatgtttttacaatacttcccttatcatatgtgcgatagtttacactataaaagaagttctctccgggtggacgattccctgctgcagtgataccaggagtttcataagtaatcttgcaatgctttgcataaggaatcggtaaatacaaatcatgtccccgttgtttataaggagtcaaaggagatacagacgtagatataggcgcatctgccagaaagtgaccactgataagactcagtacctcaccttcaatagctggtatatccgaatcatccaaataaaaacgtaatataccgttatcattatagttggccaccgtaatccatatacgtactacagcaccaggtccttctgcgtcaaacataacaaattccctacgtccatccttttcttccgtacgaagaaactggctaaaatcccaattagcaaaccagtcataagaacctttcactgcatgatctgagaaacggtcataactactgaactgccgcacagtgtaatatggagatggataatcaaccaatgactcacggttggtcatctcctgcaacaaagaggaaaaagttatctcattaccattagcaaacgaagaaagtataaacacctgcatcagcaagaccaaaaagaatttactacatgtcattatttgtcatgatattaaaattataccagatattttctataccaatacataagctcccttacagtccatacatagtcttagtcagtatcccgacgtcaaacgttggggtgtattcaaatatttatggactaccggatcttccagtgcctctggagtattcacaatagacatcggaatataatacgaatcagccatatcagtgagctgctcaacagactgtttcccttcacggtatgtcaaatcaaactcaaaattcatttcaccgggagaatctacacagaagttaactacccataagttattgtaaagcataccataaagttcattttcttttttaggagcatcctgcaatcgcatccccatatgatgtcctccaaaactgacaattggaacgtctcctgacgaccagatccgtgcaccatcctccgcttcatatttcacccagctgtctataacaaaaaagtccttgcatgagttaggtatttgttctttgtacagctcataaggaattcctccattggtagcaaccggttgtctacaatcctgaggaaaaggaaacttagcatagaatacttctggtgctattgatgaaattctgtcaaagaaaatattaaccttcgctctcggaacctctttgaaaatctcaacctgacggttcatattcttcacccttggatgttccatatcctgcgaaacaatccatgaataaggtgtttctctcactttagccttacttttcggttttgcccactccattctagtaatctcattgaacttctctatacgttgtgcttcatccatatgcatatagatatcaccttgagaccatctgtccatatcattgaagtgtactaccatgaagtcggcaagcccttccgtaaacaacggttcatccatacctttccagcgtgcagatgtcacccaaccgttcttatcaaaagataactccggcaaatctattttcttatcaataatctctacctccgaggtatcaagtgcaaaacgagtaaacgaattagccggcatatcagatacccaaaaccatgcctcagttcctccgggaatcgcctcacgactagtattaagattctcatcaactacccagcgccaaacataatctccctctttaaacaaaggatatgactttccattctccaagtttcgtacagatttatagtctacctccctaaaaccggtaacatccagtttaacccatcctgtataagatgcatttgccgcattaacaacatacaaaccagcatctgcctgcgcgaacttattacgtgccagttgtgccagtaaatattttccccgctcccacggacgataagcaaaaccattcttttcattcagctgtccttgcgtatataaactataaggtgcctctgaagtctcattagaaccatatgtatgttcaaaataacggcataacaaacggttaatctctttcaattcatctttagctccactattcagttctccccatactggcgaactgatcgcttttgtatggtaaacagcacgacgtgccacttccatctcgcgtggcatagctgcaccaccaaaagcccaccaatcttgccactcaccttcgaaagttctcaattgatttccaatctccttttctatattcctcatcgcctcacctgctgttttcatacgcaacataggcttgaaacccatctcattccattttttgataaaagcaagcaactgtggcataggaccatcattatcacatctccactcattggtaaaagtcaatgtaaggaaggggtaatcgtaccctttttctctcaaatccttcaagcgtttcacacacacatcatatgctccatgcatagatacatcatcagtctgtagaatattaccattgcgcggccatgatgtttgcgtattggcatattcccgctgttgtaaacgccactccttttccgcaaagaaaagataaccttgccaataaggatatcctgaccaaaccaaaagttttctatcatcaggcattttccaccaaaaagcaccaggttgctctaccggagaaccaccccaatgcggattaatgccagtccagatataatgtatgtcacggtcaagtaaccttgttgctgctgcacgtgggaaaccattcacatcatgttgcatacccacttcaatatccaattgagaccacatatctttaggaatccagtcaaacatctcatcccattgttccttattggcataagggtgtatatgaaaaggcatagcattgattccaatctgtttgttttcaatcatgtctagcattgattcccgtctgtcctcagaagctgaattccaccatgagtaaaatggatctaacgcttctactgtccatgcaaaccgattctccggaatttcatctttggtcttcaatgccaaatccaatgccacatcaataaaacgtttatgcaaatcaacagcaatcaatgcatggtcagtatagccataatcagtatgtgtgatatgaacaatatcaatatacttaaatcctagtgtgtcttttccctctacactgctctctaccgtattttccgttgtgttttgacaactgcaaaccaaggcgcccaaaaggaacagtgcaccgataaatagtttgttaactatacatttcataatattccgatttttgatatttattttttattgaaaatacatactttaccctgagaccttccacttcagtccacaaaatctttaggtaataccccaaattgttttaagaaacatttggaaaaataagaaggagaattgaaccctaccatatagcaaatttcattgacccgattttcaccatccttcaacaattgggctgcacgcttcaggcgttctatacgcaaatattcattaggagtcaaatcaagtactccctttattttccgatagaaattagaacggctcatattcagcatttcagccatatcctccatactgaactccggactatgaagattagaaagaattatttcattcagccttttaatgaattcctcatcagcctttgtcaacgccattgtattggcagccacaaagggagacttggcaaaagtttgacgtagcgtttctctattcttaatcaagctggcaatcgcagccaaaagatattccggtgagaaaggcttctcaatatatgcatcagctcctagctccaacccctctactttagactgtatattagttttagctgtcaataggatgatggggatatgactataatccaatttggactttacagtcttgcataactcaaagccatccattagtggcatcacgacatcacttacaatcaagttcacaaaattttcatccaatatacgcaaagcctcttctccattgacagctgtcagaacgatatactcatgcgacaactgcctacttacgaaagaaagcatttccggattatcttcaactaccaatacagtatatctgttttcattattttctttaagctcctcccacttcgcctgaagttcggcagaaggttccatattactgacatccccagattccatcgtaatagcattatcttgggtgagtggcagagtaaggcaaaatatatttgcgtcttctccctccaccattcgtaaacttccccgatgcagttcagccaaagaacgggaaagtgccagtccaatacctgtgccagaagtcacctttccattttcctccccattaaagcgtacaaatggtttgaatatttcctccttcattgtatccggtacgataggcccatcattcactgtccgaatatggaatattccattctccacagccatatccgtttccaagaaaatctgtacatagctctctgcatacttcatggcattgctcaacagattactgagtatcttggtaaaagcttctttattgacatgcgcgtagcaagcccgttcaggtattttcaaagtgagatccagtcctttctgtttggcaagagaagtaaatctcaaatgtgtcttctgtactacttccgttatattgcatttagtgaaattcaaactgaatccttgactttcagtcttgcgaaaatccaataactgattcgtcagattcagtaagcgttccgtattctgttccatgatattcagatcctcacgagtttccgcatcaacatctttttttagaatgatattttccaagggtcctttaatcaaagttaaaggagtacgtatctcatgtgccacattcgtaaagaaatcgaattttgcattatagatttcacgttctttctcctgctcgaacttttccatctgcctttgttgttttctgttattccgctgcttcagatagagataaagataggcaaagaaaatcaagaacagtaatgcataaacgacatatgcccaaacagaaaggtagaaaggcggcagaatacggatatgtaaagtcgtctcttcttcattccatattccatcactattgcctgcctttacccgaaacgtataatctccataatgcaggttagaataagtcaccaacggactctcccctacagtcaaccactcactatcaaaaccatccaacttatacatcagtttattcatcttcggagcctgataccccaaagcagcaagccggaaagaaaaagaattttgctccgcacagagtaacaacttatccgagaaagtaatactttcctgtaacggcgaattctcagcaccagcccgcatctctttattgaaaaggagaaaatcggtaatgacggcagaaggaacatatttattttccgagaatgtctttggattgaaggcgacaaaaccgtcaatactaccaaaatagatagtaccgtccttatctttaaaactggaacgatagttgaattggtcactcggcaacccgttcgccgtcgtatatacttttaccgctcctgaagttaaatcaaaacgggctaaaccattattcgtcgttaaccagaataccccgtcttcatcttctgcaatttggtaaaccacatcattcggcaatccattaccggtatcatagcgtgtaaagttttctgtttccggatgaaacagacagattcctcttccctgggtagtcagccagacattccggcgtgaatcttcaaaaacactcagaaccttattgttggaaaggctcttttcatctttttcattgtgtacataattcttccattctttcttactgacatcataacgaaaaaccccacaaacatatgtagccaaccacaagtttccactggtatcttccttaatgtcatacacaaatattcctactaattccggaattatatcaaaactgtccgtttgtctgttataacgcatcaagccacatcctgtcccaatataaatgtcccctgcagcagtcctgcaaatagcaaaaacattattgtcattcaaggaatgtgggccgccgtcatattgatatgaccttacaatagtttccgtacgggtatcaattaccttcagtcctttggaaaaagttcctacccaaagctcattctctaccgaacacaacccatgcacatttgtaaaaccaagactcggagtaaagaacttgaattccttcgtcaccggatcaaacctattcaatccaccatcttctgttccaatccataactttccctgactatcctggcagaactcacgtatccgtttcccatgtaagccatcattcactcccttcggataatatctttcaaaacaagtatatgaatgcggatagtaattgatacctccaaaataagagcctatccaaacgccaccttcgcaatccttacacaaagaataaactgcattatccgacagtgaatacggatcatacatagaacttttcaaatgcacatatttatctgttcgaagattataaatatagatcccagactcacatcctatccataattcatcgtcagaaaaagacatcaactcacggcaccatatccgttcccccgtctcatctgtcaacagcaaatcgcggacttttcccgaactaagattcatttcctttatacctccaccgacagaagctatgtaaaagcagttataagcccccggcagtaccttcatgagcggatcaccttcaaagaccttcttaccatcagaagagacaaaaggatgaatcgtcttgagtccgtcttttgaatagaacaatccgtttccataaatccaaatcgtttcactgttatcaaaaacaacacaatgtacattcgaagtcaaaaaagggaactccttaagtgtatggttccttaatgcctttgtctgcaaattataatggaatataccctggcgttctaccgtaatccatacatctccatttttgtctccaacaatcatggctgcagcattatctatggtagtaccttcatcacttaactgtttgaaaggctcaaaaacatctctttccggataatatatatacaatcccatatccgtacccacccaaatattgccttccacatcttcatatagagcaagtatatagttgttcccaagactatgctcatctgtcctatcatatttgaatatcttaaatgacgaaccgtcatagcggtttagaccgtctttggttccaaaccacataaagccggctttatcttgtagaatatcgtatactgtattttgagatagcccgtcccggatagtaagactattaagataatagtgctccccgattgtttgtgcataacaagtgaaaaaacatatcaggcatataaaagctatcagcattttcttcagattcgtgttcttcatcgctctattatttagacctcaaatataggccattttgccaacgaacgataaaaaatgcgtcccaatgaatgaaagattcgtcctatccccctctatctcgctagataagggggatttagagctgcaatatttcctacttcttttctatccgaatgcgcgcatccaccgctatcacctgcttttcagtcgccaacaatggattgatatccatctccttgatttccgttgcaaagcgcagcaaggtggaaagccgtacaataatttcggcaaatttatcttcattcactcccttctgcccacgcgtacctttgataatcttataggcacgcaacgagtgaatcatggagtaagcctcctcgtaggacaacggtgcaagaccagaagatatatccttcagcacctccacaaaaataccgcccagaccgcagagtaccacatgtccgaacttctcttcatatttggcaccgataaacaattccgtacccttcagcatcggctgcaccatgatagcactagcttcgggaatctgcatcatacggtcgaattccaatgccaaatgctgttcactcttgatattgagcacaacaccgcccacatccgacttatgcaccggccccaccacctttgccaccaccgggaaccccgtgcgacgcgcaaaggcaagcacttcttccttgttgtccgaaacaaactcctccacaataggaatacctgcagagcggagcaatgcctgcacatagtgcggggcgatataaccgtccgcaggaatggaatctataatccggcggatacggggaacatccactccaaagagctcgatttcattattggcaggccgcggggcattcattatccgcgaaagtgccgtacccaaagtcacttcatcggcaaagttcacatggccttttgccagaaaagcagcaacctcggctcctgccgtattgatggaaggaagaatcggaaaaatcggcttcttgcaatgcagcatcttctcgtgcagcacatcatacatttcaaacatggtcaccagccccggagtgccgaaaatagccattacagcatcaatattgtcaaacttctcctcacaatactccagacagaggcgcagatgttccggcgtacccgtagccagaatatcaatgggattccccacagccgcaccggggaaaagcttacccttaagttcctccgccaccggtccttccagtttcggaacattcagtccacccttactcaatgcatcggtcagcatcactcccggaccgccggcatgggtaatgatggcgaagtttttccctttcagttccggcagtgtgaagatacaacctacggtcgtcagctcctcgcgcgaatagcaacgcacaatacccgccttacggaacaaggcctctaccgccgaatcgctactggcaatggcccccgtatgcgaactcgccgcccggctgccgctttcgctactgcccgccttgatggccgcaatcttacagcccttcttgatgagcgaggatgcatgaaacagcagacggtcggggtcaccgatactctctatataaagaagttttattctggaatctgcttccggattgaagtgttcgtccatgtattgcaacacatcctccacgccgatttgcttggcattgcccacagaccatacagagttgaattgcaatcccttggttacggcgctctccaatatgaacaccgctgtggcaccggagctggaaatcaggtccaccccttgcggatgcagttgcgggatgggctggctgaatacactgtgatgccacgagttcataaaaccgatacagttggggcctatcagagaggctccataccggttcaccgtttccagtatgcgatcttccagcacagcaccctcatgggtctcctcaccaaaaccggcagaaaggataatgaacgccttcacctgcttctccgcagcaagcatctccaccgcatcgggacaaagcgcggcaggtatggcaaggatggcaaggtccgtatcgggaatgtccttcacatccgcaaaggcagcaacaccctgcacttcagtctctttcggattcacggcacgaagctcaccggtatatccgccgctaagcagatttttcaggatagcccctccgggtttgtgtacattgttggatgcccccactaccacaatactggccgggtgaagtaattggcttgttatcatagtctgttttacattaagttaatgattcatgcacaaatatacattttccatacataaaagcaatcggtaaaagagaaaataagcttaatccctttgcaaaatataaataagtttacggaagtatatatatttgtgccatcaataacaatacgcagaaaactaccctatatggaaagccgtgtcaaagagatagattatctgaaatgcatcttcatcaccttgatgattatcttccaccttgtatatataggcgacaagtatccgtatgcgaaacaaatcgtctatacgttccacatgtccgctttcctgattatttcgggctatctggccaataaccggaaggatgcccgaagctttctccgcaagtttctatggattttcattccgtatgcctgcatggaggcggcctatacggtgatgtcgcatttcctgcccgtacgcgaaagtgtagatgccattactcctaccgtattgctcgacaagatattcctccatccgatggggccttactggtatctgcatacactgattctgtgcagcctcatctattatatcacattccgctatgtaaggctgtcggttgtctcccggctggttgtgaccggtgtctgcctgtttgccctttcccattggggaggattgatgaacttctccaatgccctctatttccttatcggcatgacagtgagccaaagcgggcttcgttttacacaagtctttcgcgccacaaccttcgccattgttccattcgtaatactatgctgttttcccgccaatctggataggggtactctggcaggagtcgccatcacctggctttccatcagcctgctgttggcagcctacggctatctgccggcacaagccaaacggcttgccttctttatagggcgcaatacgctggtcatactccttttctcacccattttcaccattctgtccaaggcgtttctgcccgtgttcgccttcgaccctacggggatgctgttccttgtcactgccaccgccttcactcttagcggctgcatgggtatggcgtgggctatggacaagatacacgtttccagattcttcttcgggaagagtactatattgtgttgaggcggttcacgtctccgcccacaaagggaagtttcaccacaaactccttttcgtccttaagaatctccaccagcgtgccgtatagggcatactgccgttgcaggttcttcaatcccgctccgttactggtcacataattacgcaactgaagattgttgcgcaccgtaatcccttcgtttcctatggatatatggactatcagcggcgacttctttgtactgatattatgcttcaaggcattctccacaagcatctgtatgctggcaggaatgacgagacaatgatgattccgcaaatcatcttctatctccacatgcagtgcatcgccaaagcggatatgctccaggtataagtacgactctacgaacgccagctcttcctgcacggtcaccatagccctgccgtgcgtagtaagcagatagcggtacaccgtagacagcttcttggcaaaccggttcgtcttttcggtatcctgataagcaagggaggcaaggacattcagactattgaataagaaatggggattaatctggtttttcagcacctcgaactgatacagcgccttctccttctcgatgacagccatctgcttctccatctccgaacgttgcaggctatagaagaatatctctatctgcagaacgataatccagttccacggcactaccggcagggagcttctcaagatatgccagaaatttccatgcccgcccatcagcaggaagttcaagatgtacgtcaacagaacagccagtgcagtggtcaacacaatatccaccagaatcctcaccgcattgttgcgctgtttcagtcttttatatatcaagttgataaccccaaagtcgatgaaccccagccctatgcacaaaggaagattcagaaagaactgcaccatgatattcgcataccacggcttaccgctgatgacgttataaacgcaccctatgacaagcaacgagacggaaaccgtcagtataaaaaggaatatgtatctcttatgcctcataacttataactcataccactccgtccacccatttcaagaaatcggccacgcgactgcggctcaccaatacctcgtgcgggcactccggctcgaagtaaagcttcaagcgactgccgaagtacctggaactcttccggatggacctaatgttggatatgcagctccttgaaaccctaaagaaaacatccctatccagcattccctccaactggtccagcgagtagctgatgatataccgtttcccggagaagaggtgcagataagtcaacttgtcctcactataaaagaaagcgacatccggagtttctacgtagcggaaggtatcgcctacctgcaccagaaaacggttcttcttgttggctgccaagtagccgagttccagttgccgatattcgggagccgcagaacggagggcactgttgcgctcgaacttgcacaaggctgcttctaggtcgctttcttcaatgggtttcaacagatagtcgatactgtttaccttgaaagccttgatggcatattcgtcgtaggcggtggtgaagataacgggcaaatcgacgggacactgctcgaatatctcaaagctcaacccgtcggacaagcggatatctacaatcatcaagtccaggctgccctgacgcaagagcagtacagcctgctccacgctctctgcccagcccgccaactgccaggaagggcgcagccgttgcatcatacgcttcagctcttcgtaggcgaagcgctcatcttctactaataaatactttaccataaaacgtgtctgttattgcgacaaagatactattttacctcttgtctttactaaaatggcatttgtcatttcagcgtatacctgaatcccaccgtcaggcgcagagtcggtctgaagcaaggctcgtcctcatcgttcttgaagttattgagaaaacctttcaaactacggtccgacatacttattccgcgtatccagttaccgcccactcccagataaacagccgtcttcctactcaaccggtacgaaggactgatgtatgacctcagcatgacggtagaatagattttcgatttcccgtcgacttccatcacggcagacatgccgtccatatcgagggcggtcagttccagcttcagcttcttgttcagccaggtggcgacggacactttcatgccgctggacatatccactttcagctcatacctgccggcattcctccaactgaagtacatcatgggcagtatcatcgggataccgtaagagttcgtcaaccccgcaccgatgcccaagtcgaggttcttccgcagtttatagacaaagatgattgctccattagccagtagggtcttcatggaaaccccgtccaacggggcatagacaccgctgcccacagaggctatgatactccacttgtcggacaggggacggatgtgggagatattcagactggcattcagcagattgtccggattcaactcccgcgcctgccccttattatggaatacgccataggcagcattgacggttgccgaccacgccaccagcctgcccttgtcgtcatgcctgacggaaagcggcaggttataccttcccgataccatcatcaggctgcccgaaccatactcgttgccgaggtcatccttcaacgaactttcgggcagatagtcgtaactgatatagccttgcccccggcagcagaacggccacgccgcaagccacaacaccaatagaatcacagagtttgtcttcatgggaatatgcaaatgttttctgcaaatataggcctgcggcaagtaagcgggaagcatttacggacgggatgcggaatggggaggacgaaatgcggaaaccggaaggcggaatgattccatgttttacgttacgcatttcacgttacgtaaaatacataatattttcgggataaaacaaatatcaggtgaagcacccatcaatctccaaactaattgtacctttgcggaactttaaacaaaaaaatgatgaaagaagaaactttcgattattccaaagttccccataacttcggcttatgcgctactgacacatgcccttatactgacacctgcctgcgccggattgcatatacgtatgcaccctcaaacaacatcttcctatatgtactgaatccgaaagcaatagagtccacagcgggaaaatgcaaatattattgctcgaataagaaagtgcgctatgccaaaggctttatccatacggcagaagccatctctgtcggccagtccggcacgttccgctaccggctcatcggcttatggggtatccgaagatattatcagaagcggaaaggggaaactttgctctcaccaaccgagcagcaacaagtcattgcaattgcccgtaacttaggactccaacggacggagtacttcgacgcttatgtagaagagtacgacttcacatgacagctccggtcactgtcttatcctgatataggtagacacatttac

SEQ ID NO: 4404 - DNA, 140724 bp, Unknown
  gut microbiota DNA sequence
ttcatctttgcataataaaatatctaaagcgacaaggtactctcaatgcagatagctggaaacaggtactaaataacacgaatgacattaaaggcttggatatatatcatggacttaaggaaattgtgcgctttgatttgacggacaaagtagcaccttttcgattgggagaagaggttggaaatataaaattgggtgcattgggcgaagcgatgtataaactcatggatttagacaaaattgatgaggctgatttggctcagattgtagagctggctcaaaaaatgcataaataatttgtctggttcttttctctcgtacaaataaatccaaaagcacattttgctcttattttgcattagtatgcaataagtttcccgaaaactttaatcgaattttattcgcaggtaaaaaataaggagttaagtatttacttaactccttgatttatattatattgcaatcttcctaatctttgctcatttcattacccccagacgcgtactctaccgggctgagctacatcccgaattgcgggtgcaaatgtacggctttattttaaaatagcaaatatttatagtgctttttttattgaatgaacttataatttgcagtttcaaggctttcggccaacgtgccctgctctctttttacttgtatgcctgcttcgcaaggcaatggctttgagcgggcaggcatactttgaatgaagttattgcaggtttaggctgtttcttacggaagtgatagccggactttcgggcgttacggatttccgggtacaataatcgaattccgcagatttttcgccgctaaatgatttccacttcagtttcaatttaacggtcttgccttctgtatcaggcagggcatccaacttgaaagcaaccagtccgtccgcatacctgccgtaaatgtcgcccttggcattgtggcggaattctacttcatacgggttttccggattctcgctcagcagcagattgacaaagtgctttgtttgatagtctccttgctgagttctaaagcgaagggtcagataaccgtcttctgcgatggttacccaatcgttcactatttccaccgggtcggtgccgtatacggtatcgttctcttcacccaaatccggggcgatgggtttggtaaggatactgtctatccagtttatatgtacagcttgggtgtagatatcgctgggctcgtccacttccttgtagtttaccaaagcgcggacttccttctcgccgtagggagatttcgtcatgttggtaggcagcagagtggtcttgtcatccaattgcagaaagactgtctggtctgcatcggtctttaccgttaccagggcattggggaatctcatggcataattatcatcgtcgtccaggcacgattggaggcttaaggagctgatggttgcaatagcgattaaaattttcttgttaaagattgacttcattttcatagtgtactcttttaaattaaacatttggaataggtcttgcttttatagaaatagcatatttgcgaaaaccctgcatgcagcattgttaattaatgataagagccggagtaagctggtgcggaatattattccccgatacatgaaagatatttgtatatcaggtggaatatgattacctttgctgtatgagatgcacatctcgcgtgtgttgagatgtatgtctcgaactgtatgagatgtgcatcttgtgcatgttggggaatagctgtccggccgtatggaaactggctttctgtttaggggaagtaaccttcgggtggggtgtcagcagtctggttgcagtaagaaacattatgttcattgtgaaaagagtatgagtatagtctatttggttcgaaagaaggttttccgcacggcagaaggggtgaagcaactctattatgctgtgcagcgtgtgttacagcggcgtggaggtgtgacggcagagctgctggcgcagcgtatggcatccagaaaagggatgagttcgggagacgtgcagagtgtattgatagatttgccgaagtttatagaggaagcgctgatggagggagagtcggtgaccattaaggggctgggttccttccatgtggcggtgacgagtgacgggtttgagcatcccgacgatgtgatgccgggcaaggtacgcttatcccgtgtctattttcgtccggataagtcgctggtggcgaggctgaacagcgggatggatttctaccgttatccgcttagccgatatttccctcacgatatgttgcgaccggaaacgctgcgaaaggagtgggccgagggaaagacgggaattccggatgaagacccagttgggatggaaaatgatacggaggacttttcgggggaggagtgagcgatgaatgtggaagaattcagagaatactgtctctccttgccgggagtgctatgctcccatgcactccctataaaagtcgaacatctcgaagatagtatccttgtctgccgtctggttgaggcagatgtcacccacttctttcaatagggtgaagttgatgactccggcggtattcttcttgtcatgcttcatcagttcgtacagctggtggtactgtttgcagttgaaggtgaagctgccataattctctttgacgaattggatggtctggcgcatcttgtccttcgggaatccggtctttatataagaaaggtagagttcgcagaccagcccccatgccactgcatagccgtgcagcaccggacgcctttcggcaagggcgaggctttcgaaggcgtgtcccacggtgtgccccaggttcagggctttgcggatgccatgttcctgcgggtcttcttctacgatgtgttcctttacctgcacggaacgtcctaccatggacttcagcaaggcataatctatcttctccgtatcgaaggccagcagttccgccagatgttccggggtactgatgaggccgtgcttcaacatctccgcatagccggagaagaagttatgggcatcgaggctgcgcaggaactcggtttccagcagcacgcaggcggcaggagcaaagacgccgatttcattcttcagaccgttgaagttgatgcccgtcttgcctcccacggaagcgtcgaccatggcgagcagcgtagtgggaacgttgatgtaggcgatgccccgcttgaaggtggaagcggcaaaaccgccaaggtcggtcaccatgccaccgcccagattgatgagcagggagtggcggctggcccctttctcactcagggcttgccatacggcagccagcgtttccatattcttgtgcacatcttctgccccgataataatctcttccgcttcttccagggcggggataccgtccagatgcgggcggcagaggcggtgggtatgctcgtcggtaaggatgaaaagcttgtcatggggacacttcgctatggcatgcgtcaggctgtttgccagtccttcgcaaaggattacttcttgtttactcatcttgttaattacaaattacgaattaccaattactgatgttacggattatgaaggaaagggagccttcttcattatattgtggcacaaagatagctcttttggcaataaaacgttatctttgtcccgtgaaattctatgggtggcaaggtgtttccgtcatctgcctcccgctatttgtaattagtaatttgtaattgattgatagaaatgagagcattacttcccgtttattgccgtccgctgggttatttcatcatagctctggcgttgttccttcctttcatattcctattgtggggaaaagtgacagatgccaacttgctgttttacaaggaatgctccaaactcctgatgatgatgggggcactgatgataatctttgccttgacgaagaacgagaataaggagatagagcaggtgcgcaacaaggccacgcgcaatgccatctttctgaccgttctttttatcttcggcggtatgctctaccgggtggcgcagggtgacctcctttcggtcgattcttcttcttttctcatttttcttatattgaatgtgctttgcttggaatttggtataaagaaagcgacagttgatagattatttaagcggaatggtcgataaataaagcaaatcgtcatgtggggcattaaaccttttgcccggaagtctgtcaaatgaaacagtgaataaaaggcattgttcatttagaatagacaaagaatagacacatgaagaaaattatcacggggatggcgttgctgttggtaacaacgctgtctgcattttcacagaccaaaaacattacggtatcgggccgtgtcgtggaggacaccaaggagcctgcgatacaagctaccgtgcagttgcttttgttgccagacagtgttcaggcatcgggtacggccactacggcacaaggttatttcactcttcccaaagtcagtgcgggtaaatacgtgctgaaggtttcctacatcggattcaagagccagtacatccctttacacctttatgctacgacaactgccaagaacgtgggtacactgacactggaaacggatgcggtgatgctggccgaggctgtggttacggcagaagcgccgcaagtgcaggtggtggaagatacactggtatatacctcatctgcctatcgtacccccgagggagccatgcttgaggagttggtgaagaagctgcccggtgcggagattgacgacgagggtaatgtgaaaatcaacggtaaggacttgtcgaagattatggtcgacggcaaggagttcttcggtggagacgtaaagaccggtttgaagaacctgccggtagatatgatagagaagctgaaaacctacgataagaagtccgatttggcacgtatcaccggtattgacgacggtgaggaggagacggtgctcgacctgaccgtgaagaaaggcatgaaccagggttggttcggtaatgccgacgtggccggagggacggaagaccgctatatgggccgctttatgctgaaccgcttcgtggacaaaacccaggtgtcggtagtgggttctgccaataacgtgaacgaccagggcttttcgggcggtggcggtcctccgcgctggcgcaggaacaacggacttactgcaacgaaaatgctgggtgtgaatttcgctacccaaaccgataagctggaactgggcggtagtgcacgctacaactatcaggatggggatattgcaagtatcggttctaccgaggactttctgccggacggcaactcttactccaactcgaacagcaggcaacgtaacaaagccaagaatttcaatgccgatttccgtatggagtggaagccggactcgatgacgaatatcattttccgtcccaacttctcgtacggcaaaacggacaatctctccaattctgagagcggtacgttcaattctgacccttacagtctggtgagcgaccccaataactggctgaatctggagaagattcttaatccggacgatgacccgttgaggagtatccgtataaatgctatcaacagcggttcgctgaacgacaacaagagtgtgtctacggatgcaaccttgcagttgaacagaaagctgaatgacaaaggacgcaatgtcacgttccgtggaagattcggttataccaataatgacaacaaccagtatacggagtcggaaacacattacttccagttactgaatgctttgggaggagactccatcttggttcgtaaccagtacatcactactcctaccaagaactacaattacagtgcacagctgacttacagcgaaccgatagcccgcgccactttcttgcaattcagctatcagttccagtacaagtatagcgagagcgacaagacgacgtatgatttgcagggctttccggattggggattgtcaacccagcttcccacgggatatgaagagcatgcggtggatagtctgggtaagtatgcggaataccgctactacaaccacgatgcatccgtgtctttgcgctttatccgcgagaagtatcagttgagcgcaggtatgtcgttccagccgcagcattctgtattgtcctataagcgcggcgactatatgattgataccacccgcaatgtgttcaacttcgctccgaacctggacttgcgcatccgtttctccaaggtgagccagctgcgtatgacataccgcgggcgtagcagccaaccgagtatggagaatctgttgccgattgtggacaactccaatccgcagaatgtacgtatcggtaatccgggcttgaagccttccttcacgcacaacatgcgattcttctataatacgtataatgccgaaaagcagcgcggtattatgtcgcacgtcaacttctcggcaacgcagaatagcatcagcaatagccgtgtgtacaattcggagactggtggatggactacaactccgaaaaatatcaacggtaattggaatgcgttcggcatgtttggcttcaatacggcactgcccaataagaagtataccatcaactccttctctaatgccaactatcagaacaatgtggcttatctgacgtccggtaagggagcagatgccgtggaacggaagaatacaaccaccaacctgacgctgggcgaacgtctgaatgccgcctatcgtaatgactggtttgaattcggcttgaacggaagcatctcctattcaatagagaaggataaactgacgcctgacaataatcaggagccctataccttctcctacggtgccaatacgcagatttccatgccgtggaacatgacgctctctaccaacattgccaaccagagccgtcgaggatatacggacagcagtatgaaccgtaacgagcttatctggaatgcacagttgtcgcagactttcctgaaagggaatgccaccgtcagcttcgagatgtacgacattctgaagaagcagagtaacatcagccgttcgctgactgcaagcggccgctcggtgtacgaatataacggcgtgaacagctattgcatgcttcacttcatctatcgtctgaatattttcggcagcaaggccgcccgcgataagatgcagggcagacgcggcttcggcggtccgggcttcggtccggggcatggtcctggcggtttcggaggacgcaggccgttctaaagcggaggggatcacccccctaatcagcttgtcattctgatacactctcaattctgtggcaggtttctttttgattatttttcagacgcggatgacgcagataagaatattaaaaatctgcgtcatctgcgtcatccgcgtcaaagcgatagcaagtataagttttcagacaagttgggggaagagggacttttatgttaatctctgtaatcttcggtgaaagtttctgtgtttttcctacatttgtttcacacttaattgtctgtgaacatgcttgattggaacttcattgccagccagattgctacgatagccttcgacattgtttatttcggtgccatcatcggaacgattgtcgtcattatcctcgacaaccgcaatccggtgaaaaccatggcatggatactgatactgatgttccttcccatcgtggggctggtgttttacttcttcttcgggcgtagtcagcgccgtgtgcgcatgatagggaagaagagttacagccgcttgttgaagaaacctatggcggaatatctggcgcaggactcatgtgcgcttcccatcaattacagtcgtctcatatccttgttccgtaataccaaccaggctttccccttcgatggaaaccgggtggaagcctataccctggggctctccatgctgcaatccctgctgcgcgaactggggaaagcaacgaagcatatccacatggaattctatatctttgaggacgatgccattgggcgcttggtacgtgatgtcctgatggaaaaggcgcgtgccggggtagaggtacgtgtgatttatgatgatgtgggttgctggcatgttcccaaccgtttttttgaagagatgcgcgaggccggtatcgaggtacgcagctttctaaaggtacgttttccgcttttcaccagtaaggtgaactatcgtaatcatcggaaaattgttgtcattgacgggcgcatcggctttgtggggggtatgaatcttgccgaacgctatatgcgcggattctcatggggcatctggcgggacacacatctgctgctggagggcaaggctgttcacggattgcagaccgccttcctactcgattggtactttgtggaccgtacactgattacgtctacccgctatttcccgaaaatagaaaactgcggtacttccttggcgcagattgtaacgagtgagcccgtaggcccatggaaagacattatgcagggacttgtcatatccatttccagcgcaaagaaatatttctatatccagactccctacttcctgcccaccgaagccgtacttgttgctatgcagacagccgccttgtcaggtgtcgatgtgcgtctgatgttgcccatgcgtgctgataaccgcttgacgcatctgggttcctgctcttatctggcagatgtgctctattcgggagtcaaggtctatttctataagaaaggcttcttgcactccaaactgatggtttcggatgatgagttgtccacggtaggctctacgaatgtggatttccgcagttttgaacataactttgaggtgaatgccttcatctatgacacagaaacagcgcttcagatgcgcgaaatcttccttcaagaccagcgcgactgcgtacaagtattcctgaagaactgggtgaagcgcccctggtatcgtaaggctgcagagagtgtggtgcggctgatggcgccgctgttataatgaagaatgatgaatgaagaatttcttgaagtgtattcatatcgtaccattcttcattcatcatttaaatatcgtgaagttcacgctcccgtatacccttctctccacaaagtgcggatgttcctcgaaactgtttttcttcccgtgttccaagacgaagagtccgtcttctttcagcaagttgttctcgaagatgagatcgggcaaggtttccagcccggcaagctcgtagggagggtcggcaaagataaagtcgaactgctcgcgtccgcttttgaggtatttgaatacgtcaccgcgtatgggtagacacttgtccgtctttaattcctgcataattttgcagatgaaggcatagtggtcgcggtctttttccacgctgattacttggtcgcagcctctggacacaagctcgatgctgatgctgcccgtaccggcaaataggtcgagggcacggatgccgtcctcaaagtccatgtagttggagagcacattgaacagattctctttggcaaagtctgtggtggggcgtgccttgaaggagtggggcacgtcgaaacgtcttcttttgtatattccgctgattactcgcatagggttatggcttgcaggtcaagattagtggcgggattcatgatgaatacctgccggatgaattttcgcagttcgggcagtagcagttctttgtcgtttaggtcaccggtcaggtgcagctcatcacgctcctgctcgaagccgagttgtttccatatatataataggtagtagacacggtcgggtgtgcttctgcattcaaaggaattggcaagaaggaggcgtccgcgctcgtagccgtatacgtctacggcatcttttcgcaagtgtgcatacatcttccggttgttgcccaagcggctctttgaggagaagaactcaatgaaggggctggcttgggaatagaacttgacatcgggatactgttcgcgaaggaaggagcagacactcttatccatgccgaacagtacgacagtgctgttcttatgcagtatgttgtattgtacggtttcgttttcccgtttaggatggttgtgatagaaaatgatttccgtttgttcgtcctcgaagaactccaggggaatgaacgtgaagcgtttgtctgccatgagcacattgacacggcggaaggggcgttccagccatgccagttcgcggaaggtctgtttcagattggcagtgagggagaaggactcgtccactgcacggtcgtagtaagagaactcgccgtcgcccaaagggttgaacacagaaaaagaaaatccatccgtactgagacggatggataatgtatactgttccgatttattaaaatcagtcgtttctatcatacgtttgtcggggtgagattattcccagttaccggcgttgttgttagctgtttccaagctaccaatcatcagaccgcagtacttgccaagtttggtttgtacgtccttgatgttggcaatttcttgtgcatccagaccgttcaaataaacttcgtacggagtcttcacttcgagcagacagaaaggagcaccggatttagctgtatcgttcttgatggccatttcgaactgtgcaccgtttccgaagggaacatatctcattgaatcggggttgaagcccttcgggaagatagtgtccaatacggctacccacaaggtgtcacgtttgaagttttccaatccccatttcttgacgtcagcatagttacctgtcttctttgccttattgatgatgttgatggctttcttttcagtcagaccgtcttccagctgcttatcgttcagttctccttgcttgaagatgaacggaagtttctggtttttaacaaagtcaatcagagagtcgaagcttgcagtatattgctggtcatgtaaagtacgatattccaattgtgctttacggatgtcaatcagacgtgcaatgacggctgcgtctctgtgcttctttgctttttcaaagttgataggacccataatgctggtgtaacaaatataaattagcaccaaagcacataagcctaaaatgacattaaatactgttttcatgataaatatgttttttagttgttatattcgcaccgcaaaaataaaagaaattaatttaaaaacgatagttccctttacttttttctgttacaaaaatgataaataactatttagaaaggcaaattaaggaaaattttccttaccaaccaactcctgagcaagaaattgctgtaaaatctttatcggagttccttctgtcaccccgtagcgaggtggtttttatgcttcgtggttatgcggggacgggtaaaacatcgttggtcggtgccttggtgcggacgttggataagttgcaacaaaagtcggtattgctggcaccgaccggacgggcggcaaaagttttctcggcgtatgcggggcatccggcgtttacaattcataaaaaaatctatagacagcaatctttctccaatgagctgagcaatttttctgtgaacgataatttgacaactcacactttatatatagtggatgaagcctcgatgatttccaatgagggactgtccggttccatgttcggcacaggcaggttgctggacgacctggtgcagtttgtctattccggccagggatgccgcctgctgctgatgggcgatacggcacagctgccgccggtgggggaggagcagagccctgccctctttgccgatgccttgaaaggctatgggctggaagtggtggaggtggacttgacgcaggtggtgcgtcaggagcaacagtcgggcattttgtggaatgccacccgtctgaggcagttgatagcggaagacgattgctacagcctgccgaagataaaggtttcggggtttgccgacattaaagttctgcccggaaatgagctgatagaaacgctgagctcttgctacgaccatgacgggctggatgaaactatcgtggtatgccgctccaacaagagggcgaacatctacaacaaaggcatccgtgcgcagattctctggcgtgaggatgaattaaacaccggtgatttgttgatggtggcgaaaaataactacttctggacggaaaaggagaaagagatggatttcattgccaacggtgagactgccgtggtgcgccgcgtgcgccgtacgcgagagctgtatggcttccgctttgcagacgtgacgctggtctttcccgactataacgactttgaactggaagtgaacatgctgctcgatacgctgcataccgactcgcctgcgctgcccaaggcagagaacgaccggcttttctactccgtcctcgaagattatgccgacatcaccgtgaagcgcgagcggatgaagaagatgaaggcagacccgtactacaacgccttgcaagtgaagtatgcctatgccgtgacttgccacaaggcgcagggcgggcaatggaagaatgtctttctggaccaggggtatatgacggatgaatacttgacacccgattattttcgttggctttacaccgcctttacccgtgccacgggaacgctctacttggttaactatccggaagaacaaatagtttgaaaaagagaggggtaccgatgcagtattccggcattttttgtatttttgtagatagaacaactataactgaacaagtatgaagaagctatactctctctttgccttgatagcactgctgtttaccgcttccggttgcgaggacgattaccggagcatggtacttttcgaaggcgtggagcctatttatcagattgggacatgtgataatctggtgtccaatctttcttattatctttctgaaacaaacgaagatacagtgctgggcattgacggtggtgacggttcctataatctaattaacgaacacgagtcggtggcttccgtgacttttaccgatgatgtcaacgggtatcagcgtatcaagattcatccgctggcagagggggagacgattgtgaaggtgatggatggttccggtgaggaaacacaactgcgcatcacggtgaaaggtcgtaggcaatatacgttgacgaagatgggcttcgagtatggtatcagtagtggtgcaccgacggaactgctgggtgatgtttctaaggcacttgccgagcgtccttgggtgaaggatggtgggtattatgtgctggtgcccgaagatttctccaatagtatgtggaaaggtgtattggaaatctatccgacgggaaaagaggaggaaccgctaatggggatatacgagacagttccagtggaagatgagaacggagatacatatgcattgtggcagtttacttataatggagagaagaggctctttacgcggacggtctcgggaaatggtaaatgtgtacttgcggaaaatgtaactcctttctgtccttccggtttgttgcccgaaggtgcactggtggtttatcgcgaaatgtttatacttcggatggaataaggttttagtggaaatcttgtcaagagcagatttacgaaagattaacagacgggaggcttaggcttcccgtttttgtttctgttgcgcatcatctgtctgttctgtatgcatcattcgtttgcttcgaatgcattgtctgtttgttctggactaatcctccgttccctccacttcactgtcccaaaccttagggtttttcacggaaaccccagggctttggagggtaaatgccagccatttcacttgctaaggtgtggcatttaggatggtaaggtgtggagtttggggagccggcatgtggcatttcaaatggaataccgtggaggataaaaagaaaaggagaagcaatgctcctcctttcccggtagtttaattttgaaatatctaaaaaatgacattacaaatatacaacatcacagaggcgatgtcaagtgtttcgccaattattttcaattataatcctgccaattccaaaactttgtcaatggcagcgttcagtccgtcagcattcttaccgccggcagttgcaaagtggggctggccaccgccaccgccttggataagtttggcagcttctttcaccaggttaccggctttcagtccgcctgccacgaggttgtcgctcagcatgacggtcagcatcggcttgccttcggcttctgttcccgctacgaagaacaggttttccgtaatctggccacgcaactggaaggcgatgttcttcactgtttctgccggcaggggagcacagaacttgatgactttaacgccattgacttcctgcacgttcttcagcagtctttctttcagctgtgcttctttctctttcatgaagtcctctacctgcttcttcagtccggcgttttcgtcaatatacttacggatggttccggcaaggtcgggtgcgttgttgaagagcgctttcaagtcgtgcagcgtgtcctcgatggtgttcatcagttcctccacgcgtgcacccgtgtaggcttcgatacggcgcacaccggcagccacggagctttcggagataatcttcaccataccgatgtttccggttgcagccacgtgcgtaccaccacagaattctacggaagaaccgaactggataacgcgtacatggtcgccgtacttctcgccgaacagagcgatggcgcccagttctttggcttcttcgataggaatgttgcggtattccttcaaaggtatgttggcgcgaatctttgcattaacgatgtgttccaccttgcggatttcctcgtccgtcaccttttggaagtgtgagaagtcgaaacgcagggagtccggtgtaaccaaagagcccttctgctctacatgttcgcccaacacttcgcgcagtgcagcatccagcaagtgggtggcagagtggttggcggcacaagcggcacgcttgtcggtatccacgcatgccatcatcggagcttccatgtgttcgggcagcttcttggtgatgtggataggcaggttgttctccttcttggtgtctaccacttcgatggtctcaaactcgttcaccaatacaccggtgtcacctacctgaccgccgctttcggcatagaacggagtcttgtccagtacaatctgatacaaggtttggttcttctgcttcacttggcggtagcgcagaatggatgtttcgtattccgtatagtcatatcctacgaattcggtagtaccctcctttagcgtaatccagtcaccggtctctatggcggcggcattgcgggcacgctgtttctgctgctgcatttcggcgtcaaactccttgatgtcggcagtcatgccgttttcgcggagaatcagttccgtcaagtcgagcgggaaaccgaaggtatcatataaggtaaaggcatcctttccgctgatttcgttcttgccggcggatttggcgtctgccatggtcttttccagcaggcggatacccgtctccagggtgcggaggaaggaatcttcttcttccttgataactttggcaatcagttccttctgtgcatccagttcgggataagcggcgcccatgttctcgatgagtacggggaggagcttgtacatgaatgcctgcttctgtccgaggaacgtgtaaccgtagcgtacggcacggcggaggatacgacggatgacgtaaccagccttggcattgctcggaagctgtccgtcggtgatggagaaggcgatggtgcggatgtggtcggcaattacacgcatggcgatgtccgacttctcatcttcgccatacttcttgcctgccatgtctccgatggctttcagtatcggttggaatacgtcggtgtcgtagttggaggtctttccttgcagtgtgcgcaccagtcgctcgaagcccatgccggtgtcgatgaccttggcgggaagtccttccaggctgccgtccgccttgcggttgaactgcatgaacacgaggttccagatttcaatcacctgcgggtggtctttgttcaccagctggctgccgggtactttggccttctcttcttccgaacgggagtccacatggatttccgaacacggaccgcacggtcccgtatcacccatttcccagaagttatcgtgtttgttgccattcagaatgtggtctttcggcaagaactgctcccagtaagaagcggcttcgttgtcgcgttccagtccttcttcggcgctaccttcgaatacggtggcgtagaggtctttggggtcgagtttcaatacatccaccagatactcccatgcccaggagatggcttccttcttgaagtagtcgccaaacgaccagttgcccagcatctcgaacatggtgtggtggtaggtatcgtgacccacttcctccaggtcgttgtgctttccgcttacgcgaaggcatttctgcgagtcagcaactcttttgtatttcgccgggtggttgcccaaaataatatctttaaactggttcattcccgcattggtgaacatcaacgtggggtcatccttaatcaccatcggggccgaaggcactatctggtgacctttactttcgaagaaactcttgaaagagtctctgatttcgtttgcagtcaacatactctctattgatttatctgattctaatttgatttatcttcttctgtcgttttttgtccgtttcttactactaactacttgctacttagtcttaatattcttgaaaaaactgtgcaaagatagcttgtttttattacttttgtcgcattgacaagcgaaatatttcctaagatgcgcaaagtttactacatttataatccccagacgcagacgtatgaccgtatttatcctaccgtgaggcagcgggcgttgagcattctccgccgtttgttcataggtatggggctgggtgcgggcagtttcatcgtattgctgcttatcttcggctctccgtcggagaaggagttgcggaaggagaacagcaaactgcaggcgcagtacaacgtcctctcccgccggctggacgaggcgatgggagtgctgcaggacatacagcagcgtgacgacaatctgtaccgggtgattttcatggccgaccctattccttctgccatccgtcaggctggatatggcggcaccaaccgctatgagcatctgatggatatggcaaactccgacctggttatcaataccacgcagaaaatggacatgattagcaagcagctctatatccagtcccgctcctttgacgatgtggtggagatgtgcaagaatcatgatgaaatgctgcgctgcattcctgccatacagccggtttccaataaagacctccgtaagaccgcttccggttacggtacgcgtatcgaccccatttatggtaccagcaagttccatgagggtatggacttttcggctccccagggcacggatgtctatgccacgggagatggcaccgtggtgcagatgggctggcaatcgggctatggcaacagaattgtgatagaccacggcttcggttatcagacggtgtatgcacacttgcgcgatttccggacgaagttgggcaagaaagtggtacgtggtgaggtcattggcggggtaggtagtacgggcaagagtactggtccgcacttgcactacgaagtacacgttaagggaaaagttgtgaatcccgtcaactactacttcatggatctcagtgccgaggattatgaccgcatgatacagattgcggcgaaccatggtaaggtgcttgattgacggatgatttatagagaaaggattacatcatgctgaatacagataagaatttaaagttatattactccatcagcgaggtggctgccatgttcgatgtcaacgaatcactgctccgtttctgggaaaaggagtttccgcaactcaatccgaagaagggggggcggggaatacgccagtaccgtaaggaggacattgagacagtgaaacttatctatcatctggtgaaggagcgcggaatgaccttgcccggcgcccgccaacggatgaaagacaataaagaagctacgatacgcaactttgaaatcgtagatcgcctgagagctatccgcgaagaactggtaggcatgaaactggcattggatgagtttacttacgaggatgtggagagcttgaaggaaaatattcaaggactgaagtagaataaataccactccgtttattcctctactctcgtcacttgttttatattctgtatctgcttcaggttattgcagatagtgcgcacgtcgtccacatcgtgtacatagagttgtatctttccttcgaagataccgtcgttggtttcgatggtcagtttacggatattcacgttgagctggcgggagatgacttgagttacttcgttcagcaatcccatgctgtctataccttttatatatatggtgacgaggaacgacaaatccttgtgagtgtcccactcggtggcgatgatacggtttccgtagctactcttaaggcgggtggcaacggggcattggcgcttgtggatgacaacacggttttgctcgtcgatgtatcccagtacgtcgtcacccggaatgggatggcaacagtcggccataatatagttctttgagatggtctcttccgtcagcttcagaatctgcttagtgttgattttctcttgcggtgttttctcttccggttgttctttggcatccttgttgtccttgttaccgaaggagaaggtcaggaacttcttccagttgctgttctgcttttccttgaacacgttcttgtcggcatcgcccagcacaacccgtttgttgccgatggcaacgagcagctcgtcgcgggtgtggaagccgtgcagcctggtcagcttgtccagagcagcatcatccatacgtatatcctcgtttttgaagaattcgttcagtatggtttcaccttctttctgataggctttcgcctctttgcgcaggatggcggcaatcttggcgcgggcgcgggcggtggtggcatacacttcccactccggctgcacgcgttgcgatttggaggtcaatatctctacctggtcaccgctttgcagtttgtggcttaggggaaccagtttgtggtttaccttggcgccgatgcagtggctgccgatgtcggtatgcaaggagaaggcaaagtccagtgccgtagagttctgcggcatggtcttgaggtcgcctttcggggtgaagacgaaaatttccgatgcaaacaagttcagtttgatggtatcgagaaaatcgatggcgtccggttgtgggtcgtccagaatttccttgatggtacgcaaccatttctccagttcgccttcatcttcgctgcctccgccttctttgtatttccagtgggcggcaaagccttgttcggcaacgtcattcatgcgttcactgcggatttgtacttcaatccattgcccgttgttacccataagggtgacgtgcagggcttggtagccgttggctttgggatggctcacccagtcgcgcaggcggtcggggtggggcttgtatatcttggatatggagacgtaaatgtcgaagcagtcgtttagctcttcctctatattgcggggctcgaagatgatgcggacagcaagcaaatcatagatttcctcgaaggggacatgcttggtctgcattttgttccagatggagtagatggactttacacgggcaaggatacggtatttcagtcccattttgtccagttgcgcccgtatcggagcggtgaactcattgaataccttgtcgcgttccacggcggtggcttccagtttctcttctatctcgtggtactcttccggatgttcgtacttgaagctcaggttttccagttctgtcttgattttgtacaagccgaggcggttggcgagcggggcataaatatagagtgtttcgcctgcaatcttgaactgcttgttgggcagcatggagccgagtgtacgcatgttatgcagacggtcggctatcttgatgaggataacccggatatcgtcggacatggtgagcagcagcttcttgaagttctctgcctgcgccgaggcacggtcgccgaagataccgccggaaatctttgtcagcccgtctacaatctgggcgattttgggaccgaagatgttttcaatatcctctacggtgtagtcggtgtcctccaccacatcatgcagcaatgccgagcatatggaagtagaccccagtcctatctcattacagacaatctttgccacagcaatggggtgcatgatgtagggctcgccggaacgacgcttaatgcccttatgcgcctggttggcaaagttgaatgctttggttattatttcgacgcgcttgcggtgcttggtggccaaatagtcgttcaacagttcttggaatgcctgttcgatcatttcctcttcggctttttccttttccttctgacttatattttcttccatatactgctttctcctttcttcacttcactttttgcaaaaataagcaattttcaacaccgggcaagcgtttatgtctttatttataaatcttcaagcgctttcctgcggagattctggtactgcgcaatccattccaactttttaactgattgacagtgacgccgtatttccgtgcaatgctgccgagattctcgccactgcgtatcttgtggtaggtgacattccccgtagcggtactgcctttgctgctacgtgccgtcgagcgtgtattggaaacggccacgactctgcggttcttgaacagctcgttactgcggtgggcatagatggtgtcttgcttgtcaatgaaggcactgatgtagttgatggggaggcgtagcgtctgcggcttgctctctccggggatgatgcttttcttgaattggggattcaggctctttatctggtccaggctgatgccgcataggtcggaaatctgctcgaaatgaaggttacggcttacttgcaccgtatcggttgcttccggaatgtcggtttccatggggcagatgttgtgcttgcagtagtaggtcattacgtagttggcggcaatgaaggcgggcacgtagccgcgtgtctctttgggcagatagttgtagatttcccaataatcggttttccctcccgagcggcggatggctttgttgatggtgcccggaccgcagttgtaggcggcaatcaccaggttccagtctttgtaaatgtcatacatgtccttcaggtagcgtgctgccgcccaggtcgcctttatcgggtcacggcgttcgtctacgaggctgttgctttccagtccgtatatctttccggtggcgagcataaactgccatagtccgcaggctcccgcgcgggatacggcagaagggttgagagcggattctatgatgggcaggtatttcagctcgagcggcaggccgtaggcatccagcgcttcttcgaagatgggcatatagaagttgcaggcgctcagcatgaaggcaacctggttgcgcagacgtccggcatacatgtcgatgaacttgcgcacaatctcgttgtatggcatttccatgacggtcggcatgcgcgacaaccggtctatgtatacagagtcactgaacatcgggtttacggtagaggtgctgcagtcttttcccaagtctatgtaattcttggctttccagtcattgagcaggctgtccagcggataggtcatgcttttgggcagctcgatggattcctggcgttccgtgccgttttcgcggataagcacttccacgctttcttgcgcatgcatggccggagcggtgaagagggcacaaaacagaagcgaggaaccgagaataattcttttcatatatatggccttgtgtgtcattaggtaataatttatgctttaattttcgtttttagaatcggaaactgcattgcacgccgacgttcttattagaggaaccagtcatctggctgttgattatggcaggttccactttcatgctgaggtcgggggtgatgtcaaagttggacagctctgcgtctacgtatgcgtcgacaacagacagcaggtatacaccgataaaggcgaagatgctcaagtcgcggtatcgtcggaaggtatccttacgcttccgtagtgtctccgtcagctggctttcggtatagttatagttgggaggcagcaggtcggtaatggtactggagttgaaattaccatttacggcatccttgtaggcggccgaatagtccttatacatcttgctgttccacgtaagggcataggcacaaccggcaaatcctccatagaagatgggcagtttccaatacttgcggttgtaaatttgtccaccgccgggaatgacgagggcaagccaggtggcttttgtgggattaggtacccaccttttggggtcgatggccttttgcagactgtctgtaggcacgggctgttccttcaggtcggggctggcagtcatttccagcatcttccgcttgttttcggctgcaagactgtcggcaacagtgaggctgtcccggttcaccacggtgttgagtgtatcggtctgatgccgctgcgcacgcttggaagcggcacgtggacggtcctgaccatacatagcaatccctgccatctgtaaaaaacagagcagcagggcaatggctaactgatatattcttccttttttcctcatttatttcttcagcgtatcaagaatgccgatgatacgttccaattcttcttcgttattgaacgggatactgattttaccttttcctttctccgagcaggttagctgcaccttggtactgaaaaagcccgagagctgttgtttcagcatattgaattcttcgggcagtttggcgcgcttgggggcaatcttacgaccaccgctcttcacgctttcgccttcactcagtgactttacgatttcttccactttgcgtacggaatacccgtgctccaggatttcttcgaaaatcttcacttgcagtttgggatcgccaagcgttaccaacgcgcgggcatgtcccatgtctatctgcttgttctgcagtcccatctggacgggggcgggcagtttgagcaggcgcaggtagttggcaatggtggtacgcttcttaccaacgcgttcgctgaggcgttcctgcgtcagtccgtattgttccaacagatgctggtaagcgagggctatttctacggagttcaagtcttcgcgctgtatgttttcgatgagcgccatttccatgacgttctcgtcatctgcagtgcggatataggcagggatgcttgtcagtccggcaagctgcgaagcacggaaacgacgctcgccggcgataatctggtattcgtcgtcgctaagcttgcgcagggtgatgggctgtatgatgccgatttcggagatggaatcggctaactcctgcaacgcaaccgggtcgaattcatgacggggctggttgggattgaccgtaatcttcgacagctctatctcattgatagaggaggagccttcggtctttacttcatccatggagaagagggcgtctagcccgcgtcctaatgcatttctttgtgccatctgtttatttactatttgacgatttacaatttaaccatacgggatgatttgtttgtgcattgtaaatatggtatttatcactaatcattaatcactaaccactataatcacttcttttcgtttctgcttatcaattccttggcaagtgccatgtggtttttggctccggttgagtctgcgtcatagagaatggtgggcaggccgtagctgggagcttcgctcagtttcacattgcgctggatgacggtgttgaataccaattcctggaagtggcgtttcacttcatcgtaaatctggttggcctggcgcagacgcgagtcgtacatcgtcagcaggaagccttcgatttcgagggcagggttcagcttggacttgatgattttaatggtattcagcaatttgctgatgccttccagtgcaaaatattccgcttgtacggggatgattaccgaatcggcggcagtcagtgcgttgaccgtaatcagacctaaagacggggaacagtctatcaagatataatcaaactcattcttcagcggagcgagtacttctttcagtatcttttcgcggtttttcagattgagcatctctatttcggcacctaccagattgatgtgggaggagattaccttcagtgtgtctatctccgtgtcatgaagggcctcgcgtacgtctgcacggtcaataatgcactcgtagatagtacattccgactgcttgatgtccacacccaatcctgaggaggcattggcctgcgggtcggcatctacaacgagcactttcttttcaagcgtggcgagtgaggctgcgaggttgattgtcgtcgtagtcttgcctacaccacccttttggttagccatagcaattatttttcccataatctcaatatttattggcagcgaaataagtgataattccggatagcgcctacaaatttggagaaagattgcaaaaacggttgataagtcggctgttttgttaataactcacagacgtttaccgctgtttttcttcttgtaaattgcgcgtaaagcgttctttctctgtttagtgggcaaatatacgtatttatcttgaaatgaagctgattttttgtctcgcttgcagaagattaagatttgtaaaccaatggaagacattggcttggactattctctctacttgcatgagatgtacatctcgtgttgtttgaaacgtgcatctcatgttgctcgagatgtacatctcatgcagatggactaccgtgtggaagatggtcgggggataagttgttcccgggcagaaggagaggagctggtgtcagaccaaggctttgacgaactcccagcagaagtacgcacacatcacacatttcactactgtgcccagcaagaatccaagcagcgagcccagccccgatttcaaggcctggtctgtcttgctgcctcccatcagttcgccggcaaaggctccgagaaaggggccgaggatgatgccccaaggcatgaagaacaaccctacgatggtgcctatgaggcagccgcgcgttccccaccgactgcctccgctgtatttgctgcccagcatcgggacgaaataatccagtatctgtacaaggacgactgctgccagccataaaagtaactgcgtggtggaaaactgcgccttgtccgtgaaatgtagaagcaacaagcctgcataggctacgggcggtcccggaatcataggcaggatgcagcctgccaatccgacaatcaggcagaggatgcccaagatgatgagaagaatgtccataggtgtatcgtttctgttggtgaagatgacagcggttgttccctgctactcgaatcggttgtatatgacaatggggcgggagcggcgtgtgctcatcgacgggaaccatatatcgtcggctgtgaggccgcattgcttgatggcttcggcgcagtattccagtcgtccgaagtcggcatcgacattgtttgtaccgaatgtgagtttgattccacgtgctttggcgcgacggataatctcgaaactgggaatccggtagcgtgcattgatttccagagcgattccatgttgttgcaatacattcaatacgcgttcaatgcgtccgtccgtccagtacttgtcgtaatcatgcgccatagtatcgggcaagaaggtagggttggcataaatgtcggctggctcgttggtcagaatcaggactgtttggtcgacaaggtggtccatatactgttcaagcgtaatgtcatcaaagagtgcttcttcggcccggtagatgcgcgaattacgtcccttgtggtctatgatggtcatggcgtcggtaaacaggtaatcgaaaatccccaaagcttcctgcgagaaagttgccgtccatttgcgtccctcaccttgtacaccgcacaggaatggcatcccttttacttcattaaaatagtcgtacacttctttgtcatcggccagcatacgtcctacgcctccttctccggcattgggggcgacaccatagttgataccgtaattcatggacatggcgtgtgccatttccttcgtcagccctcctttcaagtgaacgtgatagtctataactgggaaatcgtgctgctgtagcctgattatctcatccgtgcgctcgtctaccggagcaagcgtgtcggcttcgttgcgtgcctccttggcaagccgttcgatggcgagattccggaatgacacttcgccgtgtatgccttgcagggcaatggaaccttgactcagcagttgccgggcgtgctcctctgtgcgatatgggtgtccgggttcggtataacaaacaacttcggttccgttaatgcagacaatgatgttttgtccgcgtacggttatctcgaagtcaaaccattctccatcttttgcgagtgagcgatagaggttgcgcaccgaggcgagtgagccgctcttgcgtgtgccgtcgatgtctccgttacggaatatcacttcataaccggactcgccgtccgtatgaaagaggaggcctgcttcggagccgggttgtgtgagggcttctccggtgagtcggaaattttggtattctttgtcgttgaagagcttccggccttctgcaatgaccgggtctgccgtgtgaagcgtagatgtcccgtcattccattggtcaagtggctcgggagaactgctcctgccacagcttgtcagggttgttagaaacagaataattgcggcagctgccgtctcgatgcgtgcagcaatggtagaatggcaagaagtgttcattatagcatggattttatgaatgattatattccaattattgtcggtacaaagttagccttttctgaaaatatctttgaatacaaaagaattattatctttgtagtattctgtttaaagcctttttagctacttttgcacgataataaaaaagaaagttatggaaaatcagagacctttgatattgatttccaatgatgacggcatcattgcgaaaggtattagcgagttaatcaaattcctccgtccgctgggcgagattgtggtaatggcgccggatgcacctcgctctggaagtgcgtgtgcgctgactgtaacggaacctatccactaccagttggtccgtaaggatgttgggctgacggtatacaagtgttccggtacgccgaccgattgtgtgaagctggcttttcatacggtgctcgaccgcaagcccgacttggtggtaggcggcatcaaccacggcgacaattcttctgtaaacctgcattattccggtacgatgggcgttgtgatagagggatgcctgaaaggagtgccttccatcggattctccctttgcaaccatgagccgaacgctgattttgaacctgcaggtccttacatccgcgagatagcccggctggtattggagaaaggactccctccgttgacatgcctcaatgtcaacttccccgataccaaagaattgaagggtgtgaagatttgcgaacaaaccaaggggcaatggaccaatgaatgggaaaactttgcccatagaggagatgcccattactactggctgaccggcgagtttgagaacaacgatgccgaaaatgagaagaatgaccattgggcgcttgataacggttatgtggcaatcaccccgaccacggtggatgcaacggcatacggcttgattgatgaactgaaagcatggttctgaattaattgacaattatcaattgatatgaagtattacttgattgtcggtgaagcttccggcgacctgcatgcctcccatctgatggctgcattgaaggaggaggactcgcaagcggagttccgtttcttcggaggcgacctcatggctgcagtgggcggtgtgatggtgaagcattacaaagagttggcgtatatggggttcattcccgtactgctgcatctgcgcaccatctttgccaatatgaagcgctgcaaggaggacattgttacgtggcagccggatgtgctgattttggtggactatccgggctttaatctggatatagccaagtttgtccatgccaacacaaggattcctgtcttttattatatttctcccaagatttgggcatggaaggaataccgcatcaagaatattaaacgggatgtggatgagctgttctccatcctaccgttcgaggtggagttttttgaagggaagcacgggtatccgatacattatgtcggcaatccgacagtggatgaagtgacggcttttcttgcttccagctcagagacattcgacgactttgtccgggcaaacggactttcggccaaacccgttattgctctgctggctggtagccgcaagcaggaaatcaaggacaatctgcccgacatgcttcgtgcggcagcttcttttcccgattatcaactggtgctggccggtgctccgggtatttcccccgagtattacaaacgttatgtgggtggggtggacgtgaagattatcttcaacaagacattccctttgttgaggcaggcagaggctgcactggtcacttcggggacggcaacgctggaaacagctctgtttcgtgtgccgcaagcggtatgttaccatactccgatagggaaggttatcgctttcctgaaacggcatatactgaaagtgaagtacatttccctggtcaatctcatagccaaccgggaggtggtgaaagagctggttgcagataccatgacggtagagcaggtacgctcggagctgaaccgcattttgtacgataaggaataccgccgtcagatgctcgagggatatgagtatatggcatcctgtctgggagaggcaggggcacccaaacatgctgcccgcgagatggtggcattactgaggaggagggaagaataatcgaaaaattaagaatttgttaaaatgggaaaagccggtgcagtaaatgcccggcttttgtattttctatatagaaacaaatgaaaaggactttgattatgaaaaagctacattggttatttatggcaatatgtttggcagtgatgcccgctttgcaatcatgtgatgataacgacggatattctttgggtgattttaccccgcctttgtgggccactgtgcgtgttacgggaaatgccttttatttaaactgcgatgtttgggggacgctctggccggtgaatacggacatagggtggtatgatgctgtggatgggcagcgtgtgattaccgtgttcaatcctttgtgggacaactatgcaggatatgaccatgctgtgaagctgctgcgtctgcagaacgtcttgacgaaagaggtggagacgctgactcccgaaaccgaagaggaatttggtaatgaccccgtgtttatatataaaggtgatatcaccatcagtggtggctatatgaacatttttttcatgcagaacctgccatcttcgactgataataaacaccgcatcagcctggtgcgtccgcaagaagatgatgctttgtatggcgaagatggatacgtccatttggaactccgctataacgattatgatgacctgacgggacgtcgtagtcctggtgctgtctcctataacttgaacagtctggacatcccctctgaaaccaaaggcatcaagttgaaactcaattcagaagagaatggagaggtggaagtaacctttgatttgaaaactgcggggagtaatgaaaagctgactactaatgtggatttgtccaatatgcagttgaagtaagaaagagtttgcgagagtatatagttagaaagagcacccgggattttgatgtcattcatcttgcccgggtgctctttttatatttgttttatgtaagtttggtcatgtgagccgtcgttagaacatcgtcaaggcatatagataaacaactgctgcaggaattgccatcagggcactgtcgaaacggtcgagcatccctccatgccccggcagaatgttaccggaatccttgatgcccaattggcgtttcatgagtgattcggtcagatcgccccaagtgccgaaaatgacgacaacgattgccagacctacccattgccatcctggcataaaaggaaagaaatgtgcaaagccaagagaggaagcgatggagaatattccgccgccgatgctgccctcccaggattttttaggtgagatacgttcgaacagacggtgtttgcctatcagcgaacctacgcaataggcacctgtatcgctcaaccagataaatacgaaaatggaaagcggtagaatagggttgtaggtcacactgctcgtttccggggaattctgaaaagcaagtacgttcagcagggcaaaggggagtgccacgtacaattggcttagcatggagtaggcccagttacccgtcggattctttttcttgaggtaaagttccgtaatcatcatgtagagcaatagtcccaaataaggaaggaatactcgtgctcctacagactgctgggtacagaaactcatcaatgcaaggaaaaggtaggctccccccaatgcagtgatggtcttgtttatgcttacttcgccgctcttgctgactaattgggcaaactcatgtacgctcagtgcgctgataatggtgaacagtataccgaacgaaagggggctgtaaagaatacagcccaccaatactatgacgaataacacgccggtaacggcacgttggataaagttatttttcatgcttttcttcttccttaacttccttttctgcttctatggctttttgctcttcttcttgctccgcttttttcagctcggcagcagtcttgtttgcactgatttcttccgaacgggaagcccatggacgtttcccaaagatgtgttcaacgtcttcggcaaagattacttctttgtcaatcagcagttgtgccagccggttgtgcccttcttggttttcggacaatattttcttggcacgttcgtactgttcattaaccatctgcttcacttcttcgtcaatcaattccgcagtcttttcgctatacgggcggttgaaggaatattcctcattattataatagcagaggttgggtagtttttcgctcatacccagataggcaatcataccgtacgcctgctttgtcacgcgttccaagtcattcatggctccggtggatattctacctaagaataggtcttcggcggcacgtcctcccaaggtggcacacatctcatcgagcatctgttccttagtggtgatttgccgttcttccggcagataccaagccgcgcccaaagcgcgtccacggggtacaatggttactttaatcagcggattggcgtattccagtaaccaggagatgctggcatggccggcttcgtgtatagcaatggaacggcgttcggcttcggtagtgattttggttttcttttctaatccccccacaatacggtctacggcatccaggaagtcttgctttccgacgaacttcttgccgtggcgggcggctatcaaagctgcttcgttacatacattggcaatgtctgcccccgagaatccgggagtctggcgtgccagaaggtctacatccacactattgtctatcttgatggggcgcaggtgtacaccgaatacttccttacgctcattaaggtcgggtaggtctacatgtatctggcggtcaaaacgtccggcgcgcagcaatgccttatccaaaacgtccacacggttggtggcggctaagatgataacaccactattggagccgaaaccgtccatctcggtcagtaactggttcaatgtgttctcgcgctcgtcgttgccacccatagcggctgctttggcacgggcacgccctacagcgtcaatctcgtcgatgaacacgatacaaggcgctttttcctttgcttggcggaacaaatcgcggacacgggaagctcccacgccgacaaacatttccacaaagtcggaacctgccaaagagaagaaaggtacgttggcttctccggccacggcctttgcaagcagggtctttccggttcccggagggcctaccagcaaggcgcccttgggtatcttacctcccaaatcggtatatttctggggctctttcaagaactcgacaatttcttctacctcttgcttggcttcagcaagtcctgccacatccttgaatgtaatcttgatgggggaacctttttcaaacaattgggccttggactttcctacgctgaagatgcctccacctccgcccatgcctccaccaccgctcatgcggcgggacatgaaaatccagaaaccgataaggaatgcaaaggggagaatctgccacaaaatggcaccgaagtagttccgctttttttcgtagttaatggagccgtcaaagtgggcgtcgtctctttccttttgcaggaaattacctaggctctcgcgtgagggggcctcggtcgtaataagcggattcttgcctacgcggctggagtcctggcgaaatacgtttcctacgtgctggggtttgacgtatgcttcgacggaattgtcgtcgtagccgatgactttgcttatataaccgtctcgtacatattgctggaattcatcataagagatgtttttagttgccgtaccactttcattggtcaggtacaaccccagcaacatcatcgctataatcatatacagccagttcaggttgaacttgggcatattcactttattgggtttcttgttggtattattgtccatacgttttgattaatcgaggtcaggaatttgagttaatttggcgtctgcccataggtgctccagattgtagaattcccttgtttcaggcaggaagacatgcaccaatatgtccgagtagtccatagctacccattcggcattgcgcagcccgtctacggcaaagggcttggtatcggcacccttgcgtgtgaagtccctgatggattctacaatggctgtcacttggctgggagagtttccttggcagatgacgaaataattgcatattgtatcgtcgatttttgtcagatctgcgatgacgattttttttccttttttatcttgaataccttctgttatctgttgaatcagtttcttcgtttcgttcattatacattattatattaaaacagttgacaaatatacgttgatttctcatatcaaacacgcaaaagaggaaaactctttcaatttttgattttttttagttatataatcctttggattacggtatcttatcagttttttgcgaaaaaaatactcgtttttgttttgatttatagaaatctttgtatctttgcaaccgcaaaacggaaataataacaattgggctatggtgtaatggtaacactacagattctggtcctgtcattcctggttcgaatccaggtagcccaacgaacttaccttatttaagtcaaaaaaccactaaaatcgcaagttttagtggttttttgttgcttttcgaccatgtacgaaaatttcagtgtaggtattcggtggcaaattcagtgacaaggcttctgtaagccggaaatattctgtaaatttgtagcatttcaacattaaagcagaattttatggcaaaagaattagcactgaagtacggctgtaaccctaaccagaagccggctcgcattttcatgcaggagggggagttacctattgaggttttgaatggacgtccggggtatattaattttatggatgccttgaatggatggcagttggtaaaggaactgaaagaggcgaccggtatgcctgctgcaacttcattcaagcacgtcagtccggcgggtgccgccatcggcttggaactcaacgagacaatgaagaagatttattttgtggataatcttccgctctctccgcttgcttgcgcatatgtgcgtgcccgcggtgccgaccgtatgtcttcctatggtgactttatcgctttgagtgatgtgtgcgacgaggctactgcacgttttattaaccgcgaggtctcggatggcgttattgctccggggtatacggacgaagcactggctatcttgagggaaaagcgtaaaggaacttacaatgtgattcagataagtcccggctataagcctgccccgattgaacataaggatgtctttggtatcacgtttgagcagggacgtaatgagataaagctgaatggagatgaactctttgcgaatattcctactcggaataagaatttcccggaagcagcgaaacgtgatttgatgatagcccttatcactttgaaatatacgcagtcgaattctgtatgctatgtgaaggacggtcaggctatcggtattggtgccggccagcagagccgtatccactgtactcgcttggcgggcaacaaggccgacatttggtatttacgccagcatccgaaggtgttgaatttgccatgggtagagaaaatccgccgtgccgaccgtgataatacgattgatgtctatatcagtgaagaccatgacgatgtgctggctaacggtgtttggcagcagttctttacggagaaacctgaagtgctgacccgtgaagaaaaacgggcttggttggatacattgaaaggtgtttctttgggttcggatgcattcttcccttttggagacaatattgagcgtgcccataagagtggagtagattacattgcccaagcgggtggttctgtacgcgatgaccatgtgattgaaacttgcgataaatatggcattgccatgtcgttcacgggtatccgtctgttccatcattgataaggggtataaaagtaggcccgcccccacggctgcatagctgtaggggcgggttccttttttattaagtcttatcttgttacgttatccttggtttttgatgttctcgtccaccacttttatcttttctttcacaagctcgatgtctgctttcagcttttccaccttgcggttgatttctgtcagcagactatttcccttcttggaagaagtggtcaggaagccgagattgttttcatatgtctggagctcgttcttcatattgtcgaaggcacgtaccagcttctcacgttcccggtaaagggcttgtggactaccttcctgaatggagctgatagtcgacttgaaattgcttagcttcttgttggaggcactgatgttgaagcgttcaaacaatttgtctatctgactatggtattgcttatagattcggtctttctctttgaaaggtacatgtcctacgccgttccactctttcatgaggtcgcgtaccaattgggtagctccctccgtatccatttggtcatcaatagcattcagtttctcgatgatgttttttttcttttccagattttcctgctctacgctgcgctgtgaagaagtggctttgttcttttgttcgaagaagtagtcacaagcggagatgaaacgtttccatacggcatccgaatatttctttgctaccggaccgatggttttccattctttctgaagtttggtcagttcatcggcagttactttccagtcggtactgtccttaagagcttctgctttttcgcacaaggcacgcttcttttccaggttttcgttcataccttccttcagggtcttgaagaactctccctttttacggaagaactcgtcgcacgctttgcggaaacgttcgaaaatcttcacgttcattttttgcggagcgaaaccgatggtcttccatttgttttgaagtgcgatgacttcttgcgttttgctctcccaagaagcaaagtttgtcagttctttgtagtcgatggcttctatgatttcgcaaattacggtcttttggtcaagattgtgttgttccacttccttcaatgcttcgaaatgttgctggtgacgtcgatttacggttgtagaggcagctttgaaacgtgcccagatttcgtcgcgtagttccttggctaccggccctgtatcacgaaattcttgatgtagcttctgtaactgatggaaagctgaaactacatccgcttcatctgccagcttttcggcagcttcacagagatgtgccttgatttccaaattcttcttgaaatcgtattcgcggaattcattgttcagtttcagaaggtcatagaatttctcaacatacaattggtagtttttccaaagctcgttgaccttagcttgcggaacgagtttaacttcgttccattgctgctgtagtttcttgaactccgtatagctcttgttggcgtcatctggagattcaaccagctccttcagctcttcgatgatggaaagctttacctgcaggttcatttccttctgcttctccagttcggctgtgagtgcgcttcttttttctttgatgacggacatgatattcttgaactcttcttccacactgtctgtttgtggaacaaagttctccgcggcgcctccgttttcaatgaacagttttctggccgcttcctgctcagcattgtgcagcttgtagaaagattgcttcaaaccgtctatttcaggttttgccacgttctccacgtctgcaaccacctctttgagtttggcaagtatttcctctttcgtgagcttctgaactggctctaccggcttttccgaaacgatttcttcagcgggagtttctgttgttgccggttcagaaacctctgctgtcttcttttcttcttctaattccaccggcttttcggggagattagtgtcatgagtgtccgtcattgtatttacttttttagaaacgggttcctcccgttcgggttacattaggctacaaattaatgaaataaaatgattacttcatacaatttgccttgatttttttctattttcttgtttttatgacagtaagacagtgatacccatgtacagcatcatgcctataatgtcattggtaatggagataaacgggccggtggcaatggccgggtcaaccttcagtttctctaaagtcatggggaccagcgttccgaagatggaggcgaacatgacgactgcaaagaggctgatggagacggaataagtgaccgtagccgtagctccgaaccggataaaattatagatgtataccagcagggagatgatggtggcattgatgaccgccactactgcttccttggctacctgcttgaaggtgtctttggcatccagtgagctgttggcaaggccttgcacgatgatggcagacgactgggttcccacgtttccccccgtaccaccaatcaacggaatataaagggccatttccggatgggcggcgaaagtcgtgtcgaagttacccaatatcatggagttgcctataccgcctaacataccgataagtaaccatggaaggcgagcagaagtttggcgcatgacattatcgtccgtttctacatcttgggacaaaccggatgccagctggtaatcacgttccgactgttcgcggacttcgtccataacgtcgtctacggtaatctggcctaccagacgcccgatactgtctacaacaggagctgccaccaagtcatacttttcgatgatttgtaccacttcgtcaatgggggtatctacatggacggagataggatctttccgcatcacatgctttaccttggagacagaaggggaagttatcattttcttcaatgggaataccccttgcagacggtcttcgtcgtcgatgacgtatacgtagtaaatttcatccagcttttcagcttgcaggcgcatttccttcaggcactccggcatactccagttttcattgacagtcaccatttccgtacccatcaaaccaccggcagtgtcttcatcatatttcagcaggtcaacgatgtcaccggcttgttctatatcttcgatgtgcgaaagtacttcctcctgcttgtcttcatcaagttcgcgcatcaggtctacggcatcgtccgtgtccatataatccacgaaacgcttggcaatggtctccgaaggaagaagttccaggaattctttccggatgtcttcgtccatttcaaccagtacgtccgctgccgtttcgttgtcaaggaggcggtaaacgaagcgggcttcctccaagctgaggtcattacacagttctgcaatatccgccgagtgaaggtctgtcaaaagtgttttgacgttttccgcgtctttctgttctatcaggcttttgactttgtctatgtattcttcgtctatttccatgattgttcgtgtttaatcactaaccattaatcattaatcgttctcaatgcctgttccacttggttggtcagctgaataaattcctgtacggacagttgttccgggcgtttattaaataatacgtcctccgtcagtggacagtctttgccgagtatcggttttatggagttccgtagagtcttgcgtcgttggttgaacgtggttttcactacttgcttgaacaatttctcgtcgcagcctaaatcgtgcgtttcattgcgcatcatgcagatgacggcacttttaacttttgggggcgggttgaagacatgttcgtgtaccgtaaacaagtactccactttgtaccatgcttgtatcagtacacttagaattccgtatgtcttgctgcccggcccggcggctatgcgctcggctacttccttttgtatcatacccgtacagcagggaatcagatccttatattccagcattttgaagaatatctggctggagatattataaggatagtttcccgtcagcacaaaaggttgcccgccaaacaaccgttgcaggttcattttgaggaagtcgtcctcaataatgttgtcttccagttgcggataggcttcccgtaggtaggctactgactcgtagtccagttctactactttgacgttgcgttctttgggcagaagaaactgggtcagtactcccattcccggaccaacttcgaggatgggaatttcgggacagacatctaccgtgtcggcaatgtcttgtgccactttcaggtctttcaggaagtgttgcccgagaaactttttaggtttaactactctcatgtatcaactaaatcattacttttgctccgtaaacgtaggctgtcgtgtgaacaacaacctgtctttatacggagcaaaggtagttcttttcaatgaagaatgaagaatgaagaatgaagaatttgggaatatcgtatgaataagctgctaaaaaagacattgaaaatcatcttacccattttattaggtggttttatcctctattgggtatatcgtgattttgacttttcaaaggcagaagaagttctccttcatcagacgaactggtggtggatgttgttgtccttgttcttcggtgtgatgagccatgtgttacgaggctggcgttggaagcagactttggagccactggatgctcatcccaaaacaagcgattgcgtcgatgccattttcgtatcttatgccaccaatctggtactgccccgtgtgggagaggtttcacgttgtggagtacttgccaaatatgataatgtttcctttgcgaagtccttggggacggtggtgacagagcggttggtagatacgctttgcattctgctgattacggggattacttttttggtgcagatgcccgtttttttccgttttttcgaggagacgggcaccaagattccttcgctggtgcatcttgtgacttccccttggttttatgtggcttttttttctattattggtgttttggtacttctctattttctgttgcgtatgctttctttttttgaaaaggtaaagggagtagtcttgaatatatgggaaggtgtgatgtcgcttaagaatgtgaagaatgtgcctttgtttgttctttacactttacttatttggctatgctatttctatcatttctatataactttctattgcttccagtttacggagcaccttagtttccttgccgggctggtgatgtttgtcggcggaacgtttgcagtcattgttcccacgcccaacggggcaggaccctggcactttgctgtcatcactatgatgatgctttatggggtaaatgctacggatgcgggtatatttgctctgatagtgcatggcatacagacgttgctggtgatagtgttaggcatctacgggtcgttgcacctggcattggcgaatagggcaaagaaatagacgtttcttgtggtgggttcctatattgtcacttcttgtgttagaggacagagacagtacttatagagagtactcctttaaaagtactgtaatacttctttgcaagtacttcagtacttccttataagtactgaagcctaaaggttgttggaagattggtttctttaaacgatattgttgcttggatatagaagtgggagaaattcctaaatatggtagctatattaggtgcagatgttctatcgcaatatgtgaagatgtaaaagccatgtttaagatagctgatgatttagtactttagaaaaatcccggtttattgtactttccgagaataaaccgttatatttgcgaaaactaactttttagaattatgagtacaatcttacagttagctccacagaatgtatggaagcacttttattcactgacccagattccccgtccgtcaggacatatggagaagattaccaaattccttattgattttggaaaaggcttggggttggaatcatttgtcgacgaggtcggcaatgttattattcgtaagcctgccactccgggtatggaaaaccgcaaaggcatcatccttcaggcgcatatggacatggtgcctcagaagaacaacgatactattcacgattttacaacagatcccattgaaacctatgttgacggtgattgggtgaaagccaaaggtaccacgctgggagcagataatggtttgggagtagctgccattatggcggtgctcgaagataataacttgaagcatggcccattggaagccctgattaccaaggatgaagaaacgggaatgtatggtgcattcggtttgaaacccggaactatgcaaggggaaattctgctgaaccttgactctgaggacgaaggcgaactctatatcggctgtgccggtggtcttgatattactgctactttggaatataaggaggagacgcctatggccgatttcgttgcccgtaagattacgctgaaaggtttgcgtggcggtcactccggtttggaaatcaatgaagggcgcggtaatgccaataaattgctggcacgcatcgtacatgatttgctgattgagtttgactcccagctggcaagttttgaaggtggtaatatgcgtaatgctatcccccgcgaagcacatgcggtattggtgttcaatcctgaggatatggacggtttggaagattatatgaaggaatacgaggcacaactgaatgacgaatatgctccgattgaaagtggtattaccctgagtatagaagaggtaactctacccactgccgttgttccttcagaaattcaggataatatgattaacgtgttgatggcttgccagaatggtgtgatgcgtatgattcctactgttcccgatactgtagaaacttcctccaatttggctatcgtaatcattgcagacggtaaggccgaagttcgtattttggcgcgtagttcttgcgatacgatgaaggatttcctggcagacagcctgacagcttgtttcgctatggcaggtatgaaggtggaattgagtggtggctattccggatggcagcctaatgtggattctcctatactgcatgccatgaagctgtcctataagcagcagtttggtgtggaacctgccgtgaaggttattcacgcaggtctggaatgcggtattattggtgccaattgtccaggactcgatatgatttctttcggtcccactttgcgttctccgcattcaccggacgagcgtgcgttaattcctactgtttccaagttctatgatttcttggtggctacattggagcagactcctgaaaagtagagaatactttatgtaatgaataggggcagggtgctttattaagtatcctgccttttttgtctgtgacagtttgtcctctttctgccagaatgtcccagacttattacaatggtatgtcaatatccttgcactttctccctaaaaattgacctaagtcaagaaatatgttataaaacatgttttctatccgttttttgcttgttatcttgaacaaaggctctatttttgtgttgtaaaacatgaaaacaatagaaaactagtagattttttaaggataacaagattgattttaggaggataacaaaatgaaaatgttaaagagtttttttaagcatgtcggcgaagccgataagaacatttggggttacgtaatgctttaagcattcccccccccttcgtgaagtattgaattttagttttcaggtattagtttaattttttaagattatgaaaaagaagattgcaaattcatttaagcacattcttaccgcagctggtaagaattggatggaggcaatgagatattatagcctccaaatgtgagtacactaacatttaagtatagcacaagggatatgtttgcaaacatattccttgtttttttgtaggagtagaataagattttttatgtccaaaagtacatttgtttgaactttattcacttcctttgttattaatacaaagactaacaaacgaataattatgagagtaattcaaagaatttgtagcatattgttactgctggttacatttggggcttcggcattgtatgcgcagacgtacgataagttgtggaagcaggtggagcaggctcaaaagaaaagcctgcctcaaacagtgataaaactggctgatgaaatctatcggaaaggtcggcaagagcagaatgctccgcaaatgttgaaagcctacatttgtagggagacttatcaagaggggctgactccggacagcctttactccagtctgaaatatatggaatcttgggcacaatcggagaggaatccggtgaacaaggctattctacactctttgttggcatatgaatatgctgacttgatgcggaagaatcgccgtgtcttgctgtcacgtactttactgactgttgacgaggttccagcagatatccgtgagtggagtatcagccagtttgtggataaaatagataggtgtaaccgtgcatccttgcaggattccatccgcttgctcaatacatctgcagaacaatatgtgccttttgtggtgttggaagacggtagccggttctatgggcacgatatgtaccatctattggtgagccgtgctgttgatgcttatcggcagctggatggtttcagcgtggattctttggtacagacccgtatcgaaaggatttatctggatatgatgaatgcttatcgccatcgtgccggttcggaagatgctatgttgctctgttctcttgattattggaactggaagttgaccggtggtatcagccagcagccttatcctactttccgaatgcgtcaggaaaaggctaatcgggaatatcttgaggttttgaataaattgataaaggaatacggttcacgagaggtttgtgccgaggtttacattcataaagccaaccacctgcgccgtttggaaccgaaacgcgctgatgaggctctaaaagtctgtgaagaaggcttgaagcgctatcctgcgtataagcgtatcaatgagttgaaaaatatccgtgaacagattttacagcctgaactcattctgactatgaatgaaagcggttatcccggcgattcggtgaatatgaggctgcattatcgtaatgtcgagggcttcactctcaacttatataccactactttaagtgaagtaccttggatggaccatggtataaataaagatacttatagaaagtatgcccggaagttttcttccacgcattttggcttaaagccgttgccaggcaaggataaattgcctgaagatgtcccttatcttgcctcggacactgtatttaagttcatgattcctcgggaaacgggagtctatattcttcaaatagtacctgatactgaaacggcccgtacagatgataaatttctggtatctacccgcttcaaggtgctgacattggatttgggtgacaaccgtatggaagtggctacattggatgcccgtagtggacagccgattgctggtgccaaggtgagtttctactctttttatgatgagaagaatagaaaagcgatggcagaggtactgactgatgccggggggaaagctgtattaccctggcagagtgaaatccgaagttatgtggcgcgtaaaggcagagacacagccatgatgccgcagaacgtttatatgaatcatccttattacggtattaaggatacagattggaggcagatggcattgctgacagaccgttcgctttatcgtcccgggcagaccgttcatgtaaaagggatagcttacaagcagaatagtgatagcgcccaggtactacaaggagttgattatgagcttgtcttgttggatgccaaccgcaaggaacttgccaccaggaaggggcggaccaatgatttcggctcttttgctacggagtttgtacttccggcagcttgcctgaatggcatgttcagcatacgaaccaaagagcctcaatctaccgtcacttttagggtagaggagtacaagcgacctacgttcgagattgccttcactccggtttcggaagcttatcggctgggtgacaaggttgtgttgaaaggaaatgtcaaggccttcaatggcatgatggtgcaggatgtgccattggcatatacggtgactcgccggaatccgagacctggttattggagcaatgctgataaaccattattgtctgacaccatacaattggataccaacggggatttttccatacccttgactttggaagctccggctgtagatacagacgggtatgggagtgtgtatacttatcatgtggaggcggtggtgacggatgaggccggtgaaacgcaatccgcttcgtataacttgttggcaggtcctaaggcttattcctttgatattcgcttgcctcaatatgtttgtaaggaagacagtatgcttttcacttttggagtgaataatgtaatgaatattcctcagcacattgaaggttcctattgcctttatccatttgcagaacaaaatggggcaaggaatattgcaggttctgaacccttggatgatgttgtattggagggtaccttcacagccaatcggctccaggatttttcggcttggaacaagcttccttcaggtaactatcgcttgaaactttctgtacgtgatagtttgggacgtgaagagaataacggggcatatggcagtgacagtttcatgctcttttcaaagagtgacaagcgtccggctgcgtttacagatttcttttattataaagaaaatgaggaatttgatgtacagtaccctgccgcttttcttttggggacttcttatcgggatgcatatgtgctgatggatgtcttttgtgacagaaaacgcattgaaagccgtgtgttgcagttgaatgatactattattcgtatggaattcccttataaggaagcatatggcaagggaatcaccattcttttcagttttgtgaaagctggcgagatgtacagtcatcaggttgaactgaagaagcgggagccggaacgtgctctcgacatgaaatgggaagtgttccgtgaccgtttgcgtcccggacaggaagaagagtggaagctcgtcataaagacgcctcaaggtatgcctgctgcggctgagatgttggctacgatgtacgacgcttcactggataagatttataagagtaaccagatactacgggttttctatccggataatctgtatggggcattccgtggtgcgagccgttataatagcaattacttctccgtttatttcccgttgaaggcttggagggttccggtgtggtcgtttgactacttctgttctccttatatggatggaaggatgcggatagtgatggtagaagacaatgcgcttttggaagaagtaagtgttgtggggtatgggactacccggaatagctctttgaccggtaatcttagaatacgtggtgccaaccagccgatgcttgcttccaaagcagaatccgggaatgccgttgaagtgaaatatgttcctgcacaagtagcggaagacgcggtggaagatgttgtttttgaatcggaaacgataccggttggcgaggccttgcaacctattgaggggcttcgcaccaactttgccgaaacagcctttttttatcctcaacttcgtacaaacgaacaaggggagcttgcgttttcttttacgatgccgcagagcttgactcgttggaatttccgtggttactcacatactaaggatatgctgactgggatgttggatgcttccgttgtaactgccaaggagtttatgctgactccgaatatgcctcggtttgtccgcgttggagataaaacgcagatagccggaacaatagccaatctgacgggtaaagcggtgaaaggaacagcagtattcacactgttcgaccctatgacggagaaagttattgctactcaacgtcagaaattcttggtagaagcaggaagaaatactgctgtcaacttccatttcgaagtgtccgaccgctatgatttgcttggtattcgtatggttgccgatggaggtacgtttagcgatggcgagcagcatctgttgcccgtattaagtaataaggagtatattacggaaacgcttgctatgcctatccgtggcgaggagacccgtacgttctcattagacagccttttcaaccgtaatagccgtacagcgacagaccgtcgtctgactgtagaatttaccgggaatccggcttggtatgctgtacaagcgttgccggcattgagcctgcctgccaatgataatgccatttcttgggctacagcttggtatgccaatagtctggcaggcttcattgccaacagccagccccgcattaagactgtatttgacagttggaaggctgccggtggcacgaaagaaaccttcctcagccagttggagaagaatcaggatgtgaagaatatcctgctcagcgagtctccgtgggtactggaagctactactgaagccgaacagcaggcacgtattgccacgctgtttgatatcaaccaactgaataaccgcaatctttccgcttttaccaaattgaaagaattgcagggtgaagacggtggatggagctggtataagggaatgtccggtagccgctatataactggctatattacagaattacttgttcgtcttcctctgctgacgaaaaatgaactgtctgaagaagttgccgccatgcggcagaaagctttcggctatttgaatcggcaggccttggaagagtatcgcaatatccgtaaagccgaaaaaaatggcgccagaattactgccaactccgaatcggcaatgacatatctgtatctgatagcccttagcggcgaacaagtgccggcagacaatcaagcggcttaccgctatttcctatcaaaagtaggtgccaatcttaaagatggaaccatgagcagcaaggcgcagtctgccatcatcctgaaagcagtagggcgtacagccgaggcgaatgaattcatcgcttccctcaaggaacatctggtacagacggatgaactgggtgcatactttgctttccaagcaaatccgtataactggggtatgctgcccatccctgcccatgtggaagtaatggaagccctgcgtatggcaggtggcaacgatgctttggtggaggaaatgaaactctggctgctgaaacagaagcagactaccagttggaattctccggttgcaacggctgatgctgtttatgcattgctttgtcaaggtactaatctgctggaaagtcggggagacgtacgtatcacgttaggtaacaaagttttggaaacattgtcgcctacaaagaccataatcccgggtttgggttatgtcaaggaaaccttcgctcaaggaagtccggagctgaaagctaaaaccgtcaccgtagagaaacgggatgcaggcattgcctggggagctgtttatgcccagtatctgtcacccatatctgatgtaaagcagcaggggggtgaattgaatgtagagaagaaactttatgtagagcgtatatcggccggtggtagcaagtccttgcaaccggttacggaagggaccgtattatccgtcggtgataaaatagtggcccgtttgactatccgcttggaccgtactatggattttgttcagttgaaagaccagcggggtgcctgctttgaacctataggctcgctttccggttatcgttggagtaatggcctcggttattatgcagaagtggaagatgccgcaaccaatttcttcttcgaccatttgggcaaaggcgtttatgtcttagagcacagttatcgcatagcccgtggcggaacatacgaaacggggctggccacgatacagtgtgcgtatgctccggagtatgcttcgcattcggcgggagggataattgtaataaagtaacaatagagtatggagcggagcgcaatttgtacaaattgcgctccgctattttaggtactctcgctaaaaacacctatttttgtccgactaatattgaatgagagtggcagaattaggaaatcttgatattaagaaaaatagatgaagcggatattgataactttatatgtgcttgcaagtgtggtattgactgctgtagcgcaagctcgttttacctcgaatacagagatgtacagtttcggccagatagaatggaagcatcccgtgactgtgcaatataccatcaccaatacgggtgaccagcctttagtgcttacagaagtagagccggattgcgcctgctccgtggcccagtggacaaaaacgcctattgctccgggggcaaaaggaacagtaaatgtgacttttgacgccaaggcattgggacatttccagaaatctgtggctatttacagcaatgcgcaacccaatctggtctatttgaagttcaatggtgaagtagtacaggaaatcaaggactttaccaagacgcatccctatcttatcggtcagatacgtattgacaagaacagcctcgacttccccgatattcagcatggtgagcagccggtgattcatatcggcgtggtcaatctttccgaccgtccttatgaaccggtactgatgcatctgcccccttatttgcagacaaaagtagaacctaacgtgctgcaaaagggagaaaaaggagtgattacacttacattgaattcggaaagactgactggcctcggactgactcaaacgtcggtctatctttctcgcttctccggtgacaaggtgggcgatgaaaacgagattcccgtttctgccattcttttaccggatttctccggaatgacggaagtggagaaggcaaatgctcctgtcatcagcctttctaccaaagaagttgatatgagtgcgatattggcaaagaagtcaaaagcacgtcaggatattaccattaccaataccgggcgttctcctttacagataaacaaactccaggtattccacccggcagtgggagttaacctcaagaagagtgtattgcaacccggtgaaagcacccgcctgcgggtaacggtagtgaagaagaatataggcaagaagcgccgtcatctgcgtctgctgatgattaccaatgacccgatgcagccgaaagttgaaatcaacattaaagcaaaacaataagaagtcgtaaagtccttcataactcataacttataactcacaaatagccatggaacatcccgaaaataatgaagcatataaaggcttggttgtcaatgcaggcattgagcaaccttcatcggtcaatccttacttgaagaaccgtcccaggcggaagaaacgcgagctttccgtatcagactatgtggagggtatagtgaaaggtgatgttacggtactcagccaggctgtaacactggtggaaagtgtgaaaccggagcaccaggctgtggcgcaggaggtgatagagaagtgtttgccctattcgggcaactccgtccgtgtgggtatcagtggtgtgcccggtgccggtaaaagtacctctattgatgtatttggcttgcatgtactggaggaacacggcggcaagttggccgttcttgccattgacccgagcagtgaacgcagcaaaggcagtattctcggtgataagacgcgtatggagaagctctccgttcatcccaagtcctttatacgtcccagtccctctgccggttcgctgggtggcgtggcacgcaagacgcgtgaaacgattgtgctttgtgaggctgccggtttcgacaagatatttgtagagacggtaggggtggggcagagtgagactgccgtacattctatggtagacttcttcctgctgatacagctggcgggtacgggcgatgagttgcaaggcatcaaacgcggcatcatggaaatggccgatggcattgttattaataaggctgatggcgacaatctggagcgggccagactggcagcaacgcagttccgtaatgcgctgcacctcttcccggctccggagagcggttggacaccccaagtgctgacttattccggtttctataatcttggtgtaaaagaagtgtgggatatggtctacaaatacattgactttgtgaaagataacggctattttgaataccgccgcaatgagcaaagcaaatactggatgtacgagaccattaacgaacagctgcgcgacagcttctaccacaatccgcagattgaagcgatgctgactggcaaggaaaaacaagtgctacagggcaacttgacttcttttgtggctgccaagaacttgctggacacctattttgcagaactgaagaaataggggcatatccctttctctatatcgatgactaaggaaaacaacatggaagtggcgcggcggtttacccgccgccttcatgaactcccttctgaggagctggagctcattgccggtttgtttgtacgccgtgaggtgcacaaaggagaactgttgattagtgaaaaagatatagccagggatattgtttttgtagagaaaggactgcttcgccagttctatttcaaagaaggccgggacattacagagaactttgcctgcgacggtgacggcgctatgtgtatcgtcagccttttcaccggacgccgtaattgccttcagctggaatccttggaggaaggcgtcatctggagcatttcgtatgcaggactggtcgaactctctgagcgttatctgcatatagcccgtctgcttcgccatttattggaggggtctttaatgctttcccaatataaagcagactcttggcgtttcgaaacctcacgcgagcggtatgcgcgcttcgtcagggattatccggagatagcccggcgtgcctcagtcaaccacatagcatcttatctgttaatgactcccgagtctctgagccgggtacgtgccggagtactgtgacggtggaacggctgttttatacggctttcccttctttctcgaaatccttgcgtgacttgctttgtgtcacgatgtacactcccaggaataccaaggctatggctattcccttttccaaattgaacactcccaatcctaagatgatggcaacggttgaggccacgatgggctgcatgtagttgtacatgctcaccacagtggggcgcaacagcctctgcgcactcattatgaagatataggcaaggaagcttcctcccacaaccacatatcccgcttgcagcagggcggctgtagatatttcgctccactgtatggcagccacgtcgtggtaagagaacgggatgtagcacatggaggcatagacaaacatccatttgttcagggtgatgggagagtatttttgcgacaaccccttgaatacggtcagataaatggagaagctgatttgggcgagcaggcagagaaggtctccgatgaggctgccattgccggcaccggtggtctggctgctcatgatgagtataaatgctcccatagcccctacaaagatgcccagcactttcttgttggtgaccggttctttcagatagattgcagccactatcatggtgacgataggcagcgtggttgtaacgatggaggcgtctatgggcgaagtcatggagagtccgaagatatagacaccctgattgaataccagtgcgaagagtgcggcgaagaatatcttcagcatgtcccggtggtccacctgttcgcgtttgcagaataaggagaggagccagaagcaggcggctgcgcctaccatgcggaatgtggttactgacaacgcggaaaactctaccagagctgacttgcctataggtgccatcaagccccataagatatttgcggtaagggcgaacagatgcccttgaatgttcttgttcatactcttttgttctttgcgggtgcaaaagaacaactattttctgaaaagagaaaatctttcattatatgatttttctggttcatgggcgtagaaataagagattatcgtgtatatttgcttctaattaaagcaagaaaccatggaagtacaagccaattacatcaagcgtatcgaaatacacggattgtggcatcggtacgatattgcctgggacctgcgtcctgacgtcaatatactttccggcatcaacggagtggggaaaaccactatcctgaaccgttcggtcaactatctggaacagacatcgggtgaagtgaagagtgacgagaagaacggcgtacacgtctacttcgacaattctgcagccacctttatcccctatgatgtaatccgcagctacgaccgtccccttatcatgggcgactttacggcacgcatggccgatgccaacgtgaagtcggaactggactggcagctctatctgctccagcgccgttatctggactatcaggtgaacatcggcaacaagatgatagaactgctcagcggtgatgaagagcagcgtagcctggctccctccctttccctccccaagcggaagttccaggatatgattgacgagcttttcagctatacccataagacgatagaccgcaaaagcaacgacatcgttttctatcagaacggtgaacgcctgctgccctacaaactgtcttcgggcgagaagcagatgctggtcatcctgctgaccgtgctggtgcgtgacgatgaccactgcgtactcttcatggacgagccggaagcctccctgcacatcgaatggcagcagaagcttatcggcatgatacgcaatctgaatcccaatgtgcagcttatcctcaccacccattcgcccgcagtcatcatggaaggctggctggatgccgtcaccgaagtcagcgaaatctcatccctaatccctaatccttaattcctacccaagtgcccacttccctaagacataaccttacttccgcctatctggatgccgcccgcaagttgtcccccaagagagcacgcaggcgcatagtggcgtatgtggaaagctatgacgacatcgctttctggcggacgctgctgtctgagttcgagaatgaggaacgttattttcaagtgatgcttccctcggccacctccctggcaaagggcaagaagatggtgctgatgaatacgttgaacacatcggaactggggcgcagcctgatagcgtgtgtagacagcgactacgacttcctgctgcaaggtgccaccaaggtgtcgcataggataaacaagagtccctatatcttccagacttacggttatgccatcgagaacttccactgctttgccgacagtctgcatgaagtctgtgtgcaggcgacgttgaacgaccggcatatcctggacttccccgctttcctgaagcgttattcgcagattgcctatccgctgtttctgtggaatgtctggttctaccgccagcacgacacgcataccttcccgatgtacgacttcaacgcctgcgtgcgcctgcaggagataaacctgcgtcatccttaccgtagtctggacgagatgcaaaagacggtgtcggcaaagctgtccgaactgcaagcccgtttcccccgctacatcgaccgggtggagcagctgggcacggagttggaacgtttgggactgactccggacaatacctatctttatatccaaggacaccatatcatggattgtgtagtgctgaaaatccttatcccggtatgtacggtgctgcgtcgtgaacgcgagcaggagataaagcgcctggcagagcataacgaacagttccgcaacgaactgacggggtatgagaacagtcaggtcaatgtatccgtgatgctgaaaaaaaacagcggctacaagaacctttatctttatcagtggttgaaagaagacattatggagttcctcgagcgggaggaacagtcgcgtagataagattgccgttatgataaacatacgattatggagatattgaagaagatagacgaccttttaatcgggtggggcatatccccttcccgggctgatatgctcgaccaattcattgccttcgcactgatacttgccgttgctttcctggcggatgccctatgccggaaaatcctgctgaaggtagtggcacaactggtgaagaagaccaaggctacgtgggacgacatcgtattcgaccgtaaagtgatggtgcacctcagccgcatggtggctcccgttatcatctatctgtttgttccattggcatttgtcgaagtcggttcatcggcaatggatttcatccggcgtatctgccttatttacatcatcattactttcctgagtttcgttaactcgttcctgaaggctgtttacagtgtatacagtgagaaggagcaatttcgtgaccgccctttaaaggggatgttgcaaaccatgcaagtcatcctatggctggtgggcggcattgtggtcgtgggcgaactgataggccgcgacccgctttcgctgcttgccggattgggtgcttcggcagccatcctgatgctggtattcaaggattccattatgggctttgtctccggtgtgcagctttcggccaacgacatgctgaaggtgggcgactggattgagatgcccaagtacggtgccaacggtacggtgatagaggtaacgttgaacaccgtaaaagtgcgcaactgggacaataccattaccaccatccctccttacctgcttgtcagcgactccttccagaactggcgcggcatgcgcgagagcggtgggcggcgagtgaagcgcagtatcaatatcgacatgaccagcgtccgtttctgcaccccggagatgctggcaaaatatcgcaagatacagctactgaaagattatgtggagcagacggaggaagtgattgaaaagtacaatgtggaaaacggcatcgataactccatcctcgtcaacggacgccgccagaccaatctgggtgtgttccgggcgtatctgacggcttatttgaaaagtcttcctgacgtaaatcaggaactgacctgcatggtgcgccaactccagcctaccgaccgcggtatcccgatagaactttatttcttctgtgcgctgaaggattgggtgccctatgaaggggtgcaggcggatgtattcgaccatgtgctggcaatcatccccgaattcgatttgcaggtattccagtctccgtccggcagagatttccagcgggtactgcctgctgcttccgaagaaaaaggagcttgattccgaccatcaaaaaggcctatatctattgtatttctcatagggagtcattacctttgaaccctatactgaaaggtcagaacatccccatcttttctcccaaaacatccccatgttttggggtattacatccgggtgttttgggtgaaaacatctccatgttttggggcaatacatccgggtgttttaggtattcagtcatatagtgaaaggtattcggtcacggagtctttaccgtaaggtataggctttgtgtatgcaagttgtaggtgtgcctcgcgtcgggcgggaatatctttcgttttttacgaacctaattataaagaaagattggtatgtcaatgaattatgtggtccgcaagaaggtggacaagagtggagacaaggaagtggtgcgctactacgcggcgtcaaaagtgcttcagccggaaccggtgagcaatgacgaactggccaagaggctggcttttgtcagctccctgcaggtgggcgatgcccagtccgtgctggtgcaactgccggatattatagcggactatctggccagtggacgcacggtgaacatcaagggacttggaaactttttcccctccatcaccagcgaaccggtggaacggatagaggactgtacggcagataaagtgcgcatttcgcgtatctgcttcagggcggcaggcagtttcatgcagcgcgtttgccgtcatctggacttgttcagctttcaggttcaggaattgaagaaggagctgaagaagaagtaaacggtacttttagtttctttcttgaaacagcgcgtaccccttgaagccggaaggcattcgaggggtacgctgttgaagaagttgtgtgtttctttatagtcttgtgagtgcttctttttttttacttcacccagcttccgttcatccagctgcattctttcttgatgtcctcgaaagaactatagctcaggttggcgtccaccttgttgcttgtcacggcgataaagtcggcatgggtgtagatgccttctttgcagctcagctcggaggtgagggtgatgttggtcagcttggaagtgccgttcttcagggcgttttcggtaagggcggtttccacggtcaggggttggcctttgccgcagaccttggcgttgtctatttccacttccgtgccggcacgcagacggatgccttgcttgctgccgccgttgccgacgaggatgaggttcttcaatacggggtgggcaacgggagtggcggcgttgttgctgccgttgttgtcgcactccatcaggcagtcgcagtcgtagcccagtgtggattcggcttcttggtaagccacgaggttggtgcctttgccgttccagccttcggtccagtcgaaggagtcgtcgctacagcttacggctacgaggttgctcacgtttaccgagccgccgaagaactcaaagccgtcatcggaacctttgtaggcttggcagtggtccacgatggtaccgttgcctacgccgtagaaagagataccgttggcttcgtgctcttcatcgaaggcaaagccggtgtattccagacgaatgtattgcagcgtgcccgagttgtcggcatcatcgttgccgccgtaaacggcaccgcctatttcagaacttcccttgccgccttcggcattggtgtgggcgcgtccgcagatgtggatgcctccccatgcgcccggctcttctttttcgctggtcattacgatgggtttgtccggcgtgcctacggcgttgattttaccgccctgcttcacgaggatgtagtctgcgatgtcatcgtagacggcgataatcttcacgccttcctctatgtggagcgtggcaccttcttctacgatgtattcgccgctcagcttgtaggtgtttccggcagccagggtcacgtcggaggtgatggtacctttcaatatcgtaccgttttcgatttcattgccgtttccgttgccgccgttaccgtcattgtcgttgttgtcgtcgctgctgcaagcggtgaggatagacattccggctacaaaggccagagagtagaatttccatttcattgttttcataattcaattgttttagttgttatatccaatttatctgtctgtcattcagattgattctcttaaatctgcttgtttgtcaaagagtgttctccgttcccttcagggggagggcgggggctttataggttgtagcttattcccacctcaaagttcgttcccttgtggtagcgttccacttccatttcctgccccgtggtgggcacatcttgcttgaagatgacatcgcggttcagcaggtcgttcacttgcagcttcaggttgaagtgcttgttcaggctatatccggcgctgaagttcaacgtgtgcagcgtctgttgcctgacatcgcccagacccgacacgcctaccgcatggatgcggctgccttgcaggttgtagagcagggcgaggttgagctgcctgtcttcgccgaagcgtggcgagtaggtgaggtcggcattggcaaggatgggcgatgcgccttgcagcgaacgttccttgttggtgtaggcaccgccttggggcagcttcacgttggtgtacatgtaactgatgttggcgcctaggcgcaggtctttgacgagccgtttgcgcatctccagctccacgccggcagccatgccgttgtcggcattcttgaagctgtgcagcgtggcgccgccttgcaggtcttggatgcgttcgatggggctgtcgaggtatttgaagtagccggtcacggagagcatgtcgccgtccttgccgaagcgttcgtaacgtaggtcgaagttgtagttgtaaccgttctgcaactcttcgttaccgcggatttgtgccgaaccgtaggactcttgatagaggaagggggccatctcgatgaacgagggacgggtgacggtgcgcgaggcagagaagcggatgctgttggtggggttcaccgcatatttcaggttcagggcggggaagaggtcgttcttgtctaaattgcgccgacgggagtaccagtcgccgccgtcgctggcgtagcgcacccattgcttgctcatttcgtagcgcaggccgaggttcaccaagagggcttcggtgggatagaagtcggtcagcaggtaggcggagtagatttcgtttccggcgcggtagctgtctttgggctgcatcacacgctgtaccacgatttgtccgtcggcaatgttctgctggttgaggaagccgtcggtgttgtagatgtcggtgatgacggggttcagtttgttcaggttgtagtagaagcgggtagcgttgtagtcgcggttcttgtccttgtagttgaagccgagcttgaggtggctggtgtcgttccacttccagcgcatggcgaggttggcattccactcttcttcgtccaggctgccgaagtagcgcatagtctcttggcggttcagtttgaagagcctgagactgccgtcgttgtctttgacgtacatcacttgccgtcggtcgggctcttcgctgccggtcttgctgtacgagcctccccaggtcagttgccacctgtcgccctcgccgaagttatggattccgttcagttgatggttttgcagggtgtatatgtgcatgatgttgttgctgccggtcagctcgtgtccttcggcatcagtaccttcgcggcgttggtaggtgtcgatggcattgcgggcgtagaagaaagtgtagcctatgcggtcgctccggcgcaaggtgtagcccaggtagccgagggcggcgagcttcagttcctgcgcaaagctgtcgtaggagaagtcgtcctgcacggtgccagtggcttcgagtgtcttgtagaaggcatcttccatgttttggtagccgttgctggcgctgaaggaggcaagcaggctgagtgtctggttgcttataccgaagttcttgccgaaaccgaggtttccacccagttcgggcaacgagctcttcttgctggcggcaaaggaggtatcgaagatattgtgggtcttcacgtatttgtcaaactccatcaagggcatgtcgagggcggccgcgtctacgctgggtgtcttcaagagcgaaccgctgcggtccatctgatagcggtctttgcctaaggtgttgaacttcccgcccgtgttgaggctcagttggaagaaatcttccggtatgttttctttggtgctgatgttgatgtgcgcaccgctgtagtcggcaaaggcggctgcgtcatacactttgctgacggtgatgttctgtacggtggacgaggggaacaggtcgagcggcaccagcttgttgtccgggttgggcgaggcgatgggcagtccgttcagcgtggtggtgctgtagcggtcgcccagtccgcggacgataagttgtccggcgctggcgatggagatacccgttattttctttactccttcttccacattgccgatgcctttgagggacatctctttggaaccgaggttctcgatggcgagggtcgctttttgccgttccatttgcaaggcacgttcgccttcgaggttcttcttggcggtgacctgcacttcgcccaaggtttgcgtgtccggctccatgtcgaagttcagcacggtttcaccctttatctctacggcgttcatcgtcatgtctttgtagccgatgtaacggacggtgagggtataggtcccgttcttcagctccagtgtatagttaccatccaaatcggcgacggcgccttgtgctgttccgcttacttgcacggtggctcccgtcagcggctctttggtttgtcggtcggtgattgtccctttgacggttcccgccgtggcagccatgacggaaagtgtgaggaataaaataaggaagaaaatctttcccaagtctaatttcatgctcatctcttttctttgtacgttttttaatccgctgcaaagatgaggcaatgacattacaccggtgatacatggagcatacgtttcattttcaaatctattacgatttggttaccgcacattcttccggattgtttgttatccttatatataggctgcttgggacgaaaaaggtttctaatggttgcttattagagttttatggctatttttgtatctcaaaccaatattgataaatatatggctgttcatcgtgacgatagtgaacgtttccggcgcctttccattcttggccggataggttggtgggaggctgatttttcttcaaggcagtatctctgctccgaatatgtctgtaagttgttaggcttggaaggggaatacctgagctttgaggatttcggtaaaatgatacgcgaagactatcggacgcgtatcagccgggagttccttgccattcagaatatggaggtctatgaacagacgtttcctatctattctactgaaggagtggtctgggtctactcgcgcgtggggtataaggagcatttgccggatggtacattgaaggctttcggagtgttgcagcgcgtagagatgccgaaggaggaggctgcgaagcaggctttgcaaagagtgaacgatttactttatcggcagacctcaatatcccattccctattccgcttcctgaaagacgaggatataagtgcgggcatttacgacatactgaaagatattcttgatttctttcgcggcggacgtgtctatatattccaatatgatgagaagtgccggtaccagagctgcacatacgaggtggtggctccgggagtggctcctgagaaagaaatgcttcaaggagttcaggctgacagcctgccgtggtggacgtcacagattatggcacaaaagcccgttctgctggaaacgctggggcaactgccggagcacgcttacgccgaatatgaaattctggcgagacagaatataaagtccttgatggtaactccgctggttgccaatgaccaggtgtggggatatatgggcattgatttggtggaccgtacccgaatgtggactaacgaggattaccaatggtttagttcgttggcaaatgtcatcagcatttgcatagagttgcgcaaaacgaaggatgaggctgtgcgcgaacgtactttcctcagcaacttgttccgctatatgcctttggggtatgtgcggatgtccattgtctgtgatgaaaaggacaacccctacgggtattatgtgacagatgcgaattctatctttgccgattttctgggaaaacctgcgtcgacgtttatcggcaagacagcctcgtccttttcaagggaggcggcccccagactggaatatctgcttgagatagtgaacaccgggacacataaggaaatggacatgtgttttgagcttaccaacaagcactgccacgtggtgatatactctccggaaaagaatgaagtggtggcgttattcctcgatacgacagactcggtacagactcatctggctttggaccatagcgaaaaactgttcaagaatatctttgccaatataccggccggggtggaaatctatgacaaagacggattcctggtagacatcaacaataaggatatggagatattcggggtccgtgacaaacaggatgtcattggagtgaacttattcgagaacccgaatgtgtccgcccaattggcagaacgtatacagactgaggatatggtcgactttcgcctgaattatgctttcgaccggactgaagggtattactccacttccaaacagccgaaggatgtgatacatctttatacgaaagtgagcaaggtgtatgacagtaaaggtaactttaccggctatgccatgattaacatcgacaatacggaacggattgatgccatgagccgtatctgtgatttcgagaatttcttcctgcttatatcggattatgcgaaggtaggttatgccaagctgaacctgctcgaccggaaaggctatgccatcaagcaatggtataagaatatgggagaggacgagaatacccaattggcggatgtcgtgggaatatacagcaagatgtaccccagtgaccgcaggaggatgcttgatttcttcagtaaggcccgtgtgggcgaagccaaacatttccagggagagatgcgcattgagcgtccgggcgaaaagggaaaatggaactgggtacgtaccaatgtggttgtcaatctgtttgaaccggagaacggacaaatagagctgataggcgtcaactatgacattacggaattgaaggagacggaggctatgctgattgaagccaaggagaaggcagaaaccgccgaccgtctgaagagtgccttccttgccaatatgagccatgagatacgtacgcccctgaatgcgattgtcggtttctccagtctgatgggagagaccggggacatggaggaaaaaaggcagtatatggcgattattgaagaaaacaatgacctgctgttgcagctgatttccgacatactggatttgtccaagatagaggccgggacatttgactttgtggaaaaagagctggacgtgaacatgctgtgtgaggacatcgtgcgcttcatgaagatgaaggctaaaccgggtgtggaagttctcttcgaccgtcatctgccggaatgccggattgtcagtgaccgtaaccgtttgaatcaggtcatagccaactttgtcaacaatgccatcaagttcaccactgcgggaagtatacgtgtaggatataataaggtggatgaaactcatttgcgtttttatgtggccgatacgggccttggcattgagccggaaatgcaggctcagatattcgaccgttttataaagctgaatacgtttgtgcatggcaccggcctggggctttctatcagcaagagcattatagagcagttgggtggcacaatcggtgtggacagtgaaccggggaaaggctcatgcttttggtttgtgctgccgattgtatagtatggaaatgtgctaaaatacacactcaccacaaattatgcagattaacacaagtcaaagctcttgattatcagaacttctaaagataatttgtgccaatctgtgtaatttgtggtaagtgatgataccctccggttataatccgaatgagaacttatcgatggattgatataccacacttgcaatactcagtaccacaatacccagcgtgcaaatggccaggctggcacgtgtatagttgtcactgcggaatgctgcaatcggctcgtcgctcttgttgatgtacattgcctttacaatcttcagatagtaataaagcgagatgattgtattgataagggcaatgaataccagcagatggaagccgccttcgaaagctgccgcaaagatgaagaacttcgagaagaagcccgcaaacggcgggatgcctgccagagagaacaaggctaaggtcatcaggaaagcgagctttggattggtattgtacagcccgttgtagtcgtcgagcgtgaatttatgggcacgcagggctacaatcgtgatgactgtaaatacgctgaggttggcaaacatgtaaatcaatacataaaagaccaatgaagtcataccttgtgaagtgccgctgataatacccagcatgatataacctgcctgcgagatactggaaaaagccatcaatcgtttcaagttctgctgacgcaaggcgaagagattggcaagcgtgatagaggcgatgatgatccagtagagcacttcttgccattgagctaccatcggggcgaataccttgatgaggatagtcatcagcacgaaagcggcagagcctttggagataacgcttaaataagcggttaccgtacttggagcgccttcgtaaacgtctgctgtccaaagatggaaaggcaccagtgatattttgaatcccatgccggagaagaagaatacgaatgccataatctgcaacgggtcgccggtgaggcgtgccggtatgtcggcaaagtagagagtgcctaccgtaccgtaaattaaagataatccgtatagcagcaatccgctggagaacaatgccgtgagaatatatttggcacctgcctcggcagagtggtggcggtatttgtcgaaggcaaccagggctgccatcgggatgcttgccgtctccagtccgatgaagaacatcaggaagtgtccggcagaaatcatgaagtacatacccagcagggtggaaagtgtcagaatgtagaactcaccttgtttgatggcagtgtctggacggcgcatccattcgtgcgccatcaggaatacaatcagtgtacctatactgaggatggatttcacgatgctctgtatcggctgattgtgatacatgccgccgaaagcatctgccacaggaccgggaacgatggtgataagtgtgtgtatggtcagcagagcaacgggcagcattgtgttcagcaccggtttgccgtcattcttgtgtgcatccggactcatgaagaggtcggcgacaaaaaggatgacgatgaccaatatcagcgaaagctcttctttgagcaggaggaattgggaataatccatatctatttacgattttacgatttacgatttacgattgaaattactcttgggatttacgattttatgatttacgattgaggttactcttgggatttacaagtcatttatcaatcgtaaatcgtcaaatcgtaaataaatcagttattggcagcacgctgtctccaatcatgccgctaatccaccatggtgccataccaagggcggcaacgcatgctatgaggataatgaccgctgtgcgttcatcccaggtagcgtcgctcaaagtgaggtgatgcttgttagtgcaggtgccatagagaatctttcctaccagtcgcaggatatagactgccgtaatcacgatggagctgcatgcaatgaccgtccacacgcggtggaacgtatcgggatgctggaacgaaccggtgaagatggtcatttcggcaatgaaaccgctgagtccgggtaatcccagattggcaagaccggcgattacatagcagacagccagaaaaggcataatcttcatcagaccggagagttcgcggacgtcacgcgtatgggtacgtccgtatatcataccgataagggcgaagaacaaggctgtcatcagtccgtgagagagcatctgcagaacggcacccgtgcaagctgtctggttcatcatcaggatggcgaacaacaccaggccgcaatggctgacggaagagtaggcattgatatacttcaagtcggtttgtacacaagcggagaatgcaccgtataccacggagattccggtaagaatcaggaatatccatcccagttcttgtgcagcttcgggcatcaggtacatggctatgcggaaacatccgtaacctcccagtttcatcaatacaccggcatggagcatggatacggcagtcggtgcggaggcgtgaccgtcggggctccatgtgtggaacgggaacagagcgcccagcacaccgaaaccgaggaaggtgagcgggaaccagatacgttgctgttcgatgggaatattgtgcatctgtgctatttccaataggttcatagaggtggctccggcaccgtagtagatacccaggataccgataagcaggaaggcggagccgcccatcagcatcagtgtcagcttcatggcagagtactccttgcgtcccgacccccatacaccgataagcaggtacatgggaatgagggcaacttcgtagaacatgaacatggtgaacaggtctatcgagatgaagaacccgaacacaccgatggagaggaaggtgaaccaaaggaaatattctttagtcagcggttgcagcctccaggaggcgaatgttccggtaaagacaatgatggccgaaagcagcagcatggctaccgaaataccgtctactcctaccgaatagtggatgttgagtgcaggataccagaccatgtcagcacggaacagcatttcatccgtggcaccagcgtggcgtgcattgaggtacatcacggtcaatgctgcagaaagaaccagcagagccgatgcaccggtcaccatcaccgcgcgtatttgtacgatgttgcggctgagccaaagacccagcaacatcagcaaggggatgagtacgaataatgataaaaagttcatctttatatttacgatttaacgatttacgatttacgatttacgattgaaagatctcgggttatagcaatagcaacagtatcaatgccagcgtgcccagcaggaatacaaatgtatattgctggatgcgtccgctctgcagaccgcgtatctcgtcactggtagcctcggcactccaggcaaggaagttgaagaagccgtcgaccacgtggcggtcccaccaggcgatggggcggcagatgcagccgaagatgatgcggtgggtgatgaactggtaaacttcatccaggtagaagcggtggtaagctgctgtccataggcctttgaaacggcgtgccagtgcgttggcaacgggctgccggctacctgcatagatgtaggtggcaatggctatggcaaccactgctacgacgatacttgtacctgccacgctccaatccagatggatgctatatgcttcaccgttggaactgatgaagtgtccgaaaggaatgaaaccggcaactatcgtaaccacagcaaggagcatcaggggcagggtcatcgccagaggactctcgtgggggtgaggcatgtggctgtcgcccccatcgcttgccgacttttgtcccggctcagagccggcccaaaagataccataataaagacggaacatatagaatgctgtcatacctgcaatcactgtcataatccatcccatgatggggctgaactggaagcatgccgtcaggatttcatctttggagaagaatccggagaacggaggaatacctgcaatggcaaggcaagcgatgaggaacgtgatatgcgtaatgggcatatacttccgcagtccacccatggcagacatctcgttactgtgtacggcatggatgatgctacccgctccgaggaacagcaatgccttgaacatggcatgtgtgaacaagtggaacatgcctgccatgtagcccagtcccccttcgtgcgggtcggctgatgtacatacacccagcgccaccatcatgaaaccgatttgggagatggtggagaatgccagtacacgtttgatatcactctgcacacatgccacactggcggcatagaatgccgtgaaagctcctacgtatgccacgatgtgcagcacgctgggagcatactctatgaacaacgggaacatgcgtgccaccagatagacccctgcaaccaccatcgtggcggcatgaatcagtgcactgactggcgtaggaccttccatggcatcgggcagccagatgtgcaacgggaacatggcactctttccggcgccaccgatgaacatcagtcccaaggcaagcggaatcatggccgcaccgccctttgccagcgccatctcattggggctgaaggtgtatgtgccggcataatatccatagacaaggatacctataaggaaacctaggtcagcaaaacgggtaacgataaatgctttcttcgaagcagcaatagctgcgggtttcgtatagtagaaaccaatcagcagataggaggacacgcccaccaactcccagaaaagatacatctggaagatattcgtagccactaccagtccgagcatggacatggtgaagagcgacaagaaggcgtagtagcgctggaaaccgcgttcgcccttcatgtaaccgaaagagtatatgtgtactagcagcgaaacggtgctgatgactacgagcatcatgaccgaaatcgggtcaagcagaatgcccatgtcgatactgaggctttctgtgaaaggcagccatttgaagttatagggcattagcgcctcgtacgtaccatcggcaaggcggggagcgctgaagtacattcctgcggtgagataggaaagcactgcgaccacactcagtgccgcagttccgataaggccggcagtgcggtgtgacatccatttacctccaagtcccagagcgaggaaagagaggaaagggagtagaaggattaatattgtatattccatatatactatgtttatcaattattactattcaagaaacatcgcttggcgattcttgctcttaccacttcatctcatccagtttgttcacctggatgctgcggatgttgcggtagatgttaatcatgatggcaatggctacagccgtttcggccgccgagatggcgatggagaataaagagaagaaatatccttccagtcctccggggaataggaaacggttgaatacagcaaagttgatgtccgtggcattcagtatcagctcgatgctgataagtatcgccagcgtgttgcggcgggtgaagaacccgtagatgcctgcgaagaacatgatagccgaaactatcagataatattccatgtgtatcataattcttatcttttacgtgctattaataatccacctacgatacatgccaataacaagatgctgacagcttcgaagggaagcagataaccatacttgtcaccgctcagcatgtggtgaccgatggtcttgatgttgacttccaaaggctccacgtcggtggtggcaatgaacttatgcttcaaagtgatgaatactacgatgatggcaccgcccacggtggcacccagtccggcaaggaacctgctacgctttaacttctcgatgacatcgccttcgccactggtaagcagtatggagaagacgtagagcactacgataccgccggcatagaccataatctgcacggaaccgaggaaggtgtaaccctgcagaaagtagatgcctgccgtaccgaaaagcacgaacagcaggtaggtggccgagcgcaccatgcggtgggtcgttaccgtcaagatggaaaatacggtgataaaggccgcaaggaagtagaatactactgtttcaagagttatttccatgttgtttaattacaagttactattaacgaattactttgttgtctcttctttgggagcagtgggtttctttttttcttctacatggctgcctggacggttcagcgtcatgaccagtttcgtgcggtcgaacactgcatgctcaaaatcctggtcgaacgtgatggcatcgtgagggcaggcattcacacagagttggcagaacatgcacgaaccgaggtcgtattcgtacttaaccaatatcttctttttcttaccgtcttccgtttcaaccatctcgccggtcaccttgatggtgtcgttgggacaagccatctggcacaaaccgcaagctacacaccgatgttcatttttatcattatggggcatggtcagcgtgccacggaaacggtcggagagtttcaatgtcgagcggttttccggatattgttcggtagtctttcgtcggcagaatacggtcatggttgtcttcatacctgtcagcagagaagtgacgccgtgtatgagtccgccgatataagagttcttttctttcattacttttgcctttattaaaattatccgcaaggaaatcttgctccggcgctacgccggttagaaatgcaatttaaatactacaattaataccatcaaaatcaagttcaccatagagatgggtaccaggtacttccactccagattcagaatctggtcaatacgcaggcgggggaaggtccactttatccacatcagcaggaagactacgaagaaggcctttccgaagaaccatacaaatcccggaatgtaatccatcactgcgttgaagccgtccaggcctacgatgtgtagcggcatccagcctcccaggaagatggtggctgccacggaggctacgataaacagattcaaatattctgccagatagaagaatccgaagcccataccgctgtattccgtatggtatccggcagtcaactcgctttcggcttcgggcaagtcgaagggaccgcggttggtttccgcatttccggcaatgaggtagatgatgaaggctatcaatgcagggatatgtcccttgaagatgaaccagccgtcagcttgtccttctactatttcggagaactgcatggttcccatcaacactaccattgtcagtatgctcaatccgcaggacaactcgtagctgataatctgcgcaccgcttcgcatggctccaatcagcgagaatttattgttggaactccagcctgccagcaggatacccactacgccgatactcgatgcagccagcaggaagaacactcctacattgaagtccaatacctccaatcccttgttgatgggcaggcaggcaaatgtcaggaaagaagcgatgattaccatgaacggtgccagattgtagaggaaccggtcagagaatttcaaatcaatgatttcctttgtcaacatcttgatgacgtcgcagggcacttggagcaatccccatttccccacgcgcatcggaccgaggcggcattggaagaaggcgcatattttacgctccatgtaaatcaggatgatggcaagcacggcatacatcaagatgatgcatacgccaatcaccacgcattcgaggaatattgccagaccttccggcatcagggaagtcagcatctggtgtatccagttggttattatactaaagtcaaacacgttgttcatttactatttactatttacaatgtacaatttacgaggcgctttttgatttacaatgtacaatttacaatttggctgcgctgtaattccgcatggtaaattgtgaattgtcaaatcgtaaattcttttatctatcaatatctggtactacataatccaatgttccgccaatggcaataaggtcggcgattttagctccgcggcaaatcgtatttacggtcgataccaatggcaagcccgtactgcggaagtgcaggcggtaaggcgtcttgtcgccgtggctttcgaggaagacgccgaattcaccgcggctaccttctacggctgcataataagtgccttccggtacgcggataataggtttcatcttttcctggtaggctccttccgggatgttgtctatcagttgctcgataatcttcaggctctccagaatttcatccatacggataaggtagcgtgcccatgaatcgccttcggtgcggatgacttctttaaagtccaccttgtcatatacggcatatggcatacgcttacgcacgtcgcaggcccatccgctggcgcgtccggtgcctccggtagctccaaaggcgatggcatcttcccgtgagagtatacccacacctttcagacgttgctgggcaatgatgttcccggtgaatacgtcgtgatattcgtgtaggataccgcggaggtaggggataaactccttcactttctttacgaagccgggagcaatgtctgcctgcacgccaccgatggtgttgtagttcatgatgaggcgtccaccgcaagtttcctcaaagatgtcgagtatcttttcgcggtcgcggaaaccgtagaagaaggccgttaatgcacccaggtccatagcaagacaagaatagaacagcaggtgagagtctattcgctgcaactcgtccatgatggtacgtatgtactgcacgcgttcgcttacttccacgcccattgccttttcgatacacatgcacaaggcatggcggttctggtgtgcgcccaggtagtccagacggtcggtcagagccaaggtctgcggataggtcaggctttcgcacatcttctcgataccccggtggatgtagccgcagttggcatcaatcttgtcgatgatttcaccctccaatgatacacggaagcgcattacgccgtgggtggccggatgttggggaccgatgttcaccacatattcctcatcaccgaaaagttgcatctccttatttttgatgctaccgtcgggattcagctccaattccatggtagtgtccaccgtttcttcgttgtccatacgcaacggattatctttttccggctcattgtctttacgcatgggatagcctacccagtcattgcgcagatagagtcggcgcatatccggatgaccgatgaaaacgatgccgtaaaagtcgtagacttcgcgctcgttgaaatccgcagctttccagatatcgctgacggaaggaagttcgggatgttcccggtttagagtggcggtgcgtaccgctatccgttcgccggtaacagtagattccaacagatagactacgccgagtccgcggggggtgtccggtgcgtctttctcgtcgggtattccccaatccataccgctgaggcattccaggaagtccatttgtttctctttccgcagacgcagcatttcgtcgtgcaggactgagggctctatgtattttatttccatatttttaagtactgattagtggttctcttcttttctgtttactccaccgaagtatttctctattttcactttacgctgcaattgcatcatgccgtagtagaatgcttccggacgcggaggacaaccgggaatgtagacatccaccggcagaatcttgtccacaccgttcaccacgtgataggatttcttgaacgggcctccgctgacggcacagccgcctacggctactacatatttcggatcggccatctggtcgtaaagacgtttcagaacgggagccatcttgttggttattgttccgcaaaccataatcatgtctgcctggcgcggactggcacgggctacctcgaacccgaagcgcgccatatcgtagcgggctgcgccgagggccatgaattcgataccgcaacagctggttgcaaacgtaagaggccacagtgagttgctgcgtccccagttgacgaagtcgtccagtacgccaagggcgacattggcgcctccggcattaagttcccgaaccagtttctccaacgtttcgttgtctgtaaactcctcataagggatagatttaattttcggcttctttgttacttccattccaaagctcctttcctccaggcataagcaaggcccagaatcaatataatcaggaaaaataaaacactgaaaagtcctgccacgccaagttcgcgggtgatgactgcccaaggaaacagaaataccgtttccacttcgaacatcaggaacaagatggcaaacagatagtaacctacccggaattgcatccacgatttaccgcgggtagggataccacactcgtacggctccatcttctgtgcattgtacgaacggggtgctatcgcattggagagcgcgatgacgatacccacgaaagcgattgccgtcaataagacgaccactaacaaagtaaagttcataaacctgataagattttagatatataataatagatacatcgcaccggaggacaaaacctctgaattgttgtccggcgagtcaggggcaagcgtctgcgcttgcaggccttctaaatgataatctttcttagcccgaacacgtaatagttcgcgtcgggtacgggatgcggagacagattcaacaaacggtcgcattccggtgcataggcatgctgctgcatcttgtagatgtacatgcgcaggagtacgtttttgttggttggtacttgcgtatggtctacatgttctatgcagagggagtttggtgaaaacaagtcgtagaacttctggactgcttgttgggtggtaggagcttgtgacagcgtgcagcattctgcttgtcgggtggcaggaacgcacaaaatgtctacagctccggttgcactgtcgtgcaatagggctgcaaagattatgattaaacagtatttaatgcattgcttcataccacaattctctctttcaagggcgcaaagatataataagtattgttcaatttgctatccccgcataacaaaaaatgattatttttacactttttatcctaaatcaattccgtttccagaaatccggtgtgaaaagcagcagtacggtaaataactcaagacgacccagaagcattaaaaaggataacagccatttagctgcatcgggcagggcattccacgaataggcaggtccggtttcacccaatccgggtcccatattaccgatactggaaatgacgcagcccattgattcttcagccccgacacccatagccatcatgagcagtgtgccgatgactataatggagatataaataaaacaaaaagccagtacggtggagacaatggagggagagattacctgcttgtttatccgtaccggaagtatggcattggggtgtaggatgtgtttgaactcgtttcgtgagactttggtaagaattaccatacgtatacacttcaagcctccggtggtactgcctgcacacgcccccatcagcatgatgatggtaagcagcccccacaggacgggtgtccattgcatgtagtcatctgttgcaaaaccggtggatgtatggagggaaattacttggaacaaggatttgcggaaggattcttccatccccatgggactggtatagtaaagtacgatggctatgacggcagtgaagagcacaactgaaccgaaatagaatttcagctcggcattgctgatgaacttcttgaatttccggttgacgaacaataatagcaaggtgaagttgatgccggagataaacatgaaaatggagatgacatattctatataaggagaattgtagtaggcaacgctggcctgcttggtggagaagccaccggtaccggtagtggcaaatgcatggcagatactgtcgaaccagtccatacctccaagcatcagcaggccgacaagcagagcggttatgccggcatagatactccaaatccatttggcggtgataccgatacggggatgaaccttgtcatgtgtagggccgcttgcctcggcggcgaacacctgcaggccactgactccgaagatgggaagcactgcaatggtgaacatgatgattcccaagccgccaatccactgtgtcatactgcgccagaacagtattccatgaggaagtgactcgatgtcgtccaagatggtggcacccgtactgctgaaaccggacatggtttcgaagaatgcattggcaatgtcgggtatgtatccgcctatatagaaaggcagcattccgaaaagagagaatgccacccaggcaaagctgaccagtacatatccgtcacggcgcgtcagttgccgttcgcctcccttgccgagagctgccagcaataagcctacccctgctgtgatgcctcctgctttccagaaatcgagcatatcgctttctctgtagtagaaggacacgcccgaacagaccagaaacatgactgtttccagcaatagcagaataccgataatccgtatgattgtcttgaagttaatcatttaccaactactcattctcaattagttaaagtatttttcgattttcttaatcatcatgttcaggcagaataccactacatggtcacccggctgtatcagggtgttacccataaccacaacgccttccccctggcggataagtccgccgatggtggctcctttcgggaggccgaggtcttttaccggatgtttggtaatcttcgagccggccttaacggtaaattccgctacatcggcattggcaaaggtcaggcatttcacgttgctgacgtccgcatccagcatcatctggtagatgtggctggcagcaatcatctttttgttgatgacggtgccgatgtcaaggctttcggccatgcctatgtagtcgatgttctccacttccgctacggttttgctgactcccatgcgtttggcggcaaggcaggccaggatattagtctccgagttgccggtcaaggcaacgaaggcttccgtatttttcagtccctcttccacaagcaggtccatatcccgtccgtcgccattgataatcatggtacggtcgtcaagcagctcggtcaggcggttgcagcggttcaggtcgttgtccacgattttcacctgcatgtagtccgggacatattgggcggttcgtacggcaatccggcttccacccataatcatcacgttgcgcacatcggcataatcttccttgccggctattttgcggatgtaggggacgtattttcgtgtggtggtaaagtatacgatgtcatgtagcttgatggtatcgtcaccacggggaatcagtgtctcgcttccccgtttgatggctaccacgtgatagggcagctccggtccacccagttcgtggagggggatgttcagtatctcggctttttcgcgcatcttggtgcctatcagtatcaaggctcctccgcagaattcccaccattggcgtacccagctcatgcggatggaggacacgatttccttggcggcaagcatttccgggtagatgagtgaatcgacacccagcttctggaaaaattccttgtttttgggcagcaggtattcgtagttgtcaatgcgggctacagtcttttgtgctcccagattgttggcaagcatgcatgcggtcatgttccggctttcatcgggggtgacggctatgaacaggtcggcttctcccactcccacttctttcaagccttttatggaggtaggggaggctgtagccgtcatcaagtcgaagttagagttcagtgtgctcaacttctcttcgttgtcgtccatcagaatgatgtcctgcttctcgcgggacagcaacttggccaagtgtgtgcctactgcgccggcacctgcaataattattttcacttttagttcgttgatagttgataattaatagttgacatatggggtaaatgctcaaactgtcaattttcaactatcaattatcaattgattatagattccttcttcgtccattccgcaaagatggtgcaactcttgtatggtgccgtgttctatgaaggcatcgggtacaccgatacgtctgaaatggggaatatagtcattgtccgccatgaactccagtatggcactgcccattcctccttttttgacaccgtcttctatggtgacgacatgctggaagttgagtcctacctcgtgcagcagggcttcgtcgagcggcttgagaaaacgcaggtcgtagtgggctatggagattcctttgtccttctccgcacgctctatggcacgtgcggccacgttgcctatgggaccgagggtgatgactgccaggtctttgccttctttcagtctgcgccctttgcctacggggatttcttccagcggacatttccaatccagcaatacgccgcgtccgcggggatagcggatgacgaacggaccttggtccggcaactgtgccgtgtacatcaggcggcgcaattcatgttcgtccatcggtgaagatatggtcaggttgggaatcggacggaaataggccaggtcgaaaactccgtggtgtgtcggtccgtcttctcctaccagtccggcgcggtccaggcaaagtacgacggggaggcggagcagggcgatgtcatggatgacattatcgtatgcccgctgcatgaaggaggagtagatgttgcagaaaggctgcattccttctttagccataccgcccgagaaagtggctgcatgcccttcggcaatacccacatcgaaggcacggtcgggcatggtgtccatcagcttgttcatagagcagccggtgggcatggcgggggttactccgacgattttcggattttcctttgccagttctaccagcgtttccccaaacacgtcctggaaaagcggaggcaaattgctggtatccgccttgaggcgttctccggtttccggatcgaatttgcccggtgcatgccagatatccggattcttctcggcaggttcgaagccttttcctttcacagtgtgcagatgcagtattttcggtccctgcatatatttgatgtcccgcaggacacgggctatgtttttcacatcgtgtccattgatagggccgaagtagcggatgttcatcccttcaaagatattctgctgctgggcggccattgatttcaggctgttggcgaagcgaatcagcgctttgcggcggtcctcgttcaaaagtcccattttgaacagcagtctggatgtcttgaagcgcagctggttatagcggttgctggtagtcaggttgaaaaggtactgcttcatgccacctacacttctgtctatcgacatgtcattgtcgttgagaatgataagaaggttgttgggggtggacgaagcgttgttcagtccttcgaaagccaggccgccgctcatgcttccatcaccgatgacggcgaccacatggcggtctttctcgcctttttcggcagcggcaacagccatgccaagagcggcggagattgaatttgacgcatgtccgcaggtgaatgtgtcataatcgctttcctctggtgagggaaaaggacgaactcccttgaatttacggttggtggagaatgcttcacggcgtccggtcagtatcttgtgcccgtacgcctgatggcctacatcccagactatgcggtcgtacggagtattgaatacgtagtgcagggcaacggtcagctctaccgtgcccagactggctgcgaaatgtccggggttgcacgaaacctcttttataatgtcttgcctcaattctttacagacttcaggaagctcttctacgctgagttggcgtaaatccttgggaaatgtaatggtgttaagcaagttatatgttgttggttctgttctcatttctaatctgaagattacaaaatgcaaaaatagcaaaagaaaacggatggcgggaagttttagaaggaaaaaaagcctcttttgttcacttctgtttttactttctctttgcatacgccacatttctcgttccgcctgcctatagttaagggaaaagatgcctgatattaaatcgttcctccatggagaaaatattgttccatcctgtagaaaaaatcgttccaccatggtggaacgattttttctacatataggaatgatttagtgttagtagacaaggatattaatccttccaaagattgacttttattctcgcacgtgaccgtctgtgataagagctgctctacacttgatgtttgttgaaaaatgcaattttataaattatttattgcaactttttagaagctttggttgttgttgatataatattatatatattgcgaagtggaatatgtcctgtttatcaatatgttatacaattctgaattgtatgtgatggtattcttggttgtaatatgtgtcggaatggggtgtagtcacgaattgttaaatgaataaacaatgaatgatatgaagaaaaagcttgactttaaagttttggctattatgggcgtagtggttttttccgcttgcggttctgatagcgatctgttcaacccggaaaaggcggcagctaagaaagaggcacagtatgcatcggcttttgtgcagaggtatggagaaattgcagttgatcaggattggggatttggggtaacaccgacaacgcgtgttgctaacactaatagcaatcaatggaaagattttacggaagtaccggggagtgttacggctacagaaaaagaagtggttacggaatggtttaaaacatatcggaatccacaatccattgggggggattggaccgacttttttgttcaacatgtaagtggctcacactctaatatggattttttggttgcggcatcagatgaccatatcaataattttaatgctactgagggggctataatgctaatgcagaatagtggaacgtcttcttttggctatagggcttctctggatggtaaaatgcactataattatactatacaatatattgagggtgcttattatgtgggatttgactttgaagctaccggacagaacccaaatcaacaagtggctgcagatgggtattatagtgattggattgtgaagatctctccggccgtatatacgaatgcgtacagaatcatagcagaagaccttggagacagtgatgattttgacttcaacgatgtcgtgtttgatgtagcgaccaatggaggagcaactatcattaccctgcaggctgcgggtggtactttgcctttgtatattgaggtgggcggtgatagccgtgaagttcatggactctttggcgtttctaatactacaatggtaaatacaggtgctggggcaactaaggctccggtgatgtacagagttgacggtaccggtgccgtaaatatcaaagtggaaggtcaaaatgctgaagtatatacactgaaagcggagataggcaaagcgccgcagaagatacgtgtagagacaagatatgaatggactgctgaacgtcaggatattaatgataaatatccaggttttgcagattgggtggctgatcctacggctaattggtattaatagaatatatagtatttttatttaaggcagatgatataatgaaaggttatatcacctgcctttttatgtttcgaccgttatatattgaaatttactatctttgtggcgtagcaagcagttggtacatcatttttttcgagaaagtgaatggtttatttattccgagcttatgaatctttatacgcctgtagaagtagtttccagtatgccccttctttcgcaagagaataatctgttgctgatgggttcttgttttgcgtccgagatggggcaaaggctggcggatgccaagttccgttgtgacgtcaatccttatggtgtgctttataatccgttttccatttctgcggcattgcgtgaaatcattgcgggcagatgctacaatgaaaacgatattttcctctttcatgaactttggcacagtgccatgcatcatggtagcttttcctcagtctctgcagaggaaacattggcaggtattaacgggcgtttgaaaagcgcccatgaaaggctggaccggttggattgtctgttgctgactttcggctctgcctgggtttatgaaaatgaaaagacgggaactgtagttgccaactgtcataagcaacctgagtcctgctttacccgccgtatgctttctgtcagtgaaatagtatctgactacacctctttgctttccggcttgctggcgcggattccccggttgaaagtattgttcaccgtcagccccatccgccacgtgcgtgacggaatgcatgccaaccagctcagtaaagctaccttgctgcttgccgtgaaccagttgcaagccactttcccggaacatgttttctattttccggcttatgagttgctgctcgacgagcttcgtgactatcgcttctatgcagaagacatggtgcatccttccgaaacggccattcgctatgtctgggaacggtttacccggtcgtgtatctctgccgatgcgttacggattatggaagaaagtgaaaatatccgtaagatgttgtcacataagccattttatcccgcttcagaagagtataagcgttttttaggacaaattgtgttaaaaatagaccaacttaacggaaaatacccgtacttagatttccaaaaagagagagaaatatgtcgtattcgattgaaagcataaccgaaagtattggcgcacggcgtatgggaaacgcgccggctaccatagactggctgctcactgacagccgttccctgaattttcctgaggaaacattattctttgccttgaccaccaagagaaatgacggtgcgcgctatattgcagatttatatgcccgtggagtacgtaattttgtgcttagcgaagaaagctttagattaatggacaatggacaattgacaattgacaatgctatgcagcgtgatgatgcgcagtcaattgtcaattatctcattgttcccaacccgctgaaagccttgcaaaaactggcggaacagcatcggaaccggttccagataccggtcatcggtattacgggaagcaacggtaagactgttgtgaaggaatggctgcaccagttgctcagtccggaacgtgccattatccgttctccccgcagttataactcccagattggagtgcctttgtctgtgtggcagatgaacgaacagtccgaacttgctatttttgaagccggtatttccgagccgggggaaatgcgcgctttgcagaacatcatcaagcctaccataggcatcctgaccaatataggaggggctcaccaggaaaatttcttctcgttgcaggagaaatgcatggagaagctgacgcttttcaagaattgtgatgtagtgatttataatggtgacgatgagttcgtcagcaactgtgtggcgaagtccatgctgtctgcacgtgagattgcgtggagccggaaagatatggaacgtcctctatatataagtaaagtggagaaacgggatgactgtactgtcatttcctatcgctatctggatatggacaatacgtttactctaccgttcatagatgatgcttccatcgagaattcgctgaactgcctggccgcatgcctctatctgatgcttcctgccgaacagattacagaacgtatggcaaggctggaacccatcgccatgcggctggaagtcaaggagggaaaaaacaactgtctgttgattaacgacagttataattctgaccttggctcattggatattgcactcgattttctttaccgccgttcgcaaagtaagggattgaggcggactttggttctttcggatatattggagaccggtcagaacacgccgacactttaccgacaagtggcacagctggtaaacagccgtggcattgaacgcatcataggtgtaggaaatgaaatatcttcctgcgctgcacgctttaatatagagaagaccttttatccggatacagcggccttgatacgtgccattcagcgtggggaacttcgccttgaaaacgaaataattctgattaagggtgcacgtaagttcggttttgactccttgacggaagtattggagaagaaggtgcacgaaaccattctggaggttaatcttggagcgatgattgccaatctgaactattatcgtggcaagctgaagccggaaacaaagatggtctgcatggtgaaagcctccgcttacggtgcaggttcttatgagatagccaagactttgcaggaacatcatgtcgattatcttgccgtggcggttgccgacgaaggctccgaactccgcaaagcgggcatcactgcgaacatcattatcatgaatcctgagatgactgctttcaagaccatgttcgattacaagctggagcccgaagtatatagcttccatctgctggacgctttgattaaagaagcggaaaaggaaggtatcacaaacttccccatccacataaagctggataccggtatgcaccgcctggggtttgctccggaggatatgccccggctgatagaacggctgaagggacagaatgctgtgattgcccgttccgtcttctcgcatttggtagggagcgattcgcaacaattcgacagttttacacgccggcagatagaaatgttcgagaaagcgtccatggaattgcaggaggcttttccgcataagatacttcgccatatctgcaattccgcaggtatcgagcgtttccccggggcgcaattcgatatggtgcgcctgggtatcggcctctatggtgtcaatcccatagacaattccattatgaataatgtgagcacgttgaagactaccatcctccagatacgtgatgttcccgaagaggatacggtggggtatagccggaaagggcatctcacccgtccgtcgcgtatagcggctcttcccatcggttacgccgacggcctgaaccgccatcttggaaatggacatgcctattgtcttgtaaacggccaacgggcagcctatgtagggaatatctgcatggatgtctgtatgattgacgtgacggacatcgattgcaaggagggtgacagtgtggaaatttttggtgaccatctgcctataaccgttctttccgatgtactcgaaactattccttatgaggtgttgacaagcgtttctacacgggtaaaacgtatttattatcaagactgaagatagggggcagggattagggattagggattgcgataaaattaatccttaatccttaatccctaatccttaattttcctatctttgcactataattaatcagatataactatgacaaacttacttttattaggctttctgcccagcggttccgaatggataattattgcattggtcatcttgctgttgtttggtggtaagaaaattcccgaattgatgcgtggtttgggcaaaggagtgaagagcttcaaggatggtgtgaatgaagccaaagaagagataaacaaggctcaggaagatttggataaaccggctgaaaagaaataaaggaacaagggtatttattatttgacaatttactatttactatttgatactctgagaagttcaggagtatgggtaggcttgttgccttttccacagcgcagcccaaatagtaaatagtaaattgtcaaatagtaaatccccgcagcgcagcccaaatagtaaatagtaaatccctttatgtcagaaaaagaactaaccttttgggaccacttggacgagttgcgccgggtgttgtttcgtgtactcggtgtgtggtttgtattggctatcggttattttattgccatgccttatctgtttgacaatgtgatattggctccttgccataacgacttcattttctatgacttgctgcgctggatagggcagagactggatttgcaggatgaattctttacccaggagtttcatgtgaagctcgtcaatatcaatcttgccgcaccgttctttgtccacatgtctaccgctttctggatgtcggtggtaacggctgctccttattttttctatgaaatctggcgctttgtaagccctgcactctatccaaacgagcgtaaaggggtgaggaaagcgctgggtataggtacggtgatgttcttcatcggtgtgttgctggggtattttatggtctatccgctgacattgcgtttcctttccacttatcaattgagcgcagccatcgagaatcaaatttccctgaactcgtacatcgacaatttcatgatgttggtgctttgcatgggactggcattcgaactgccgctggtgacatggctgctttccctgctgggactggtgcacaagacctttttgcggaaataccgccgtcatgctgttgtcatcattgttattgcctcggccatcattactccgaccggtgacccgtttaccttgacagtagtggcggtgccgctttatctgctctatgagttgagtatcctgatgataaaggataaaaagactgatgatgaagcggaagaagtggagacagaggaatgatggattgtgaagtaaaggaatattttagtatattgctggaagcctgccacgttgaggaaatctccttggacgtggcctatcggcaattgcgcgagttgctggagcgtttgtgccgtacacagatgcccgacggcagcttgcagatgacggacctttctgcacgtatcagtttcgtggcttcgaaggccggactttccaccgtggaacagaaccgtctgcataccttccggctgacctccaatgctattctgaaccgccaggcggaaccgcaacgtgaacagttgttgcgtgatgccaagacactggcattctttgtcaagcgcttgacgggggaggagatacctgccgaactttatcgcctgctaccccgtgcggatgccacctatatagtggcaccgcccgccaaagaacggataaagcgcatgcgcgtctgttttcagtatgccgatgatacttatttatatgtactgcccgtagacactgtagccgatgagccgttgcgtgtccgttataatgtacctcagattaatgaagagtttgcagaaatctgccggattctgtggcggcatgcccaggtcaatctgctggatgttacggtggacgaagtcggcatactcaccccttcctttattatacttgagcccgattacttgatagacatcagttcgcttgccgaatgcttcaaggattacgggcatcatcctgccaattatatcctggcacggctccagtcgccagacaatacccgtccgttactgttgggtaatattgccaacctctttctggacgaatggattcatgccaaggaggcacccgattatttggcatgcatgaagaaggccttccgttcttatcccatcgagctggcagcatgtgccgacctgcgcgaccgggagaaggaagctgaattcttttccgattgcaagcgccatttcgataatatccaccggacggtgacagaaacattccgtgcatccggctatgagctcgataggactgatgccgtgctggaaccctcttacatctgtgaagcattgggtttgcaagggcgtctggactacatgcagcgggatatgacctcgttcattgaaatgaagtccggtaaggcggacgagtattccatccgtggtaaggtggagcctaaagaaaacaataaggtgcagatgttgctctatcaggctgtgttggagtattctatgggaatggaccatcgacgtgtaaaggcttatctgctctatacccgttatccgttgctttatccggcgcgtccttcgtgggcaatggtgcgccgtgtgatggatgtgcgtaaccggattgtagccaatgaatatggcatccagttacggaatagcccacagtatacggcagagcgcctgaaagacatccatccggataccttgaatgagcgcggtttggacaataccttgtggaaacgcttcctttgcccctccatcgatgccgtagcgcaacgcatccgttcgctttcgtcgttggaacaaagctatttttatacgctctataactttataaccaaggaactctatacctccaaatctggagatgtggattatgaaggacgtaccggtgctgccgccctctggctttccacactggctgagaaatgtgaggcaggtgaaattctgtacgatttggctatttgcgagaatcatgcggcagatgcgcataaaccgtatttgtcactcagaacgaagcaaatggttgcttcccggcaggagcgggttctgcccaatttccgtcagggtgatgcggtggttctttacgaacggaatacggataccgacaacgttaccaacaagatggtgtttaaaggtaatatagagcgcatatccgataacgaggtctgtatccgtcttcgtgccactcagcagaatgcgggtgtattgcctgctgctagcctttatgccatagagcacgactatatggacacctcctttcgtagcatgtatctgggactttccgctttcctttctgccactcaaagacggcgtgatttgttgttggggcagcgccctcccgagttcgatgcttctttggatactggtattgcgaccgctccggatgatttttcgcggattattctaaaagcgcaggctgcccgcgactatttccttttaatcggtccgccgggtaccggcaagacctctcgcgcgctgcggggcatggtagaagccttttaccgggaggggaaacagattctactgctttcgtataccaatcgtgctgtagatgaaatcagtaaggcgctggcttccattgagcctgaaatagactttatccgtttaggcagtgagttgtcttgcgatgactcattccgcccgtatctgattgagaatgtgttggaatcttgtgccactcggcggcaggtgcaggagcgcattgcccgttgccgtgtttttgtcggtacggttgccacgctttcttccaagaccgaacttttccggttgaagacttttgatgtagcgattgtggatgaggctacccaaattttggaaccacaactgctggggttactctgtacccgcaatcccgcaggcgcggatgccatcggcaaatttattttgataggtgaccataagcagctacccgcagtggtcttgcagtcgtccgagcagtcggaagtgtgtgacgaagctttgcaggccatcggattgtataatttgaaagattcccttttcgaacgcctttataggaatctctccaaggaaagtgccaatcgccaggcatcaacctctcattcttcatcttttatccctcatccctcctacgacatgctctgccgtcagggtcgtatgaatatcgaggtagctttgtttcctaaccgggctttttacggtggtctgttggaaccggttggtctgccgcaccagcagggagagctgattcttgctcctgagctgtgtgattgtgagtttgccggcttgctgactcgtcgtgtcgcttttctgcctgccgcagtcgaaccgccggcacagtcggccaagatgaaccattcggaggcgcggattgtggcacggttggcagcggctatctatcggcagtatgcagctgtttccggtttcaacccggctgtcactttaggtgtcatcactccttatcgcagtcagatagccttgattaagaaagagattgctgctttgggtattgctcctttggaggatatattggtagacaccgtggaacgcttccaaggtagcgaacgggatgttattatctactctttctgtgtgaaccgggcttatcagttgaagtttctggcaaatatgacggaggaaaacggtactcggattgaccggaaattgaatgttgcccttactcgtgcccgcaggcagatgtttatgacaggagtgccgcaactattgaaacttaatcctatttatgccgagctcttgtctgtagtttgccattcgtaaccgtcttatttagtaaatcttaaatattttctgcttctttatagagtttattaataacgctgtgtgagataaaccattatctttgcatcacgtttttttcatagagatttagatttaaggttagaagaattgtggaagtcgtgagacttccctttttttcatcttaaattgtgttccatttacagttttttgtttttgactgtaattgaacgaagaaaagccatttcgtgagaaaaggctttttttgtgcggagtttgcaaggcatgtaatgcagtttgcaaactccgcatgattctgaatatctatatagagacttctgattagtccactataatcggtttgtacttcggaaccagtgccttcatgatgcaccagcctatcaggtaggacactgcacatacacagaagatgatgaaatatccggcaggcttgccctggaatccaagaaataccatttgtgtcttgtcggcatagtcgaacagcaaaccggaactcatgttgataaggaatgagctgataccgcccgccatacctccgattcccacaatggtggcaatggtgctcttgggaaacatatcacctaccacagaatagatgttggccgaccaggactgatgggcagcgcctgcaatacctatgatgataatcgggaaccaataggcttgttcgccaaatacttccttgttgcccaatggctgtgcaaacaatgccaatagcgggaacagtgcaaagatgaacatggcctgcatgcgtgcggcgtaggggttcttaccggttttgttgataatgatggtgggcaatttcccgccatagacggacaacatcgtgatggcatagagcacaaagataagcatctgtgccgtgggagtatctgaggagaatccgtaaacgtccgaaatgtatgcgggtgcccagaagaggaagaaccaccatacaccgtcagtcatgaatttgccgaaaaatacagcccaggtttgcggatatttgaaacattgcaggaaagaaatgctcttttcatccttggttgtcggagtagtcgcctttttatccttctcattgtctttgtcttgttctatatatgccagctcagctgcgtttacgtgtggattttcatcaggtttcttgtacatgaatatccacagtcccatccagatgaaacccaatccgccgataacgataaaagccatttcccagccgttgcccacgcccatgcgttggaagtagcgggccagggtagggatacacaatggggctatcagtgctccgatggtagagccggcattgaatatggaagtggagaaggcacggtctttctttggaaaatattcggcagtcaccttgatggcggcaggaaagtttcctgcttcaccgatgcccagtatgatacgggcggcaatgaagtagtaaacgctggtgatggctatggtagaggccaatgcaccggtagcgctaatcatgttggcggcattttcaatgccgagggtcatttctgtggcaagtccgcagagggcgtgcatacaagcaccgatagaccatacggcaatggcccataaatacccttttttcgttcccatccagtcgatgaaacgtccggcaaacagattgcctaaggcatagacgatggaaaagatagctgtgatgtagccgtagtgtgtatcggtccagtggaattcgggggagatgaaatctttccaggtcaatgaaagaacctggcggtcgaggtaattgacggttgtcgcgaagaatagcatggcgcagataatccaacggtaattggtcatccgccctgcggtgttttgaaatgtactcatgataatagatttatattttgatgcaaatgtaggggtttgtgtgttgttcgaggtgtaatattgagtaaaaaggatgtagaaaatgacaaaaataggcatggattatttaagtccatgcctatcggacgttgcagggcaactttatttcatatcgatgtatttgatttcgtctttgtcgctgtatttcaggttttcaccgcccataccccagatgaaagtatagttgctggttccggcagcagcgtggatggaccattcgggagaagtgatggcttgttcgttgtgcagccatatcaaacgttcttcctgcggttcgcccatcaggtgacagatagcgttgccgggtttcaggttgaagtagtagtaagcttccatgcggcgagtgtgcgtgtgggcaggcatggtattccatacagagccgggagccagttccgtgagtcccatctgcaactggttggtaccgccgtctttcactctttccagtacatctttcacaatcagctggtttacgatacggtcgttgctgtcttccatttttccataatggtcggagatgcccagtgcatatttcttggggttggctttctgaagcttggcatcggtggtaatcagctgagtaacataggatttgtaggccggggccgagttgatgtagaacttggcgggattggtagcgtcgttgctcttgaaggttacttccttatttccgcagcctacgtaaagggcttccttatacttcatggggtattccttaccgtctacagtaaccactccgtcaccgccggtattgatgacacccagttcgcggcgttcgaggaagtaagtgatttccggacccagttcacggaacacttccaacttcaatgtcttgttcaccggcatggcgccaccgtaaatcaatcggtcgtagagggtgtaggttacgttgatttcatccggagccatcactttgtccatcatgaatctgctgcgcagaagttccgtgtcataatgcttcacgtcctgcggatggcaggcggtctgcactttgtaattcacttgggcattggctgccatggcagctgctcccatcataaatgcaagtactaactttttcataatccgttactatttaatttttaacttttaatttttgattgatttctggtatttgatgatagcacgacggttcataatcatcaggaacaatgtgcataatacaaggataccggagcctatccatttcaacgagtaggtcaggtggaaaatgacccaagcaaaggggctggatgcaaaatccagtgcgccgccttcaaagccggcggggatattcacggcagcatcttgtgtcttctcgtatacatcgtgggctgcttgtgtgaaatagggggcgaggtctgttacgaaataaagaccgatggtcagtacaacgagtccgatgatgaacgtctttactacatttcctttcgtgatgggcagtaccagtgggaagaggtagaacattccggccagcgatgccagaggcaggaactggttacccggcaggatgacagccagcagtatggttacgggaatcagcagcagggaaaccaccagcgttgcaggatggccgataaccaatgcggggctcataccgatgttcaggccgacagcacctttgaacttcttggcaatcagctcgcgggtagcatcagaaataggcttcaagccttcgatgaacaaagcggtgatacgcggaatcagctccattacggcgcccatcttgatacccaaacctaatatataaggtatcttgtctaccagttcctgaccgttcttgcaagacaaagcaccgataccgcaaccgaccagaatacccaggaacagaggctcacccagcaaaccgaatttcttcttcatgccttccgcatcaatgttcaatttgtcaaaaccggggattttgtccaatgctttattgatgactacggcaaatggaacgaaacctgcgcagaaaggctggggaatggagataccctccatcttgtcgtagaatccctggaatttgtcggcggtatagtcggccataatcagggtaatgatgtagcagataatagcggcgaagaaaccccaccagatattgtcgctggcaaaataaacgactgcgccgataaatgcgaaatgccagtagttccaaaggtcgatattgaccgtacgggtcgttttcgttaataacatcagaagatttactcccaaacataccggaatgatgaatgcacccaccgatgtgttataggctacagccgcagctgcaggccatcccatatcgaatactttcaactgaagaccgtaaatttcaacgacttggctcagagcaggaccgaggctgctggtcaacagcgcagtgacaactgacagacctacgaaaccgacacctaccagcagaccactctttagcgccttactgaatttgatgccgatgcatactcccaaaattgtaaagattataggcatcatcactgctgctcctaagccgatgatatagccgaaaacttgttccattctcttgtgatttaattaggtaattgagtttgtttttgcaatagtatgaattaaaaaccgggtcaaaaataagaccttttctcaattaatcaaactcgaaaagcataattatttagtaaatgggacaattttggacgaaattggtcgttatcgtgcacaaaattgctcgttttcgtacacgaaaaccaaataatacactctctgcattgaaaagtatacataggaaaaacaacaattttgggtggagtgaactttaatccagtttactgtgttattataagacattgaaacaaaccggactataatgatatatttgatttttttattggcaataggactattggtcggatggagcttatggaaagctccatccgatattgatttatggggaaaagatttagaggattgatagttatattggttatattctgaaaatttaactatattagcgccagaaaagcataaatatggcgctaaatctgataaaaaaggataaatcccactctgttgtaagcattaagctggatgagcaagagtttcataatatttttaaggaatattatgcggcgctttgttctttcgcgttccaatacatggaggatgcggatatgtcagcagatatagtacaagacgtatttgccaagttgtggcagataagagacgatttcttttatcttcatcaggtgaaagcttttctttatacggccgtacgtaaccatgccttgaacgaacttgagcattcgaaggtagctcatgaatacgagcaaaagattatagccaaaaaagcagatgctttttttcgtgatgcgattgtggaagaagagactttccggattctgtcagaagctatagagaaacttcctacccaaatgagagccatcatgcagttggctttggaaggcaaaaagaatgcagaaatagcagagcgtctcaatgtctctcccgaaacggtacatactcttaaaaaagtggcttataaaaagcttcgtgcattccttaccgattattattattgccttctgttatttatctaaaagcacatttttttctattttttcaaaaaaaagtctttatcgattcaccatgttttcattttggcttgtattatcattaaagatagactaaaacatgccaaattatgataaaagagtactttcatatagctcatcttatttccaagcacctatccggtgaagtaacaccggaagaaagccgttttttggataaatggcgcaaagagagcaaaagccatgagcagcttttccaaaagatttgtagtgatgaacattatgcacagcacgaaattcgtaaaatggagtttgattcgcaggctggatggaaaggtgtcgaaacacgtatcaagaggatggagctcagaaggagacatttgaaactgttacggtacgttgctctttttattgcaccagtgctgatattggtttttgcacttcaggatatttctgtaccccatgtcatggatggcaatcaattattggctgcccagcaaatactgccgggtggagccaaagctattcttacattggataatggggaaacggtttatctggatgagaatgccgatgggcggcagttgcagttggctggtaaacaaatacagatagattcaacgaccttgaactacagcgctgcagacgggcaggttgtgcagtcagctttggtatataataaagttgaagtgcctcaaggcggtgagtatacacttgttctgaatgatggtacaaaagtacatctgaattcaatgagcagtctacgttttccgcttactttcgaagctgggaagcgggaagtggaattggcgggagaagcttattttgaagtaaataagaccggtcatcccttcactgtatcgactcaaggtatgcagattgaggtgttgggaacaactttcaatatttcggcctatccgggtgaagaatatcaggcgactcttgtcagtggttctgttaaggtggacaccggggagggacagagtcttgtcttaaaaccttcacagcaggcatcattaattcccgggagcgggaatatacaagtgcgtacagtagatactgccttctatacatcatgggtgaagggaaaaatcaattttaaagatcaacggctggaagatattatgagaatcctttcaaggtggtataatattgaagtggactattcagacgaagcgttaaagaacctgcgtttcggttgctatgtgaaccgttatgaggaaatagctcctttccttgagctactggaagcgacggaaaacatacatgtcaaaatcaacggtaaaactattatattctataaataaccatttaataatttaattatgactaaggaacagagctacaccaggttttgggaaggtagtaaacgtatgtggattacattcctgtttttcagttttattatgattggctttgtgcaggccgccaatacggcgtttgcccagacaacagttactgtaaatgtgcaggacgccactttaagtgacgtgttatgggaaattcaacgccagacggattttactttcatttatagtacaaatgacgtaaagaatgtcaaggtacgtaatttgagggtcacgaatggaaaaatcgcagcagtgctggatgaatgtcttaagaatagcggattggcttatgtcgtaaaagacggggccattgctatccgtccagccaatgaagtgaatgctgtgaaggcagtagaacaagctaatgttatttccggaacagtggtggatgagaccggtgagcccgtcattggagccaatgttttggtcaaaggtactacaaacggccagattaccgatttgaatggaggtttctctatcaaggtggagcatgcatcggctaccttgcttgtctcttatgttggctatgttcgtcaggaagtgaaagctacttcgggtaagatattgaagattgtattggtgccggatgcaaatatgatggaagaggtggttgtaaccggttacggtacattcaagaaatctgcttatgcgggttcggctgccagtgtgaagaatgaaaagattgccgatgtgccttccgtttctttccaggatttgttgcagggaaatgctacgggtgtacagtttacttctgcttccggccagccgggttcttcagcttctttgagtattcgtggtatgggctctttcaatgcctccaactctccgctgtatgttattgatggagtgcccgttacttccggttcgataaactccatcagttcggatggtggtctggatgccatgtcaaccgtcaacacttcggatattgagaatattacgattatcaaggatgccgctgctgcatcactctacggttcgcgcgctgcgaatggtgtggttctgattacgacgaagaaaggtaaaaccggtaaggcttctatcagtttgaaagccgattggggattcagtgactttgctatggattatcgtcctactttaagcggagcagaacgtcgcgaatacatatacaatggtatggtgcttggacaacagcgcagcggcaaatcggatgcggatgccatagcttatgctgataagaatatcgacaaatatgctccggttccctggtgcggctatacggattggggagattatctgttcaagaaaggaaaccattccagttatgaggcttccatatccggaggaaccgacaaattcaaatactattcttcattgtcctatctcaaccaagagggcattgtaaaaacatcgggtctggaaagaattaccggacgtttgaatgttgattttcaggctacggataaattgaaattcggtgccaacatcatgtttaccaatctgaatcaggatgtatatagtgaaggaaccggttatactgctcctttctactccagcgtaagcaaattgacgccttcagatccggtttacaatgaagatggaagctataaccaggacttgatttcgttgtcaagaagaaatcccgttcttgcccaggagtacaattaccagcgtgagtatgttacccgtatgttcaatacgattaatgccgaatatgaatttatcaaggacttgaagttaaagtctattttgagctatgactataacatcagtaagggtaaggaatggaaagactcccgtacctccgacggtgagaagaataatggtggagccgaaaaggcatatagtgaatataacaagttggtgtggtcaaaccagttgacttacaagactactatccaaaaggaccacaatttagatgcccttgtcggatatgaaatcgattccaagtacaatgatttcttgtcgggatatgctactaacttcctgactccgataaagaatgacattgccaacgggcagactttggagagcatagatggttcttccaagaggtcaagaatggtttcttacatcacccgtctcaactatgactacaagaacaagtattatctgggtgggagctatcgtatggatggcagttcacgcttgcacagagataatcgctggggaagtttctggtctgtttcaggagcatggcgtattatcgaagaggatttcatgaaacccacgtccaaatggctgaccgatttgaaactccgtgcatcctacggtgtgaatggtacgttgccctccgacttatacggctatatgggcctgacaagccttagtggcggctatatggagaatcccgcattgattcagtcgcagattgaaaatagggatttggaatgggaaacgaattacaacctgaatatcggtctggatttcggcttcttcaaccgtttgaacttcactttggagtactatacccgtactactaagaaccttttgatggactgtcccgtatctatgactaccggtttcagttcctatctgatgaatatcggtgaggtgaagaaccagggtgtggaattggaaatcaattccaagaacattgtgtccaaagactttgactggtctacctctttcaccctttcgcacaacaagaataagattgtgaaactggacggcgaacagacccagattatcagcggctcgcagattcacatgattggcaagtcctaccgtacattctacatgatagaatttgccggaatcaaccccgagaccggtgcacctcagttctataccaacgacgtggacgagaatggaaactatattaaggaaatcacagagaataacaaggatgccaaagccattcctctgaagaaacatgccgagcccaatgtgaccggtggtctctctaatactttgcgttacaagtggttcgatttgagcttcatgttctcttatcagttcggtgcttatggatatgataactgggcacagaaaacagaacatggcggcaaggactttactcttaatattccggcctattatcgtgacaattggaagcaaccgggagatatcagtaaatatgaagtgtttatagagaagccggcggtagccatgaatggcgttaccactacccgccgcttgcacagcacggactttatccgtctgaaaacgttgattttcggtgtgaccgttcctaaaacatggactcggaaaatcggcgtaaacagcctgcgcctttacgcatctgccaacaacttgtggacttgggccgcttacgatttctatgatccggaatcagtcagtgcaggtacagccggctggggaacacctcctttgaaaacagtaactttcggtcttaatttgaatttctaacctcataataaagaaacacaatgaaagcattaaaatatatgatgatggggatgttggtcagcctgaccgcctcctgtggcaatgactggcttgatgttgaatccagtacaaagattccgactgaaaccgccatacagaatctggatgatgtggaatatagcttgaacggtatctacgacgtgatgcgcagtaccaactattactcgggccgtatgatttattacggagacgtgacgggtgacgatgcgcagtccataaagaccggaaagcgtaccaccagctactatatgctggactatacaaaggattccggtccgtcttcccactggtcttatgcctataagattatccagaattgtaatatcattttgtctcaaatagacggattggatgtcagtgaggatgatacggaatacttcaacgacctgaaaggccagaccttggctctccgtggatttgccttgttcgacctgacccgtttcttcggctatccgtatgccaaggatggaggagcttctttgggagtgcctattgtgaccgaagtatccaatacggaaaacaagccgtcgcgcaataccgttgcccagtgttatgaggcaatcatcaaggatttgaaggaaggtgctgacctgctggatgaagaattcaacaagggtaagattaataagtgggcggcaatgctgttgctgagtagagcctatttgtatatggaagataatcagaatgccttgattacggctgaagctgccattgcgggagcggaaaagaataagtaccgtttgtggaccaatgatgagtatggcacgatatggggaactgattttgcctcttccgatccgggagaagtcttgtttgagttggtgaatctgacagtggacggcgttggtaaagaaagtgtggcttacctttgctggcaggcgggttatgatgattattgcctgaccagttctttctatgaactgatgcaggaagatccggatgatgtcaggaatcaggcatatacggttgttcctaagacaaagagagcttacatagccaagtatcagccgcaaagcggcaaggctgtggaagattccaatattccagtacttcgtctgtccgaactttatctgattgctgccgaagcggctgtaaagctcaataacaatgacaaggctgtaaagtatctggatgctattgtcagccgtgccaatccggaaaggaccgtgcagggtaagacggtgacgttggatgatgttctgttggaacgccgtaaagagttgttcggtgaaggacaccgtttcttcgacgcccttcgtaatcatcagactatcgtgcgcaaggagtcgaccaaggaattcccggaaatagccgagacttcacatctgaagatggtggatgagagcgtatcttttgattggaactattatcgtgtagtattgcccattcctaaggcggagatgaattccaatccgaatatgcagcagaatccgacttatggtgattaattccaaaaaagcgagaatatgaagtatcagactactattataaagtctttttttactgtatttattctaaccttcatcagttccggcctaagtgccggaactcttggtttagacggtaagaagaaggataaggagaagaaggaggaattgtcggcagacggaccttatgtgatttatgaaccggacggcaaggtgcgcgtcataagtgttacagcccaggggcagatagaagatacgacttatacggtgcttcctcaggatttcacccttcatgtcacggaccacaaagggcgttatccgtttgatgtgaagctgcatccggtcaaacgtccggaatggcaatacagacaaccggataaagtgtttgtgatgtctgacccccatggcaagttgaattgcgtgatgagcttgctgcgaggcaacaatgtcattgataaagactaccattggagttttggaaccaaccatctggtggttatcggtgatatatttgaccgtggcaaagatgtgccgcagatattttggctgttctataaattggagaaggaggcggcagatgcaggtggtcatgtttcgtttctgttgggtaaccatgaaccgcttgtgacggcaaatgatttgcgttataccaaagaaaagtacaagacattggcccgaaaactgggtatggattatccggcattgttcggtccggacacagaacttggcaaatggcttggtacccgtaatacgatgcagaccatcggacctaatctgtatgtgcacgcaggtttgggaaaggagttttatgaccgtgacttgaatattcccacagtgaatgaggaaatgagccgtgcattgttcatgagcaagaaggaacgtaaggccttatcgcctctcacggctttcctatatggtaatagcggacctatctggtatcgtggattggtacggacggatgcaaaataccatccattggcacaagactccctgcaactgatgttgaaacgttatgacgtcgaacatatcattgtggggcatactatctttaaggatatttccactttctatgatggacgggtgattggagtgaatgtggataacgaggaaaaccgaaagaagaaacgtggacgcgctttactgattgacgggaatacctatcttgtggtaggagataaaggagcgatgcggaaattgttctgaggctgttctctttctgattattttttaggcgtggaagtacgtggatttcacggagagacaaagaaaaactccgtgtttttcgcgtaatccgcgcctaaaaaatatcataatgtaaatatgcattctcggatagctggggggagggagtgccctctcaaagagcggcgataacggcaatgtccgtagcattgtctacgatatgtgccggatgaaactcttccagttctgtgcggggacggaatccccaggtgactccgcaggcagtgactccggcattggcggccgtctgcatatccactccggagtctcccacatatagcacgtcttcacgggatatccgggtgatgtccagaatgtcatgcaccactgttgggtcgggcttcacgttgaccccttcccgttgtccgaagacggcggtaaaacgtatgttggggaaataatgtgaaatcagtttcacggtagccgattgatatttgttggaagccactgccaatatcatccctttctcctgcaactgttccagcagttcggggatgccggggtaagggcggcttttatcagcattgtgcacgtcataataaggcacaaactccttgcggatgcgcaggacgttttcttcgctcttttcccctttcgggagggcgcgctcgaacagtttgttgattccgttgccaaccatgaagttatagtccgattccgggtgagtgggatagccgagcgcttgcagggcatggtttgtactttgtgccaaatcggctattgtattcagtaaagttccgtccaggtcaaatataatcaacttcttcattgctttctctattttttagtttgctgcaaatatagggctttttgcgctcatgttcaaatgctgtctcgggtttcatcaggtatttgcagaataggaagccctggactgataatcagtgcattattactgcattcctgctgcatgctttttgcagtagtactgcaaatagggtgcagcgttactgcatatatgtttgcagtgatactgcaactgtattgcagtggcactgcacaagcgttgcagtagttttgcagtgggtgatcggtgtattttttgccgttcttcccttttctttgcacactttcgggctttttatgcaaaaacttcctatctttgcagccgaattttactaaaaataggtatgagttacaatttgttgaaaggaaaaagaggcattattttcggtgctctgaatgagcagtccattgcctggaaagtagcagaaaaagcagtagaagaaggtgcagccatcactttgtcgaatacgccggttgccgtccgtatgggcgaagtgtccgctctttcggagaaactgaactgcgaggtgattcccgcagatgctacaagtgtagaagatttggaaaatgtattcaaacgctctatggaagtattgggtggcccggttgacttcgtgctgcactccattggtatgtctcccaatgtgcgtaagaaacgtacatatgatgatttggattacgatatgttggaaaagacgctggacatctccgctgtctctttccacaagatgatacaagctgccaagaaactcaacgccattgccgactacggttcaattctggctttgagttatgtggctgcgcaacgtacgttctacggttacaacgatatggcagatgccaaggcactgctggaatccattgcccgcagcttcggttacatctacggacgtgaacaccatgtacgtgtcaacaccatttcccagtctcccacgatgaccactgccggttccggtgtgaagggtatggacaaactgttcgacttcgccaaccgcatgtctcctctgggtaatgcttctgccgatgagtgtgcggactactgtatcgtgatgttttccgacctcacccgcaaggtcactatgcagaacttgttccacgatggaggtttctccagcgtaggtatgagccttcgcgccatggctacttacgagaagggactggatgagtataaggacgaaaacggaaatatcatttacggctaatggaactcgcactttatcttttgccagtcacgctgggcgatacgcctattgaaacggtgttgcctccttataataaggagataatactgggaatccgctatttcatcgtggaggatgtgcgctcggcacgccgttttttgaaaaaggtggacaagggaatagatattgatgcgctgacattctatacgttgaacaagcatacgtcgcccgaagacatctccggctatctgaagccgctggtggaggggcatccgatgggcgtgatctccgaagccggttgtccggctgtggccgacccgggagcggacgtagtggctattgcacaacggaaaaacttgagagtggtccccttggtggggccctcttccattatcctctccgtcatgggttccggcttcaacggtcagagctttgccttccatggttatcttcccattgaaccggcagagcgtgccaaaaagctgaaaatgctggaacaacgcgtctataatgaacatcagactcagcttttcattgaaacgccttatcgcaataataagatgatagaggatattcttcataactgccgtccgcagaccaagctctgcattgcggcgaacattacttgtgaaggggagtatatcaaaaccaagaccgtgagggagtggcagggcaagactcccgacctttctaagattccttgtatttttctcttgtataaataatagcttccaggtgctcgaattcatattccaggcaactgctgaagaagttccgtcccaggttgtgttccatttgctggaatgtccatagctttccccccttgaaattcttattgcataggatggagtcatcgtccaggtctagcgtgaagagatagaccaggcggttggtggcttcattctcaaaatgatacatgaagttgaagtgcaaatggtctaatggggcggtgggaagcgtttgtcgtaaaattctgtgtgcgccttgttccaatgtttctccatatatcaggtaaccctccatcagcaagtcgattttatctttctcgaaaacgttgcatttggggcgagggaggagaaacagcatgctgtgtgaggcaacggcaatccggatgaccggattgatatagtcgtttttccggttgatggcctctgaggcgatggctttccccatgacatctcctttggtgttgactatcggtacgaaaaccgtgtggttcatcactatattgaaatagaaaatgccgaactgattgaacagaatgcctgatataaagacgaggggaggcgccacataaaacagaatgtggcgggtagtgtctcccaaagggtaactgaccagaaccgccaagaagataatcagaaaatgcagcaggcttatgataaggattacgcgtgcggatacgatggcggcttctgccccttgtgcaaaaagttgcttgcagcatttctgtgtctgagacatgtggtagtccagaaaccttctcctattgaggtagatgatgaacggggggatgatggcgctgatttccagcgtgaacggaagcatgaaacggggacagtagtttacgaggaatagggttgttaccgataatagcagtaacattccggtagtacagtaaagtatgatttgcggaacatgcgttcctctatgcctcaccgaatagatgctaaacaagagtcctacacctgcaccgatgtagatggacatgtcctgcgttataaactcgcataatatgatggatattataacggggatgaatcccagcgacatattgaatcttgatgataaaattctttgatggctcattatccgtattatgattttgtcgtttacatcataacaactgggaaatttaaatgtttcctattttacttcttttttgtataaaatggatctgtttttccgcatgataagaggagcgtaccaatggagcgctttccacttgctgaaacccttttttcaatcctttctctctgtagagtgcaaattgttcgggagtaatatatgctgctaccggataatgcttgtgtgtgggttgaaggtattggcctatggtcagtatgtggcagtccacccggcggaggtcgtccatcagttcttccacttcttccggagtctcgcccaatcccaccataatgccggacttggtggtagtattgctttctgcaatttgccgcaacacttccaggcttgtttcatacttggcggcactgcgtacgagggggctgatgcgacggacagtctccatgttgtgcgaaatgatttccggttgtgcatcgatgacttgtgccacgagttcctttcttccctggaagtcgggaatcagcacttcgacggtggtgtccggattgagccgcttgatttcccggatggtacgtacccagtgcgatgcgcctaagtcgggcaggtcgtcacggtctacggaggtgacgactgcatgggagagtttcatcaaggcaatggactctgccacatgtgtaggctcatcggcatccagtggcaagggcttcccgcttgccgtgttgcagaacttacagcaccgggtgcagatatttcccccaatcatgaaggttgcggtgcctttcccccaacattcccccatattggggcaacggccgctgctacagatggtatgtaggcaatgcgattcgacaatgcgtttggtctcggtatagcgctcgttggcaccgatgcttattttgagccactcaggcttacgtactctttcgggcattatttcaattctttgttgaagaagttggtcaaccgcgtgtataggtgtaaccgggtatttcctccgtagatactgtggttgcggttggtgtaaacctgcatatcgaactgtttgccgagttgtaccagttgttcggcatattcggcacagttctggaagtgtacattgtcgtctgccatgccgtgtaccagcagcaggttgccgtgaagcttgtcggcacgggtaaaggtggaactggccttatagccttcggcgttttctttcggtgtgcgcataaagcgttcgccataaacggtgtcgtagtagttccagtcggtaacggcagctacggctactccggccttgaataccggtgttccttcactcatactcataatggtcatgtatccaccgtaactccatccccagattccgatgcgttttttgtccacataaggctggttgcccatgtagagggcggtttccacctggtctttggcttccttgatacccaggttcagataggtgcatttggcgaattcggcaccacgtcctccggtgccacgcccgtctacgcaaaccacgatatagccttgtgatgccatgtaggtttcccagcttacactgaacttgtcaagcacttgctgtgaaccggggccgctgtactggtacatcagtaccgggtatttcttgccggcagagaagtcggcaggtttcatcatccagccattcaatgtggttccgtcggaagtctggaaagtgaagaattccttccgtggcatgtcatagccgctgatttcctgcttcaatgccgcattgtccatcagggtggcaagagtcttgccggtattgtcgttcagcgtaatgacggtcggagtgtccagattggaataacggttcatatagtacttcatgttcgcactgaactgcgcactgtttgttccggcttgtgacgatagtctggtctttttacctttccggtcaatcttgtagatggcactgcgcatggggctttcctcgttgctgctgaagtagaagcttccttcttcggggtcataacccaggaactcctgcacttcatattgtccggctgtcacttgtttcagcagattgccgcctatgctataccagtacagatggttgtatccgctcttttcgctgacaaaactgaaattttccggatagaagacgatgttgtcgaatacattctcgcggatataggtatcgctttcatcacgcagagccagtttggctaccgtgctgcgagggtcggcaaagtataggtcgaaccggttctgatggcggttcagtgtcatgacggcaagcttgttggggtcttgggtaaagcggatgcggggaatatagccgtctgcatctaccggcacgtttatcttgcgggtcactttcgacttgatatcgaaggtgtgtacggacactttggaatttacttctcccgttttaggatatttgtaagtatactctcccggatacttctcgaaaggggtgaagtggggggcttgtccggcaaaaagagggaaagagtaggagggaacatctttctcgtcgaagcggatgaaagccagcatctggctgtcggcactgaattccagcgcacggttgaaggagaactcctcttcgtaaacccagtcggggatgccgttcagcacctcgttctgtttcccgtcttccgtcacctggctttcgctgttgccgtagagcagttttacaaggaagatgttgttgtcgcgtacgaaagccacctgattgccgtccggtgaaaatacgggcacctgttgcgggccgccgtccgaaagcttttccacaatgttgttgattttaccgtccagattgcgctttaggctgtagatgtaatgcacagccgtataggaatgacggtagatgggagttgtttcggtggcaatgagcagcttactgccgtccggagcaaagctgtagctgtcgaatgtcttgaacgtgcattcgcgtgcggtagcggcatcaaacagcacttccacgggttttcccgttttgaaggagtacttgatgatttgtgtcctgtccgcattcatctgcgaataatgttccccgtctcccgggatggggataacgccggaaatattcttcggagtgaacttgcccgatacgatttctttcaaatcgagtgccttgccactttgggcgaaacctgccagcgtacagaggcagaggagaagtgcgatgcttatctgtttcatatctatcttttatgcttatctgtttccctattttttctggggaacaaatatacaacaaagggaagatttatcgaagcagtgggccgattttattctttttgaacagaaaaagcccgtcctgctccttgggggcgaagcagggacgggcctccgtcactcatggatgatgattggatgagatgatgattggaatatctttcgttacaagcacttgacttttctttgatattctgcaatggctgcatccagtcgttcgtgggcggttgtgtcacccggaacgttgtgcgacggatggatgtacaagtgtacgccacggtcggcaaggatttcggcaacggtagtgatggtcatccataccatggtgacgaaactcaatgtagacaacggacctaccttgtcgaagtggttcttcaaaggtacggaggcgtctaccaggggaacgcaggaatccactacgatatctgccaactggaagaggttctttccgctggagtggcggctggccttgtcgcccgtttcgctggctgaaccgtatacgataactttcatgccgcgcttcttggcttccaatgccatgtctatattgacggcattgataccggtatgtgagaaaatccacatgcagtctttggaatcaaaatcatagttcttcatgatttcctggccgtagccttctgcccgttccaggaagaggaactgatgaatacccatctggccgataatctgcgtgaagaatgtcagaggcaattcgcaaagcgggtggaatcctacaaagctgccgatacgcggatacatttcttctacgggaattgttgcgtggccgcaaccaaacgtgtggacccaacgaccggcttcgatggaatctgccataacagtggctgcttttttgatgttttccaactgggtagcctccagtttttccataatgccatgggcattctttaaccattcgagtgctaacataacttttttgttttttaagaagttaataaatttatttgagtgagcgtttatacaaaaggagcatgacggcaagtgaggcaatcatcagataaggataaagtccgatgccattggtgtattgggaaaccattcccatcaggccgttcattgcagtctggccaatgagggctatggcaagcgccacgctgaatgctgttcccgataaggacgggtaccggcttccaagaatgctgagtatcacgggatacgtggccgacagccccatacctaccagcaccatgccgactgccgcacgtgcaaaacccggcgagaacataaggaaacagaatcctatggcagtgagcgtaaggctgtagggcagcacggtttccggttttatcttcttgaatatcgcaacttgcatcatacgtgctacggtcagtcccgctaccatgcaggtcagtgcaatcaatgcctgattggccggaatatccgtcatctgcccaaagtaactcgtggaccagttgttgcagacaccctcgatgccgctttggaaaaaaagaatgaagctgagtagcagtaagctgctttctttcagcagtcccaatccctcttttaccgggaaaccttgcgcctgcttaggggcggggaagcgtacggggatacagaatataatgcccgcaagcatcactacgccaattcccagcaagatggtttcgaatgaataatgcctggaaagggagcccagcaacatcggtatgcccaatgcgcccagtccgtagaacatgcccagaaaactgaggcgtgagcctttttcggattctcctgagatgtcggataccaatgcattggtttctccgttgaggatgcctccgcccaggccgatgccgacgatggaagcttgcagcagtggcacgctttcaaagaaggcaagcccttccatccccagcagtacgatgatgcagctgggcaccagcagggctttatgtccgaaccggtctacgatgggaccgaaaatcagggaaccggccagcatgcccagaggcaggaaagtgaccagtgaggttgtctgcaacccgctcagattcagcttggctatgagggatggcaacactgctcccaatgtaatcatggagactccgaagaaacacatcccgatgcacgctgccgtgaatacgagattcttgtgataactgttactcatacaagtgatttttgatggcaagaaacgctgctcctatcagtccggcattaccggacaactgagaaggtacaaattccacctgcttgatgctgagcggttgcgcccatttgcaggcttccttgtaaatgtcatctataaagataccggcagggccgaatacgcctccgccccaaattatcttctgcgggttgagcaggctgaccagatttgcggaagccatgccccacatctcgacggctttgtgcaatacggagatggcaatagggtctttttcattataggcactgaacacatcataggccgatatgcggcagatgggtttctggcgcagttttcctttgtatgccttgttggcgcgtacggcatcgcgtacccgtgccccgataccattgccggaagcgtaatattcgaaacatccgcatgcgtcatactcttcccggtagggaggttgcagggccatccagccggtggcgccgataatgtcgttggctccgtgcaacacgtgcccgtcgatgatgatgccggcaccgataccggttcccacggcaatgaatatggcactgtgacattctttggcggcaccttgccacatctctccatacatatagcaggtacggtcgctgtcgatgtatatctcgatgcccggaggcgttacactgcgcagctcctcatagagggggtagttgtcccagcccggtatgttgggggcccatacccggttggtttgggagtaaacgataccggggatgcagacacctattccgtcgacgtgtatacggcttctgcgtgctacggtaagaagtttggcgaggatatccgcggcgagcttgcccacttcgtgaccggttcttcctttcaggagccgtttgcggttaaacatcatgcttccgtccggaaagaaaatggcgctggctattttggtgccgcctatgtccaatgcgattgttgccatggtgttatagtatttataggttgattcattaaggttgtatgcaaagctatgaatttatttcattcttgaggtgtataaactgaggaaattgtgtgtaaaaagagtgtctaatcactaaattgtgtttaatgtaattgcgcttggatgtactctttctcaattaattagttgtatatcagtggatgaaacattttttagtgcaggtggaatttctttgttttatgttcgttaacaaatcggatggaaagtattcttgtttttgcaggttcatcccacggaaaaatcctatatttgccacttacataaggaatatgtatggaaaccaaatctacgctctataatgagttccctttttttctgaagcgatattttccctataaggtacagaaaatatcgctgaatgccggttttacgtgccccaaccgggatggaaacaaaggagtcggcggttgcacctattgcaacaaccagaccttcaaccccgattattgccgtacggagaaatccattacccgccagctggaagaaggcaagcagttctttgcacacaaatatccggaaatgaagtatctcgcctatttccaggcctataccaatacgtatggtgaattggaagacctgaagcggaaatacgaggaggccttgtcggcagacggagtggtgggcctggttatcggcacccgtccggactgtatgcccgacagcctgctggactatctggaggagatgaaccggcatacattccttttagtggagtacggcatagagagtaccgacgacaagacactttgccgcatcaaccgcgggcatactttccatgccgccgctgatgcggtggaaagaaccgcttcgcgcggaatcctgaccggtgggcatgtcatcctcggactgccgggcgagacgcacgaaaacatcgtggcacaagccggcgtactgtcccgtctgccgctcactaccctgaagatgcatcagctgcaactgataaggggcacccgcatggctctggagtatcggcagcatcccgaagacttccatctgttcggtgtggaggaatatatcgacctcgtgatagactatatcgagcatctgcggccgaacttggtactggagcgtttcgtttcccagtctcccaaggaactgctcattgcacccgactggggactaaaaaattatgaatttaatcaccgggttcaaaaaagaatgaaagaactcggtgcatatcagggaaagaagtatgaaatgtgagaaaaaagaattatttttgccgcaactttaaatgtggaatcaatctaaataaagatacagttatgaacccaaaaacagtgataaaaggaaaaatccactacgtgggagtgaatgaccgcaataagcatttgtttgaaggcatgtggccgttgccgtacggggtttcctacaactcttacctgatagatgatgagacggtcgctttggtcgatacggtagacatctgctacttcgaggtgtatctgcgcaagataaagagcattatcggcgagcgccccatccagtatctcatcatcaaccatatggagccggaccattcgggctctatccgcctgataaagcagcattatcccgacatcatcatcgtgggcaacaagcagaccttcggcatgatagagggcttttatggcgtgacgggcgaacagtacatggtgaaggacgaggattttctggctttggggcatcataagctccgtttctatatgaccccgatggtgcactggcccgagacgatgatgacttttgacgaaacggaaggagtccttttcgccggtgacggcttcggctgtttcggtacgttggacggcgggttcctggatacgcgcatcaatctggacagatactgggacgagatggtgcgttactattccaacatcgtgggcaagtacggctctccggtgcagaaggcgcttgccaagctgggcggtctgcccatttccaccatctgctccacgcacgggccggtgtggacggaaaacatagccaaggttatcggcatctacgacaagttgagccgctacgccgctgacgaaggtgtggtcattgcttacggttccatgtacggcaacacggagcagatggcggaagccattgcggcggaactttctgcacagggcatcaggaacatcgtgatgcacaatgtgagcaagagcaatccttcttatatcattgccgacatattcaagtatcgcggacttatcatcggcagccccacctacagcaaccagatttatcctgagatagaatccttgctctccaagattctggtacgcgaagtgaagggacgctatctgggatacttcggctccttctgctgggcgggtgccgccgtgaagcgcatgggcgagtttgccgaaaagagcaagttcgagattgtgggcgacccggtagagatgaagcaggccatgaaggacattacttacgaacaatgcgaaaacctggcacgtgccatggcagagcgtttgaagaaggataggaagtagttgaaaattacccctaatttattaacctaataaaacaatcacaatgagactaatcattcaaccggattatcaatccgtgtcaaagtgggctgcacattatgtggctgccaagatcaaggccgctaatccgacacctgaaaaaccttttgtattgggatgccccaccggttcttctccgttgggcatgtacaaggaacttatcgacctgaacaagaaaggcatcgtgtcttttcagaacgtagtgactttcaatatggacgagtatgtaggtttgcccgaggaacatcccgaaagctactattcctttatgtggaacaacttcttcagccatatagacatcaagccggagaacaccaatatcctgaacggcaacgctgccgacctggatgccgagtgtgcacgctatgaagagaaaatcaagtcctacggcggcatcgacctcttcatgggcggtatcggtcccgacggacatatcgctttcaacgagccgggttcttccctttcgtcacgcacccgccagaagacattgactaccgataccatcattgccaactcccgtttctttgacaacgacgtgaacaaggtgcccaagactgccctgaccgtcggtgtcggtactgtgcttagcgcccgcgaggtaatgattatcgtaaacggacacaacaaggcacgtgccctctatcatgcagtcgagggtcccgtgatgcagatgtggactatcagcgccttgcagatgcacgaaaagggtatcatcgtttgtgacgatgcggccaccgaagaattgaaggtgggtacttaccgctacttcaaggatattgaggcagagcacctggatgcggaaagcttgctgaaataagcaaactaataaaagttttgcaattccaccctcaccaccctcaccgcttgtctgcatctgcttgttcatcggtgtttcaggggtgagtgagagcaatttaaaagggtgagggcaaattttgccctcaccctttttgttctcctgattttggttgactgttttcaggacagggcgttatgtgatgaaaacgggctctgctccgctgtaaggctttgggtgccaatgttaaagataccaaatactcactgcaaaaccagtgcatcgtttttgcagtgccgctgcaacatagatgcagtgccactgcaactgttttgcagtgctactgcaacgcctttgcagtgttactgcaaaagatgtgcagtaggtttgcagtgagggcttgtgatgaaaaagccatgggcgtgctttcttttttgcggaatatgtgctatctttgtcatacttgtaatttaaacagtagcagctatggaattgagtggcagacgctatccgatagggatacagaattttgagcaactgcgtacgcggaattgtgtgtatgtggataagacggagctggtgtacaaattggtgaatacagaccaaatttatttcttcagccgcccccgtcggtttggcaaaagcttgctcgtgtctacgctggaggcctatttccaggggaaaaaggaacttttcgaagggctggctatggaacgtctggagcaggaatgggaggtttgcccggtgctgcacgttgatttcagcttgacgaaatatactgagctgcgtgacttgacggggcaattgaatttgtttttatcccgttgggaagaaatttacggaaaaaaggaagaggaagagggggcggcagagcgtctgcaaggcatcatcctgcgtgcctacgccaagaccggaaagccggttgtagtgctgattgacgagtacgatgctcctctgcttgacagtaattccgatgcccttttgcaacaacagcttcgcaacgagatgcgcaagttcttcagtcctctcaaggggctggggcaatatctccgttttctttttatcacgggtatcagcaagttcagccagctgagcatcttcagcgaactgaacaatttgcaaaatatcagtatgcgcgatgacttcagtgccctctgcggcatcaccgaggaggaactgctgacgcagttgaaacccgatattgagcggatggccgaggctaatgatgagacttacgaggaggcatgcttgcatttgaagcggcaatatgacggttatcatttcagtaaggcttgtgcggatatttacaacccgttcagcctgttcaatgctttcaattccaaagaatacaagaactattggttctccacgggcacgcctactttcctgatagatattctgcgccatgcagacttcgatgtgcgtgcgctggaaggtgttgaggctaccgatgagcagtttgatgcgcctacggaacagataacgagtcccatcccggtgctctaccagagcggttatctgaccattaagggctatgaccgtaatttccaaatctatcgtttggcctatcccaacggtgaggtccgtaaagggttcattgaatccctgcttccctcttacgtgcacttgcctgcccagaacaacaccttctacgtcgtctctttccttcgcgacttgatgaagggtgatgtggagagctgcctggagcgtacccgttccttctttgcctccattcccaatgatttggagaacaagaccgaaaagcattatcagaccattttctatttgctgttccgtttgatggggcaatatgtggagtcggaagtgaagagttccgtaggccgtgcggatgtggtggtgcagttgcaggatgtcgtttatgtcttcgagttcaaatacgacggtaccccggaagaggcgttggcgcagattgacagcaagcagtatgccatcccttaccgggcagacggcaggcgtgtggtaaagattggcgtgaattttgacagttccacgcggacgattggcgggtggaaaatagctaaagcagattagaagaagaaactgttttgattttatatccttctttctcaagtcattttccttttttctttatattattgtttaactttggcgctattaagcggatgcctcttcgagtgcatgggtagaaatgaataagcaacagaaaggaaggagtagatgaaacgctataagaagattcttatgatatggatatgtgccattgtagtggtggcagtgtctgtgatagtagcattatatgataatgccaaccagggacaagacgtggctaaggaggttgctgtagaaactctgcggaaggttgcggaacgggtcgtgaatcgggaatttgatgggctggggatgttctatgcatttgggtctgatagtggtaagaagcataccaaaaggaaagcgatatcagaaaatggtgaatttgaagtgataatagattcattgaaagaggcacaaggactattcccgttggatgtcgtagggtttaaagccgatatgttgaattattatggaaaatttccattggaagagatttgtcttgagtggaaagctgagatgaatgataggtatggcggagtcatgtgtgctctttttctgaaggttaatccgatgggaaagggcattgtgcaagaattatctactggagatgaaactataattgcttcacagaatgatttaggcacttactatttggacgatatgtacacaatgaggttgacagcttatatgctgcttgatttttggcactgtgtggattgggcagaccatgtgctgcagatactatcctgtattttgtgcattctgttattgggactggcggtttatataggagggcaacagtatagaaagagaaaaacggctgatacgttgacaaagagcacttaccggttcgggaagtatatatttgattccgtcaaccatacactgacttatgaaggtgaaaaaatatcttgtacgccacaagctgcgaagttattacttggttttgccaagtcgtccgaacttttcctgacgaacgatgaaatagcggaaatttgcggttggccattgagtgatttgaatttaggcagccgccgcagaaaagcaataagtttattgggtaaactctttgaggcggacgattccgttcagattcttcttctgccggaaaggaaggggtatcaaattgttatctccaagtagatgaaatgttaacccatattggtgtgtcgggtgtgaactttttttcacgccccaactttgggcgttttccgaataaagacttgcaaaagccaaaataatccttttatctttgtttgtgtaacaaaaaacaaaaacactatgaaaagcaaggtgaagctattaggaactttggcaattagtgccatttcgtttttaagctatgttcaaattagtcattcggaaaagctagatgatttgctattggaaaatatagaggcattggctgctggtgagagtggggatgatagcaaatgttttgggagtggttcaatagtttgtcctttaacaaatcaaggagtagctcatgtgcaaatttattatagcctgcctcattagcctatccgcactgtccttttcctcttgtacacagaaaaaagtagcaacttctgtcgcttacatggattttccgcaaacaatcgagctgaaagcgagggtgcagccattggacaccgctttgttccgttatccgttccgcgttcgggtgcagggtgataaggctgtggtaatggatttgcatggcacggactacttttgccatgttttccactatccgggtttccgctattttgcttcgttcggcaagcggggcgaggctcccgaagagatgctttctgctgaaaatatccgatggcatggtcaatctctgtggggacttgatgctggtaagtccgtattaaccaagtatgattttacttcgtcgggttgctcaatcgttcctcagaaagtgataaatatggatgctgacatgcttcgcgttttagactttgtgatggttgacgactttaccttcattgttccggacggatctggcagcagccgcttttgctgggtaaactatcaagggaaattattgcgcagaaccggtcaaataccgtcagccaatgcggaggctttacagaatgcccgtcctgcattggctcaggcatggcgtagctttatcgactataatccccgaaatggagtgctggcagcagttacccagttgggcgaagtacttgaagtctttaatttgaaagatagtacgcatgtggtacgcattggtccgcacggtgaaccggagtttaagatttctcagggttatggtattcctacgggtatcatgggatttagcgatgtccaagtggcagacagtgctatctatgcggtttttcatgggcgctcttttaaggaaattgcgcaaaatgtacagcaaggtgtctatttgccggatggaggacggtatatctatgtttttagtctgaccggcgaacctctctgcaggtatgtgttagatcattatgtttatggcatatcggtagatgaacaaaaaggaataatcttggcaacggatgtgaataaagatgatccgataatagagtatagtatgaaataaagtaaactataatatggatggagaggaacggacggtttacgtttggttggtgcatctcgtaccgtccgttccataacccaccaagaaaggaggtcgaggcaaagatagtaatttgaattgaaaacagagtgtgttttctgccatttcgataggtatggcaagaaaagagttctccaagatttttatatcttgattctggtacgcaagcattatgcttgtggtaaatgataaaaaaagaataatcttatactaataaaactgaagagtagtatgaagaaaatgattaagatagcttttgttgcagcatttgcagcgattgcaggatatggagtttatgcaaatcagaaatctgaagtattatctgatttgacattggctaatgtggaagcattggcaggtagtggtgaaacaactatagaatgttgtttggcactttggggcacttgtaagggggatattaaagccccatatgtgtgtgcttcaagatgatttgaggtatgatgaattagtgttatctaatttgtattgttgattttcgttgtagtcatctatgacattcttgaatatagattagatatacttatgagataggtaaggaatcattgtcatgtaattaggacgtacttaataaatgctttgattccttattttaaaaatcattgcagatgtatttaatgctttgaatgcagcgtttttattagtgattattttgatgttgattgttttacgttaagtgaaaatattatgaaaataaaatttcttttattattgattgtaatgtgctcttgtgaaaataagcctcaaacattcttggacttgttttcaaatagcataagtaaagaaatggtggttcaagactacgttccaactgattcattaagcatgccagaagctatattgtcggatggtgattatcttgtgtttttagaaccggcgttacctcaactgctgactttttatgattgcgaaaagaaaatattttctcatggattgaataaagggcagggacgagatgaagccataagtgttcagactataggtgttggcaagagtgcaggagaagtgtatgcttcggatttagcaactcagtctgtttttctattatcgcttaataataaaataaagaaagtaaggaaagattctatcagtatcgatactcgattctgtgaagttgcctatgataatgaattggctttcttcttattggtgggcgatgaaaaacgttttctgatgaaagcaaacggacaatatagaaaaattggtgaaaacatcgtgattcctaatatctctccggagattgtttcccaaacattgcagggcccttgtactatttcgagtgagaaaaaacggattgcttggttttccgtctacggtgatgttatggagatatatgattacagcgacttaaacaatgttgctcttgtaaaatcacatatttgcactcttccagtgtttaatagtagcgatggatcattgggctttcagacaaagctgagtgtctcatcggttacctcggacgataattatatatatgctctttataatgagagaaatttggaacaagccgcacaaaatagagcacaagctttcttctcaaagaaagttctgttatttgattggaatggtactccccgttttattgttgagctggataggccgataaaaagtataacgtatgataaaaagagaaacatggtattgtgtttaggattaaataatgatttggaatatgccgttttcggctttcctgtagatgtgtaattttgctctttttgaagtgatagaatatgaatttgagaaaatgtggttaatgaaataatttggtgatgaaggatgggtatttatttataatattgtcgattattgtattgttcttttttgcttgtacgagaagaaaaaatgatgatatgacacatttagtaaaagagtgggaaaaaaaagaaattattttcccaaataatctatattttacattatatggaaaggatactgttcaatatccggctcatttgcaatatacaattcttagctatgtggattcggctggatgtttcagttgtaaattgcaactgcctatgtggagggagtttatacatcggttggattcaacttatccaggaaaggtttctgtattactgtttttacattcaaaaagtgaaatagaattattgtatgctttaaaaaagaatggctttgactatccagtttgtatagatgaaaatgataaacttaatcgcttaaatcattttccatctgatatggctttccaaacttttttgctggataaggataataaagtgttagcgatggggaatccaattcttaatcctaaaataaaagaattgtatctgaaaattattcgtgggaatgatattgtatcaactgctggaaaaggcattacccagactaaagtccatatagatgtctcatttttgcatttaggtaactttgattggcaggaggaacaaaaagcaacttttatattgaagaatgtgggtgacaaaccattggttatacaagatgttgccacttcttgtggttgtactaccgtagcttattcaaaggaaccggcattaccgggtaaggaaatagctttggaagtggtttataaagccgaacatccggagcacttcgacaagacgataacggtatattgcaatacagaaaattctccgttggttttgaagattagtggggatgcaaaataactgattgatgggatgaaggagcggctgcaattgaaaaaatggttgaatggaataacaaacgtattattctgtctgtgcctgcttgttgtgatactgatagtattgcaggtgtttgtggtgacctccttcaagataccgtcggactcgatggaaccgtcgttgctggcgggtgattgtattctggtggataaatgttcgggtggagcacgcctattcaatgtgcttgatgccgtggagaaaaaggaggtgaggatgcaccgtatgtccggatggagaaattttcagcggaatgatgtactagtgttcaattttccttatccgggcaggtgggacagcattgcgctggacgtgatgttgtattacgtgaagcgctgtatcgccgtgccgggtgatacgttggagataaggaatacacattatcgtgtgtccggatttgatggtatcgcaggaaatgtgcaggcgcaggaggaattggatgaattgatatcttcgggaatgacggaggagcggggccttgttcttaagagctttcccgatggtggctgtaatgggtggactatcagcgagtttgggcctctttatataccggccaaaggcagcgtggtaggaatgaatccggaaacacggttgctgtatcggaacgtgatagagtgggaacagaaaaagaaactgacattgcatggagattcggttctgctgggggacagtgtgatacacaattaccgcttctgtgagaactattattttgtttcgggtgacaagatggtgaattcaaaagattcccgctactggggattactgccggaaccatttatagtgggaagggcatggctggtatggaagtccgtcagcccgaatactggaaaaatgagatggaaacgtatctttaaaagaatagactaagatgaaagttctgtttaaattgctctggatattattgattgccgggatattggaggcttgcaatgcttccggcagattggagtacgcactggagtgtgctgcaaccaacaaaggcgaactggaaaaggtactggaacattataaagatgagcctgaaaaatataaagccgcttgtttcttgatagaaaatatgccttatcactatgcccttgaaggtgaagaactggattctttgaaaacagtgctggcttcggcagatgcttatggggtgatgctgaaggatactgccgtaccggattgggattattataccccttccggattgcagagaaaaccggatgtactgaatataagggctgaattcttgataaataacattgatttggcttttgatggttggaaaaagcgtccgtggaatgcttccctttcttttgcagatttctgtgaatggctgcttccctatcgtatcggaaatgagactccggacaactggcggcagatataccatgaccgttattcctttttgctggacgaggtttatacgggtatcgatgtagtggaggcgattagcgtagtttgggagtatttgcagaaggaagacccttaccggtttacgtgggtctttaactatccgcatttgggaggagagtacctgctgcataatcgtatcggcaagtgtcaggatgcttgtgattttatgatttatgtgatgcgggccatcggcgtcccggtagcctatgatttctatactttcaatgcggaaacacggaaagggcatgtgtggaatgtggtgagggatgtaacgggtgtctgccttccttttactttcccttcccggaagccggaacggggaagtttctatattgacagtcggcgcccgagcgtggtttaccgccggtgttttggcagacaatgggacatggatggcgattttatgcggaaccggtccgtaccggctgcttttaaggatgtgtttgcaagaaaagtgtcggataattattttgattcgaatctggaactgccggtagaagggatggacgggaattatgtttatgtggggttgttcagtgcttatgggtggcggggaatagattttactaaggtagaaagtggaaaagcgcttttcaggaatttggcttcgaggcaggtttatatattgttggcattcgcaaacgggcagtatcgccctattggaaatcctttttattttgatggcaaggatatacatccttatgttgcagatacctccaagtgctattctactgaattgtatcggaaataccctctttcggaacgtatcaggaactatatgggagggataaaagacgggcattttgaggcggcttgtgataaggattttaaaaatgcggagttgttgtgtactgtgaaagatacgcccggtatcaattataatcacgttattcttgagaaaccggtaaggggtcgctatgcccgtttttgttcttcggcagagggatatgcggaagttgccgaaatgcatttttataaaggagaggaagagattgtccctatagacagttggggagatgctccagccacagcaaatacttttgcctatcaggtctatgataatgaaccgttgtcgtatttcatttcatcaaaacccggtgcaagtgtaacggtggattttggaaaggttgttactatagacaattttatgtatatgccccgtaacgatgataactttgtcaggataggggattattatgaactcttctattggggagagggctgttggaactcattggggaagaaaattgccgaaaaaccttttctaccatatgacgggataccatcgggagctttgctctatttgcatgacagtacccgtggagaagaagaactgatatttcatatggaagctggtaagcaggtatttgtatcggattgtaaggattgattggactgcctttcagattggaatagaaaaaatggaatagtgatatgaaacattggtgtgtatgggtatggtttacagcaggtctgtttgtggcttgttcttcggaaaatcagtggttggacacagctttgaatcttgccggtgataaccgtgcggagttgcaaaaggtactggaccgttacaaggaagaggacggtgacaaatatcgtgctgcttgttttctgatagagaatatgccttttcatggtgcttacgagggaaaggccttggagaattacaggaagtatttcagtgaatacgtttcatttccttattccaggcatgtgcaagagttgattgattccttgaaaagagcagatggagaattttctataaatcaattgacttataagagggacattatgacggtggattccgcttttttggtcaatcatatagaatgggcattcaaagtctggcgggagcaaccttggggaaagcatgttgattttgatactttctgcgaatatatattgccttatagaataggggatgagccgctttctctctggcgcaaagaaatttatgagtgctatagcccgattttggatgaattcaggaagacagatgaggctgataatcctaaggttgccgcccagttgttgatggatacgttgcggaaagcgaactaccggaatacggctctttttccggtgggacctcatttgggaccggatgtactgaaatggcatacgggcagttgccgagagtttacggatgccatgatatatgtgttgcgggcattgggcattccgtgcggagtagatagggtgatggtattgggagacaacaatgcctctcatttctggaattttgttttggataaggaaggaaagacatacattgcaaatcttccttatgaagaagtatggagcaaagcggaagaatatagcatttcgaggggaaaaatgtaccgggcaacctatagtattgataaggaggcggtacggaaactggggaaatattccgatgtttacccggcattccgacgtccgttcttccgcgatgtcactgcactttataccggtaacaggaattggactgtagctcttccggattctttgctttccggacagtttcgtgagggggatatggtgtatttgtgccttgccaacagactacaatggcaacctataggatatactttctttaagaagggggaggctcgttttgaggatgtgggaggcggggcggtctttacgctggctgcctggaacggaaaggaatgcgctgcagtatcttctccttttcttctggagcgtgaaaccggaaagatacggttcattgttccggaagctgaaaagcaggaattggtcttgtataggaagtgccatcttactttgagtgttcttttcaatgaccggatgattgggggagtagtggaaggaagcgaccgggcagactttgggtggaaggatactctacttttgataaaggaggctccgtatcggctatatactgtggcccggttgaagtctgataaaccgtatcggtatatgcgctataagggtgctgacggatgtttctgtaatatctcggaactggctttttatgagaatacggaagataccatacctctatatggggaaatcataggtactccgggaagttttgaagacaatacacatgaatatttgaacgcatttgacggtaatccggatacttcatttgattatatacatccggatggaggatggaccgggatggactttggaagtccccatcgtgtggagaaggtggtgtatactcctcgtaatgaggtgaattttatttataaaggtaatttgtatgaattgttttattggggtggaggaaaatggaattctgtcgggcggcaaatggctgtgtcagattctattgtctattcagggtttcaaggtgctttattttatctgaagaatcacacagccggtaaagatgaacggatttttgaatataaagacgggaaacaaatcttttggtgaattatagaatactattgaatatttgatagatagaatgaataatgtacgtaatctattggctggaagtttggtctacattgcttgtatagttttattgtctttggcatgtaacgtttcttccggacttcctgtagctgatgttatagggcaatggctctatttcgataaaagtgcattggtagttgcaggatgtctgttgatggctggattgatgatggaaaaaaggtattttctttttataccggtttcgtgggtattggtaatgctggggggcattgaggctgtttggggattgaggcagctttatggttatgctgtgtccaaccattccttgtatgtattgacaggttctttcttcaatccggggccttattccggctatttggccatgatacttccggtctgtctgtatcaatggctgaccaagaggggggagattctctgctctgaccggaatgatggaagaagatgggaaaaggtgatggataaggctggaactatggtcgctggtggtgtgatgctgcttatcctttgtgtgcttccggcaggaatgagccgttcggcatggttggcggcaggagtttcctgtctgtgtgtatatgcttggcatatggattggacggataagttcagattattatggcagcagcaaaggcagcgtgtggtgatggtagtggtcggtggattctgtgtcttgctattggcaggctatttactgtttgtcttgaaacccgattctgcacgtggccgtcttttcatgtggaagataacttgtcgtgccattgcagaaaagccgttgaccggatatgggattcataatttcgcagcagcctacggaaatgcgcaggaaacttattttgcagcaggtgattatgaactgtgggaggaacgtgtggcgggaagtccggaatatgcattcaatgaatatctgcaggctgcggtcgaactgggcattcctttggctgtatgtctattggttgtggtcgtgctgtgtttgtataggggagtccgtaaaggacgttatggtatctgtggggctattctttctttgatgatattctctttttcctcctatccgctacaacttccggtatttatcgttacatttggaggattgcttgtagcgtgcttgttcggtgccgaccgttggcaatggttgggggtggctgtattagtaggcatcattggcggttttcgcctgaagaatgacttgcaagtggagcaggcttgccgggagtggatgaatgcgcgggtgctgtataatgcaggtgcgtatcaatcggcagagaaagagtacgggcgcctttatcctctgttgagggaccgggcatctttcttgttcgaatatgggcatggattgcacaagcagcagcagttcggtaaatccaaccgtattttgaaagaagctttacagcgtagttgtgaccccatgatactgaatgtgataggcaaaaactatcagcagatgggtgattgcttgtcagcggaagactggtttatccgttccacccatcgtttgccgggacgtatttatccctattatctgcttgcgaagctttatgcggaaccaagcttcaggcaaccggacaagtttgaaaaaatgaagtggatggtattgacgaaagagccgaaagtgcattctacggcaatacgacagatgagggaggaaataaaaaagattcagcttatttttgtccatattaaaaaagatgaataaaaacgtaaagcgttaataatgagcgaactaattactaaagtgctatgaaaaaagtgtccacatgcaaatatcggttcgtttttttgaaacgattaattttatcaatttataattgagtatgaatatgaagacacagaactatcgatacctgctatgcatggccgttgccctgcttgccgcctgctccgatgccggaaagggaaaagagtccgaggaaggggtggcaaccgtcctgccaagtgaaagcaatgaagtgaccgtgaaagtcctgaagcgggcgacctttgagcatgaactggtgagcaacggaaaagtaaccgccggtgccatggcggatttgcgttttgagactaccggtgtagtggcacacatctacgtgaagaacggtgacccggtgcgcaaagggcagaaacttgccgaactggataagttccgcctgaagaacaagaccgcgcaggccaaggatgccttggaaaaagcggaacttgagttgcaggatgtattgatagggcaaggctatccggtgggggatgcctccaaagtacctgctgacatcatgaagctggcccgcgtgaggagcggttacgaccagagcctcgcccagtatgagcttgccgcgtatgaagaggaacacgccacgctggttgcgccttttgacggggtagtggcgaacctgttctccaaaccgttcaacgaggcaagtacctcggaagccttctgctccattatcggcactcaaggtatggaggtggacttcacggtgctggaaagcgaactgccgttgataaagagtggcgacaaggtgattgttaccccttattcggatgccggctttaggcaggaggggcgcatcacccaaatcaatcctctggtggatgacaaggggatggttaaggtgaaggctgccgtcaatggcaagggacggctgttcagtgggatgaacgtgagggtgaacgtgcaccgctctctgggcggacagcttgtaatcccgaagagtgccgtggtgttgcgttcgggcaagcaggtggtgtttaccctgaaagacggaaaggcgcagtggaactatgtgcagaccggtctggagaatgcggaaagctatagtatggccgacgatgccctgaaagaaggcgatacggtcattgtgacgggaaatgtgaatctggcacatgaagcatcggtgaaggtggttgatagataatgagtgataagtggtaattcaaaattcatagttcaattgataaagtttttgatacagcggcctattgccgtactgatggcatttacagcatgcttcattgtcgggctggtgacttacttcaccctgccggtatccttgctgcccgatattgccatcccggaaattacagtgcaggtgtcggcgcagaatacctcggcgcgtgaattagagaatacggtggtgaaacctctgcggcagcagctcatccaggtggcgaaactgaaggacatggacagcgagacgcgcgatggtgcaggcatcatccgcctgggcttcgacttcggtacgaataccgaccttgccttcatagaagtgaacgagaagattgacgccgccatgaactatctgcccaaggatgccgaacgcccgaaggtgataaaggcaagtgcgacggacattcctgtcttctacctcaacctgaccctaaaaaacgacagtgcatacggcaagacggacgaacgtgcgtttcttgatttgtgcgagtttgccgaaaatgtcataaagcgtcgcatcgagcagttggcagaagtggcaatggtggatgtcacgggtttggtcgaacgccagttacagattgtgcccgacccggataagcttgctgtgttggggctctccattgaagacatagaaaacgtgctggcgcaaaacaacgtggagccgggcagcatgactgtgcgcgacggctactacgaatacaacatcaagttctccaccctgctgcggacagaggaggacgtgaagggcatcctgctgcgaaaggaaggacgtatcatccgcttgggagacttctgccgggtagagattgttcctgccaaggagaaaggtgtctccatgagcaatggcaagcgtgccgttacccttgccgtcatcaagcaggcggacgagaatatggaagacatgaagcttgccatcaacagcacgatggactacttcaagaaagtatatcccgacattgattttagcatcagccgtaaccagacggagttgctggactataccatctccaatctgcagcagaacttgtcgttgggtttcttgttcatctgcattgtggcggtactcttcttgggggatgtcaagtcgccgttcatcatcggcctgagcatggtggtgtccattgtaatctgtttcttgttcttctatctgttcaggatgtcgctcaatataatttctctgtccggattgattctggcgttgggtatgatgattgacagcagcatcattgtcacggaaaatatttcgcagtaccgcgaacggggttattcgttgaggcgggcttgcgtggcgggtacgggtgaggtggtgacgccgatgctgagctcatccctgaccacggttgccgtgtttgtgccgctgatatttatgagcggcattgcgggagcgcttttctatgaccaggcattctctgttacggtggggctgctggtttcctacttcacgggtatcatgctgctgccggtcctctatatgctggtctaccggacggggttgcgcggcaggtcgtggttctcccgcatccgcatcaacaatccgttgaaggaacatacgctggaccgtttttatgatgtgggcatcgactgggtattttcccacaagacggtaagtatcatattctgtgtggtttctattcctctttgtgtctttctgttttattccatagccaaggagcgtatgccgcagatagaccagaatgaactgatagtccacgtggaatggaacgaaaatatacatgtggacgagaaccggcatcgtgtgaatgtgctgttcggacagttgttggacaagactgtggaacagacggctgccataggccagcaggactatctgctgaaccgtgagcaggctctctcttcttcggaggcagaattgtatttcaagacttcctcgcctgacgggattgctcccttgcagaagcaggcgggcgagtggttgatgcgggaatatccgttggcgacagtctccttttctccacccgaaaccgtgttcgagaagcttttcgtgaccggggaggccgatgtggtggcggaactttatgcccgtaacaaggagaaggcgccggcggcggaagaattgcgcggactggaacaacagtttgcggagcttacggggacagcgcccgtaggtatcgctttcgagaaccagcttgacataagcatcctgcaggaaaagctgttgctctatgacgtttcgtatgacgagctttaccgtacgctgcggacagcgttcaaggagaacagcgtagctatgctccattcctaccagcaatacctgcctatcagcattgtgggcgaggagcggacagtgaacgaggtgctgcagcagacattgatacagacccgtccggacagtaagggcgaagtggagcatattccgcttcgggagctggtaaaggtgcgtccggctgaggatttgaaaacgattacggcaggacgcaacggtgaatatataccgttccgtttctatgaagtggacgatgctccggagttgatggaaaaggtgaagcgggaggcagatgccacgggtgactgggatacggccttttccggcagtttcttctccaaccgccagatgctggacgagttggtggtgattcttttcatctctatcctgctgatgtatttcattcttgccgcccagttcgaaagcttcgtgcagccgctcatcgtactgctggaaattccgatagatgtggcgtttgccctgctgctgttgtggatatgcgggcataccctgaacctgatgtctgccatcggactgattgtgacgtgcggtatcatcatcaacgactccatcctgaagctggatgccattaatgaattacggaaagaggggatgccgttgctcgaggccatccacgaggcgggacggagaaggctccggcccatcatcatgacatcgctcaccacgatatttgccatggttccgctgctgttctcgttcgacatgggctcggagctgcagaagccgctttccatagcgatgattggggcgatgttcgtggggacactggtcagtctgttcatcatcccgttgatatattggtttatttatagaaaagaaagagcatgaagaaattaagtcttatacttttgttcagtctgggagccctttccgcttttgcccaacagcggataacgctcgatttgcagcagaccattgccctggcgaatgacagttcgctggaagccttccgcaccaagaacatgtatctggccggttattgggaataccgcacctataaggcaaaccgccttcccagcctgacgctgaacatgactccggcacagtacaaccgtgatatcaccaagcgttacgactccgaacaggaccttgacatctatcgcagccagcaatccttctatgcatacggcaatcttgccgtcagacagaatttcgacttgacgggcggtacgttctatctggatacggagctgggctatatgcggagcttcggtggaaacaagtatacccagttcaccagtgttccggttcgtttgggctactcgcagagtctggtcggttacaatcctttccgttgggaacgcaggattgagccgctgaagtacgaaaaggtgaagaaggagtatatttacaatgcagagcgagtatccgagcaggccactacctatttctttgcgcttgccatggcacaggcggaatatgatttggccaaggacaatgccgtctccaccgataccctctaccgcatcggcatgcagcgcttgaaaatagccgccatcagccgtgccgacctgctgacgctgaaactcgacgtggtgaatgcccgcaatactttgcagaatgccgccagtgccttgaagcgcgccatgttttcgttggcatctttcctgaatatggagaagaacacggatatcagggtgtcgcttccgggacgtccgagggcgctgaccataccggttgatgaggctttgctggccgctcaagccaacaatccggaatttctggggcttcgtcaggaagtgctggaagccgagcagacagtagacaagacgaagaaggaatcgcgcttcaacgccagcatcaacgccagcgtcggcttcaaccaggtggcagagaaattcggtgaagcatacaggcatcccatgcagcaggagatggtgtcggtcagtgtctccattccactggtggactggggcgtgaggaaaggcaaatacaacatggcgaggaacaatctgaacgtggtgaagacttctgcccggcagagtgaaatcagcattgaggaggaggttatcatgaccgtcagcgacttcaacgtccagcaagccctcgtcgccagtgccgaagaggccctcgaccttgccatcctggcgtataacgaaacccgccagcgcttcattatcggcaaggcagacatcaacagcctgaccctctcgctgaaccgccagcaggaagcgcaacgcaattacatctccgccttgcaggactactggctgaattattacaagatacggaaactgacgttgcacgactttgccagcggattttcgctgtcggaaaaatttgattataataactgatgaaacgagtttcttccttcaccgtcatagtggcgtttgtctgccttgctttggtaggggtggcgttgataccgctgctccccgtcaagctgaatccgtcacgcagcctgcccggcttcacggtgggcttcagcatgcctggcacttcgtcgcgggtggtggagatggaagtgaccagcaagctggaatccatgctggcgcgtatccgcggagtgaagcggctgaactccacctcgggtaacggctacggcaacattactgtggagctggacaagcatgccgatgtcgaggcagtccgcttcgaagcttccaccatcatccggcagacgtggccccaattgcccgaaggtgtcagctatcccaccattcacatgaaagtgcccgacgagaacgcctcacgccctttcatgtccttcacactgaatgccccttccactccgatattgattcagcagtatgccgaggagcatatcaagccgcggctggcaaatattccgggtatctataaggtggaactcagcggtgccacgcccatggagtggagactggaatatgacagtgaacagttgcgcttgctgggtgtgaccctatcggacatcagcgaggcagtacagcggcattaccggaaggaatttctgggtacgcacaatgtggatacaggtaacggtagccgggaatggatacgcctgacactggtgccggagagcaactcccttggttttaatcctgctgccatcaccgtgacggctaccgacgggaaactgctccgcttggacgaactggtgtcggctgtccgtatggaggaggagccgcaaagctattaccgcatcaatgggctgaattccgtctatctatccattactgcggaagaaactgccaaccagttgcaactgaaccgtgccgtgatggacgagatggaagctgttcggcaggtacttcctgtcggatatgaagtgcataccagctatgatgcgaccgagtacatacgggaagaactggacaagatttacttccgtaccggtttgacggtactcatcctgcttgtatttgtatggctcattactcgtaagttgaaatatctttttctgatagttaccagcctggctgtaaatatagcggtggcacttatcttctactacctcttcggacttgagatgcagctttattcgctggcgggtatcactgtctcgctgaatctggtgatagacagcaccattgtcatgaccgaccacattctgcatcggcgtaatctcaaggccttcctgtcggtgttggcggcaaccctcactacgatgggtgcgcttgttatcattttcttccttgacgagaagatacggctcaacctgcaggactttgcagcggtagtgatcatcaatctggctgtttccttgatggtggcgttgttctttgttccgtcgatgattgagaagataggactggtgaggcggattacggggaagaagaggcgtcttgtcttgccggggctgacgcaaacattcaaaacaaggttgggacggattttcagacgtttccccgtttatttctcctgctgctactctgctctcatccgttttctgtgccgttggcgctgggctgtatgcctgctgttgctgttgggtttcggtctgcccgtttttctgttgcccgacaaactggaaggagggggaaaatgggaagctgcttacaataaggtattcggttcgaatacctataaggagtcggtgaaacccattgtggacaaggcgctgggcggcagcttgcggcttttcatacagaaggtgtacgaaggcagttactttacccgtaatgaggaggtggtgctctatgccaacgccaaccttcccaatggcagcacccttgagcagatgaacactttgatgaaacgtatggagacctacctcagccggttcaaggaaatcaggcagtttcatacttccatctacagcccccggcgtgccagtatgcagatttatttcaagaaggaagcccggaacagcggttttccctatacattgaaagccaatatgataagcaaggcactggaactgggaggcggcagctggggcatctacggattgcaggaccaggggttcagtaatgacgtccgcgagagtgccggctcctaccgcatcaggatgtacggctacaactacgacgaactctatgagtgggcggagaagctgaaggccaagctgctgacgcaccggcgtatcaaggaagtgctcatcaattcggagttctcctggtggaaggatgactatcaggaattctacttcaacctgaacaaggagcgcatggcgcaagagggcatcgacgcgcaagtgcttttctctgcggtgcgccccatcttcggcaagaatctggagattggctcggtagcggccgagcagggaacggagaaaatcaagctctcttcccgccagtctgccgaatatgacatctgggcgatgcagttctttccctatggagtaggaaacggcaagcattacaagctttccgaactgactactgtggaaaagggacagatgccgcaggagattgccaaagaaaaccagcagtaccgcctctgcctgcaatacgaatatatcggctccaatgagatgggcaacaagatacagaaacgtgacctggaggagttcaacaaactgttgccgatgggttatacagccgagtcggacagcaacagttggtcatggggcgagaaggacaaccgccaatacctgcttctgctggtggtgatagccatcatcttctttacgaccagcgttctgttcaactccctgaagcagccgcttgccatcatctttgtgattccggtttcttatatcggggtatttcttactttctattggttccggctgaacttcgaccagggcggttttgcctcgttcgtcctgctgtgcggcatcacggtgaatgccagcatctatatcctgaacgagtacaacagcatccgacgtcgtttcccccgtctttccgctcttcgtgcctacgtcaaggcgtggaatgcgaaggtcgttcctattttcctcacggtagtttctaccattctgggatttatccctttcatgataggtgaggacaaggaggctttctggtttccattggcggcgggtaccattggcggactggtgatgtccgtcatcggtatcttctttttcctgccggtttttgtgctgaaacagcgtgattttcttaggaaatgattacttttgctcgattttgttacctgaatggatacttgaattttaaatatggaaagtgcggagtactctttggatgagttattatgtcagtctcttctgttgtttcgtcagtatcggttttatgatgctccggaatgtggagaaaaggcattccggatattggaggaagcccatgtatggatggggcgtacgcaagagtgtgtggatatggcgaaatgggggtgcgtgatagagtgtcttgcgcagaaatactacatagaagatgatacggatgcgattctggaagaaattgatgctgccttggttgcgcattggaagaggatagagaaaatccatgcagaagtcaccaccgtttatttatggctggggtactatttcctgctacgtttcagaaaccgggaatcccgttcccattcccgttgtaaacagataatgtccagcttgttgtgtgctttggtcgaaatctttcgtaaggtggagaaggggggagccccgacagaagtcttgtcacatctttcggtagatgtttggggagagaccgtctgctggatggagcaggtacatgattcccgtctttgcgagaagcagtcgtcagctttgctggcacaactctataacctgaaaagtgtggagttggaaaaaggtccgggaaagcaggatgctttgctccagcagattctggagttttattgcttttaagggaaaattatctctgcttagttttatcatttctgcttccacacttccacccacttcctgcatccctttattcatcggcattacaagtgctgtggaagcaactcaaaaaggtggaagcaacttttgcttccacagcggaaatacgccgaaaagtaagttaatatcttgtttgttagtgtattaatagaatgtacagcattttgcaaatatcttgtttacacgatatgcgtttcgtgtaaacacggtattaacttcgtaaaagaccgtttaccgatagactgcagctgggctcataataggaataagataggtgcacagtatggggaaactatgagtataataggtgttcaacggttatgaagcaccttgttgacggtcgttagtcgagtggttgacggccgttggcagagcgcatcacggccgataggcgctgataactccgtacagaaaatggaaaggaagcctatgtaaggggaaacaagctctgagctatttgttttgtttgtcacatttatcttgtttttgtacattgttgaagcggttttttgtatctttgaagggagaggccgtaaaaaagcttattctcatccaaagtttaattatatatacatggattatgaagcgatgtatagtactgttcataacattctgctgtgcagttgtttctaatgcgcagacaaatggcattgtgactgatggggaaaaaggattgccgttggctggtgtgaatatttatctccaaaaggattctgtgtatacgcaatgataatctggtaaagaacatgttcatatgaaaaaactgttatatcttgggcttttgtccgtttgtgtactgttaggttcttgcgtagagaagaacgtatccaatgtttttgataaggtagagaggtatatggatgtatatcctgacagtgcattgctgctgttggagcaaattcctcatccggaggagcttcgtgggaagtagcgggcggactatgcattgctgctaacgcaagcacgtgataaaaactatctggatagtttgcagtcggattcgttgataaaaattgcggtagattattataaggatgatggtgtaaaagcaggaaaggcattgttttattatggtaaagtggcagctttgcaagataatgatacattggctatacaagcttatttgagcgctttggctaaattggagaagacggaagaatataagttgcagggatttgtacatgaatatatcggtgttttgaatacggacagaaagctatataaagatgctctcgacaattatcaaagttcagcgtattgttttcaaaaggctgttgatactttaggagttatatatgtttatcgggatattgctcgtatttattatgtagaacagaaatatgacagtgtttataattacattaatcgtgctttgtccttgtgtgagaaaaagaaaggatgtatcagttttgaacgggtaatcccttctttattacaagtaaaagggattgccaaaagaaatgaaggggatttgggagatgcaatagccctgttgaaaactgcggtagagactgaacaagataggcattctatgcatcactgttcaatgtcattggggaatatttatttgaatctaaataagttggatgaggctggaagatgtttcgctttagctttgaattctgaaaatcctcgtactctggcgggtgcatatcactatttgtatctgttggaaaagaaacagaaaaagtatgcaatggctctctatttcaaagaaaagtctgattcgttgttagtcattgaacgggatgctaaacaaacatctcaaattttgactttgcaacgtaaatatgaaagaggaaaacttcttttagaaaagcaacaggttgaacgtgaaaagcaaatacagctttatttttggatagc

SEQ ID NO: 4405 - DNA, 93953 bp, Unknown
  gut microbiota DNA sequence
gtagttcatcctgacaaatacgccgaacgctttatctattacttcttcacggttagttattatcatacacgtttgtttttaatcggttacgaagatacggattttgttttaagcatttgtaccccagtgcttttttttagtgcaaggtgcaagtatatatttatatatatagcttgcaccttgcactaacccaaaaatatttattatcagatatttgcgagtttcaaaagaaagccgtatctttgaacccgaaagttaggcagacaaacagcggtcaaagttggacaagcccaacatctgaaaatcgttactgtttcgttacctatttgaaattttgaaagcaaagtagctgaaatataggcggttagagttataggttcaaaaccctgtctctccgctgaattaaccgggaaaaaccggacagtaaacatacaagtcccacaaattcaatgatttgtggggctttttttatccccttgtgcctgccttaaagtatttatctattaaaaacttaatcctacgaagcaggtcagaaaacaacataaaaaaggccatctatcccagacagccaatcttttgttaaccttaaatctaatactatgaaaaacacattacaaatgtacatgttttccactaacctccaaaccggcagcggttaatattatattatataacaacccttaatgctcattaaggctttatcagcgaaaacgcaacgtgcatttgctcccaacgcatcatccgtttgcccggtgtgcattatgcatccggcacagatggatgatgcgttctgcaaatccgtcacatcaacagtcaattctaaaataaccattacaatgaaagcaaccccaaacaaaggaatgaaactctccgctgaagatgtcagagcctgccttcagcaccgcttgcaccgtagcttgaactataggttctacctcgtgctgtgctcccgctacacctttcagagtcgcctgaaaggcgtggaacgctgccgtctcacgccagccacggtgctgggctacttcaaggaggaaggggaggagttgggggtaggaagtaaattggttagttcggatggaaaaattcgtatataatgcataagccgcatccgtcgaatataatgaaaggagatgtgatgaacaattactaacttatattcgtgagaatagactgattgagaaatattaataaagtaaagaacaaaagataacaaaatagtataggacagttaaagtacaaaggacatttcggtagcgtggaatacggtgaagaagacaattgcttgtttggcaaagttcttggtcttaaaaaggattgtattacctatgaaggtgaaatcattagtgaattgaaaagtgactttgagggtgctatccttcatggcatggcagccgccaacgtctctcccattctaactttgcaacatgttttattaataaaaatatgcaaaatagagaatgtatttctaatacattctgattattttagtatattatatatagggtggtggaggatgaggtgagtccctcttccgccaccttatttatttcattaatttttagccgattctaactgtttatttgtatccccttggctggtcccttacctttgtcatgttatcgaattaagaatagacaaagatggaaaaagaaatgagccccatgacaacggagatactgaagaaaggttatctcctcttccccattccccgccggtatacacggtttggtgtttctttgtgggatatgccagacccggataatgggaatgtagacacgcattggacgtatggcggttatgagtatgtgagtaatcaaaacttccatccaaccgcctgcgatgctccattcgctggaaaaggaaatgtggccggttgtgcggccaatcgtgcgtcatcgttgcaggtagcggattttttgttctttgtttgcagaaaggttatacggaagtactcctgcagggttcggatagtagtgaatcccgttgtgttttaaagtgttattatttgtagacagttaatgtctttttgttgtcagattcattgatttctattctcttttcgtatatttgcgcccattaattaaagattgtcacacgactgttctgaaaaaaagtgtgatattctgataacatatttaaatagggttattcctgattttacactaaactggataggattaatggagaatttgaatgcagtgattacgggagttggaggatatgttccggactatgtcttgactaatgatgaaatatctaaaatggtggataccaatgatgaatggattatggggcgcattggtataaaggaaagacgcattttgcatgaggaggggcttggaacttcatatatggctcgtaaggctgtgaaacaactgatgcagcgcacaaagaccagcccgaatgacattgacttggttatcgtagctactactactcccgattatcactttccttctaccgcatccatcttatgtgacaaattgggcctgaacaatgcttttgcttttgatatgcaggctgtttgcagtggatttctgtatgcaatggaggcgggggcgaattttatacgttccggaaaatataagaaggttgtcatagtaggagctgataagatgtcatcggtgattgattatacagaccgcactacctgtcctatttttggtgacggtgctgccgctttcatgctggaacccacccgggaggatatgggagtaatggatgccgtattgagaacagacgggaaaggtctgcccttcttacatatcaaagcgggaggctccgtatgtgctccatcttactatacactggacaatcggatgcattatatttatcaggaaggacgtacagtctttaaatatgctgtggccaatatggcggatgcttgtgaggcggtcatggagaggaatcacttggcgaaggaggacattgactgggtgattccccatcaggcaaacatgcgtataattactgcagtttcgcaacgcttgggagtatctcccgaaaaggtaatggtcaatatagaacggtatggaaatacaagtgccggcacgcttccattgtgtgtatgggatttcgaggataagctgaaaaagggggataaactgatttttacagcattcggagcaggatttgcttggggggctatttacgtgaagtggggatacgacggaaaaggttgaggctctctgataagatttaggttgtttgttttttttctgatacaacttttagtatctttgcgaaacagcagttttttattgtgacagaaaattacatgtgttttgttaaccatatagaaaactaaaaacaatcagcgtattatgaaccaggaattatccatgagccccaatctattggtggctgcccttcaaaaaccggcttccgaatttacgaaagcagacattgtttcctatataaaggagaacgacattcgtatggtgaacttcatgtatcctgcggcagacgggagactgaagacactgaactttgtcatcaataatgaagcataccttgatgccatacttacatgtggtgaacgcgtagatggttccagcttgtttccgtttatagaggccggtagcagtgatttgtatgtagtgccgcgtttccggaccgcttttatagaccctttttctgaattgcccacactgtcaatgctctgttcttatttcaataaggatggtgaaccgctggaaagttctccggaatataccctgcgtaaggcatgtcaggcattcactacggttacggggatggaatttcaggctatgggagaattggaatattatgtcatttctgaaaatgacggattgtttccggctaccgaccagcgtggttatcacgaatcggccccttatgccaagttcaatgatttccgtacggaatgtatgtcatatattgcgcaggcaggcggacagataaagtatgggcattctgaagtcggtaattttacgctggacgataagatttatgagcagaatgaaatagagttcctgccggtgcgtgccgaggaggctgctgaccaactggtgatagcaaaatgggttattcgtaatctggctagccagtatggatataacattacttttgcaccgaaaatcacggcaggaaaagccggttccggattgcatatacatatgcgtatcatgaaggacgggcagaaccagatgctgaaagatggggcactctctgaaacagcccgtaaggccattgcgggcatgatgaagctggcttcttccattacggctttcggtaatacaaatcctacttcctattttcgtctggttcctcatcaggaagcaccgaccaacatttgctggggcgaccgcaaccgttcggtattggtacgcgttccgttgggctggtcggcaaaaacggatatgtgcatgttggcaaatccgttggagaccccaagtcattatgatactacacagaaacagacggtggaaatgcgttcgcctgacggttcggccgatttgtatcaattgattgccggacttgctgtagcttgccgttatggatttgagatagacgatgctttaggaattgcagaaaaaacatatgtcaatgtaaatatccacaagaaagaaaatgaagataagttgaaacaactggaacagcttcctgacagttgtgccgcttctgccgattgtttggaaagacagcgtgctgtctttgagcaatatcatgtgttcagtcctgcaatggttgatggggttatttccaaactgcgttcttacgaggatagaaccttgcgtgcagagatacaagacagtccggaggagatgctgaaactggtcgagaagtatttccactgcggataggagaagaaatgagggcataactcgccgcaggttacacagattgctatagaatttctgataatcaagaacttttatctgtgttaatctgcggtgattgtgtattttgatacctctccattattcctttggctttgaatactggttctgctttttgtatttccgattcgaagccgaaccaataaccattttgggtattgtcgtcaatgggtagaaaacataagcggaggctttctttgtagtttccatagatgacttcccaatattccggtggcatctggcgcttggtcttgactttctctgctggttttttctttaatgacatgcctgcctctatccaggcaatggtgaccatgattttataggccggataatgcatactgcagaattcatagagtacgaggcctcgcttttccaggctcatgggctggtctataagatttttatcgattaaaaattccagaaagcgacgtaggaagtcgttgtcatccagaatcagcttgcgggtgatggcttgccaagcagttgtgttatagaatccatccagaagacgtgacagttgccgggctgtttgaagctcgttgacactgatttcatttgtttgaagcacttcataaggggggagaggagaatatcggatgcctagttcttccgctcttcttctcatttctgtgccgggaagtaactttagggattcaagttgtatctcgccggcattgtatccggcaagtgtacgcacatcttcaaatatttcggataggcggtatagaggcaagccggcaatgaggtcggcgtgtgtttccatattgggtagggaacataggaaacgaagaccttgcagtgagtcctccaggcttcccatccgacggcttttctggaggaccggttcgcgcaggctttgaataccggcctcgagatggagcaatcctttaggtagctttttcaattcatttttcagctcttcggataatagtgcagggtgtatttctaagtgaaagcatatgtccgggttgaattccaggaaaagttgcagtaattctttagcacggcgcggattataattaaaggtccggtcgaggacgcgtacgttttttattccatgactgtggataatttgaaggcgttcacggatactttcaatggacagtgtgcgcaccggtttttcttcaccgctgacgcagaatgcgcatgtgttgaaacagcctcgggtagtctccagttgtacgaatggtttgctccagttgaaaaaacagctgttttccggtggtacgagccgtgaaaagttaagtacacgggctatgccgttgtctatatattgcttttgaggattcatatagcagagtcccggaatactgttccacttttccggctggttccagcaagacagccattgggggaatgcttcttctccctctcccctgaatacacagtcgatgaaagggtttttatgcagaaagtcttcattgtttcctaagaattcaggtccacccaagatgaagcagctattgggaagcaatgcttttaatctcgctgtgatgtgcaacagttgttcgtggttgaacaaccatgtcgttgcggcaatgatgtcgggttggtgccggtatatttcgtcgacaatcattcctacgttttcattgatggtggcagatacgatttcccattttacggaattgttctttgctatttgtgcgtgcagtgcagggagtgccaacgaagagtgtgcatacgagctattgaggtctatccagagaattttcatatttgattgaatttcatctttgcaaagataactgattttgcttttcgtataaacaaaaagggttatatttgcatgtcggaaatcgaaaatagtagagttattggtatagaatgttttttgaaagatgaaatattctttttgtattcttatttctataaggtgataacgggttgtcttatcactggcttgataaagtaaggaaggaagtactattaagtgtgattgatacagaatgcaaaatatcggaataagtttccagctattttgaacattttgagaaagtaaactcttttgtacaaggactggtttaggtaattgattccttcctatgatgtagggatactctgtgaggagtatccctacaattttttacattgattccacgttgcctccctttgggggattgtttggacaataacaaaagaagaggaatattctttcgaatttcctcttctttgcgggtggcagatgggactcgaacccacgacattcagaaccacaatctgacgctctaaccaactgaactacagccaccatgttagtgcatttcttaaatgcggtgcaaagatagggataatctttaatattgcaaagaatgagacgaaaatttttgagatttctgcattattttttcttctcgtagatacctatattgtgctgctggagcagctttcgagagcttttgacaaagatttccaggtgtttacgagcttccggcgttaaatgttctgtaggaaaactggcaggataaagaatgtaatttttttctttagtaagttccggccggccggtccagaccagattatatccacaataggaaacacgacagtatggaaaaggcagaggattggagtctggcaggggcgtctgactctgaccggtgtaagagggacggatgggttgggggagaggatgtttctccaactgcaaagtgaagatgaggccgccgtcagtgttggccttgctcatattggaaatgaagtttcccaaggagtagactatgatgtgctgttcggtaccgttggtacgtagttccatcggttgaatgacgtgagggtgtgaaccgataatatgtgttacgccttgttggagcaaccagttggccagttcgcgttgctcacggttgggaagggactgatattcctctccccaatgcatgcaggcaataatggcatccggttggcgtgccttggcactttggatatcttgcaggatggtattcttatcaatatagtttacgatattgggagaggtagccttgataccattggtgccgtaagtatagttgagtagggcaatgcgaaagccgtttctgttgatgaacaggggatagcgttgcctgcgctccgacagattcttgtaggtgcctgcgtaacgaataccggaggagtcaagcaattgtatggtacgctccattcccttttttccacggtccagaaagtggttgttggctgtcagtaaaatatcgaatccggcgtcctttatggcctgaagatattcatcgggggcgctgaacataggatagccccgatagggcctgccccccaatgtgacttccagatttcctatggcgaggtctgcctgggatatttgctcttttatgagggagaagcaggaggagtagtcatattttccttcagatacatgtgcagcgtctatttgtgcctggtgctgcatcaggtcgccgacaaataatagcgtaatcctttcctgcgaggaaagggttacgctatacagtaggacaacaatgaagacggcgagcgttttcatcgccttgttattggtagattgctttcttgccggcgagcaatgtattcttcataagggaaacgatggtcatgggacctacgcctcccggtacgggggtaatgaatgaacatttgggagctacttcgtcgaatttcacatcaccggtcaacttgaacccggatttcttggaggcatcgggcacacgggtagtacctacatcaataacgacagcaccttccttgaccatttccgccttaacaaagttcggttgtcccaacgcagcaatgatgatgtccgcttcctggcattcctttaccaggtctttgctgcggctgtggcatacggtcactgtggcatcgccgggataagccttctgcatcatcagggcagccatgggcttgcctacaatgttgctgcgtcccaacaccacgcacttcttgcctgaagtctctatctgatagcgcttcagcagttcgaggataccgttgggagtagcggatacatagcagggaaggccaatggacatccgtcccacattgatgggatgaaagccgtccacatccttgcggtagtcgatggtttcaatcactttctgctcggagatatgcttgggcaagggaagctgtacgatgaaaccgtccacatccgcatcctcgttcaattcgcgtaccttggcaagcagctcctcttcggtaacgtctgcctcgtagcggataagtgaggacttgaatccgcaaacttcgcatgcctttactttggcggcaacgtaggtttcgctacctccatcgtgtcctacaagaatagcggccagatgcgggcgtttacccccacgagccactatctcggctacttctgctgcaatctcttgctttacttgctctgaaattgcttttccatcaatcagtgtcataggctgttatcttatcttttaagtttcggcatcatcttacccatcttgctgccagtgaccatcttcatcatcttgcgggtctggtcaaactgtttcagcaggcggtttacttcctgaatattcgtaccgctacctttggcaatgcgctggcggcgtgaaccgttcagaatggccggattgctgcgttcttccggagtcatggagtagatgatggcttcaatgctcttgaaggcattgtcgtcaatgtctatatccttgatggctttgcctacgcccggtatcatggaggcaagttccttcaagttacccattttcttgatttgtgcaatctggctcaggaagtcgttgaagtcgaactggttcttggcaatcttcttttgcaggcgtttggcttcttcctcgtcatattgttcctgcgcacgttccaccaaagatacgatgtcacccataccgagaatacggtcggccatacgtgagggatggaactggtcgatggcatccagcttttcaccggtacctacaaacttgatgggcttgtttaccaccgaacggatagaaagggcggcaccaccgcgggtatcaccatccagtttggtcaatactacaccattgaagtcgagccgttcgttgaattccttagcggtattcactgcatcctgaccggtcattgaatccactacgaacagaatctcgtccggattgatggccttcttgatggcggcaatctcgttcatcatctcctcatccactgccagacgaccggctgtatcgacaattacaaggtcgtaacctttggctttggcttcttggatggcattttgggcaatggctaccggatttttgctgtccggttccgagtacatcggtacgtcaatctgttcagccagtacacgcaactgctcgatagcggcaggacggtacacgtcacaagccaccaataacggctttttgttcttcttgctcttcagcatgcgggccagctttccggagaaagttgttttaccggagccttgcaaaccggacattaggataatggcaggcttggagtcgaggtttatttcagaagtctcgccgcccatgagctgggtcagttcatcgtgtacgatttttaccatcagctggctgggcttaacggctgtcagcacgttttgtcccaaggctttttccttaacggtatcggtgaagtttttggctaccttatagttcacgtcggcatccaaaagtgccttacgtacgtctttcagggtttccgcaacattgatttcggtgattttgccctcacctttcaaaattttaaacgacctttcaagtctctcgcttaaattatcgaacatagtatctaattacaattactaaattacaaattactcttattgaggcgcaaaagtacaaaaaatccctttaactgccttcttttgaagcagaatattattgaagacttgcagcgggatgggcgaaaagaatggaagtgccggtcaaggcactgataatcatctatattattctgttttttttagttctttttgcttactttctattgataatgtctctggcgcagggtccttcgtggttgggatatcccggtgcgtggctgcgccatctcttgtcggcttcaactttcaggcttcggtagtcgtcctgtgtgcggcggatgtagtcgtccagcagtgcccggtgctcggccagaatctttgagtatttggggtcatgggcaaggtttcgtctttctcctttatccttcagcatatcatacagttcttccccgttgccttccagatagtgtgtgtatttgtatctgggactgcgtatcatccgtcccgggctgacggtcacttcgtattcactgtgccattcggaggctgcataggggtgctgtctcttttgcttctcgcctttcagaaaaggggcaaggctgatgccgggcttggaggaaggcaccggaatgcctgccagttcacagagagtgggcagcaggtcgatagtgggttgggtcagtaaatcttccactggtttttgacggggatgaatgccgggaccggctatgatgaagggcacatttgtcatttcttcgtaaaagctgacctgcttggttaccatgcggtgtgaccccattccgtctccgtggtctgccagtacaatgacaattgtatttttgccggcgggagtggagtagagggcttctagtacactctctatctgtctggccactatccgcgtgtaatgctggaaggcggcgacgtagtgccggtaattgtcctcgttccagtgggcggcttgcatcatcctccggtggctgcagcagatgtactgaatgggcaacggaagtttttcccagtcttccacttcaaagttttcgggtagtagcgggagtggggtactgatggggctatctatgtgctcccctttattttcgcctacatatccgcagatattgtgcgggttttggaaatcggctatgcagatgaaaggttcttgcggcggattgctgagataggccacggcatcctcgcaggttcctacatccagaaagctgtcattgttgacgggaaattcggggtcggtgaagggcttggcaaccggttccttgtggcggaatccccttagagaacccatgtcatgggttttgccaaagtggacggcctcataaccgttggcggtgaagaggcttcccagggtcggaatgctgtcgggtagcggaggattgatgtgttcggccgagttggaacgtacattggtttgatgcggcatcagtccgctccataaggcagcgcgtgacggttggctgagggggcatcccacgtatgcgttggcaaatgttacaccttgggaggcaattcggtctataggtggagtgcagctggggtcggcaccgtatgcgcctactacccgctgggtcagatggtcgcattggataataagaaaattgggcgattgctgtgccattaccggaaagctgcacaatgccattcccataaaagagtgaatcgttttcatcagatttggattttatttgttcaaggttattgtatggtggcaaatgtatgaaaaaacggatataaaaaaagcttccacctacgtttatgaacgtaaatggaagcttttgtacaatatctgtatgcagttgctgttaactgttcatgctcatcaggaattcgtcgttgtctttggtcttctccagacggtcttttacgaagtccatggcttctatcggattcatgtcggcaaggtacttgcggagaatccacatgcggtccagtgtctgcttgtcttgcagcaggtcgtcgcggcgggtgctggaggcaacgatgttgacagccgggaagatacgcttgttggacaagttgcggtcgagctgcaactccatattacccgtacccttgaattcttcgaagataacctcgtccatcttcgagccggtgtcaatcaaggcagtggcaaggatggtcagtgaaccgccgccctcgatgttacgtgctgcaccgaagaagcgtttgggcttatgcaatgcgttggcatccacaccaccggaaagcactttgccggaagccggggatacggtgttgtaggcacgtgccagacgggtgatggagtcgaggaagatgacaacatcgtgtccgcattccaccatgcgttttgctttttcaaggacgatgccggcaatcttcacgtggcgttctgccggttcgtcgaaggtagaggcgattacttccgcattgacggtacgcgccatgtcggtaacttcctccgggcgttcgtcgatgagcagcataatcatgtagacttccggatgattggcggcaatggcgttggcaatgtctttcatcaagatggtcttaccggttttgggctgtgccacaatcaaggcacgctggcccttaccgatgggggcaaacaagtctacgacacgggccgacatagagtcggagtatccacctttgcaaagcttgaacttctcgtccgggaagaggggggtgaggtgctcgaacggtacgcggtcgcgtacgaaagccgggtcacgtccgtttattttggatacttttaccagcgggaagtacttttcgccttctttcgggggacggattacgccttctaccacatcaccggttttcaggccgaacaatttgatttgtgattgtgatacgtaaatatcgtccggtgaggacaaatagttgtaatcggaggaacggaggaagccgtagccatcctgcatgatttccagtacaccggttccggtgaggatgtcatcgaattcgtacgtcttctcgcgttctattacgggtttgcgttccggagcggcgggatagttctctccgttgttatacggttgtgcagggcgctgctgcacggggcgctgttggttatagccaccgttgcggttgttattgttgttgttattgtatgggttgttgttgtcgcgggcgcggaggcgcgggcgttgtggctgttgcggttcggctggggcagcggcaggagtgggagtggcgggagtttccgctttggtcgcttcgaatttgccgataagttcggatggcaattctattttttccgtagggaggtcttcaatggggatgaagtcatctgccgcttcggccaggatagggctttcgtccggtacgatattcttttctgctttggcttctgcctgaggttctgttttcggagctttagcctcgaagttcaattccggttcggcaaccttcggggtttccgttgcttggggtgcagcagtctcttcctttaccttgcgggggcgtcccggtttgcgtttgggtacggcggcttctttggctggcgccggcgttgcagcttctatggtcggttcttggggtgcttccacagttttgggttgttctttcgcagccggtgcttcctctgttttggctttggtgaggtttccgtttttattggctgagaacactttgtcggcaccttccttttttacggtctttacagtgacgcgcgagcgtttttgcttttcccctttacgctcttccttcagcttgtcggcggcaactttcttggtagcgcctgcgatagcttgttcgtcaagtatcttgtaaacaagttcttcttttttgagtgagtctgttttttttatacccagttcttgggcaatagtttgtagttccgacaaatttttgtcgttcagttgaatgatgttatacatacagtatatatgtgaatggtttaaaatttacttttattgaaaggcataagtgcacagttgcagttgttgtaggaagcaacttgggcaagtttaccttgtgatatatgatttatatgggatatttattattgaaccggaaatctgataaacaattcttgccacagcaagaagtcgcagaatgtttcaacggtgcaaaggtaataaatatttttggtttcataaacaaatcatcttttttttaaatttaaaactttatctttgctgtattaacaacaacatgaaggattggtttatgaatatagatgaagtacagttgataactttttcacctacttgtacctctaaacaagtgggagaggcaattgttcacggaacgggaatttcgtctgtctccaaagtggacctcaccttggaggcggcgggtaaaagggaggtgccttcccatgctttggcggtcatcacggtgcccgtatatggcggtcatgtggctcctttggcattggagcggatgaaggagcttcatgctgacggtgcacctgccgtggttgtggtggtgtacggcaaccgggcctatgagaaggctttggtggaattggatgcttttgtcacgaagttgggcttcaaggtaattgcaggtgctacgtttgtaggagagcactcttatagcagtgagaaatatccggtggcatccggacgtccggatgcggacgacttggagtatgcaaagctttttggtgaaaaaatacgtgctaaaattgcggcggccgaagatatggagaaactgtatggggtggatgtgacccgtatccagcgtccgcgccagcctttcttcccgttgctccgctttttgcgcagagtcgtcaagttgcgtaagagtggggtgcctatgccccgtactccgcaagtggatgcggaacgttgtacgcattgcggatattgcgtgaagcattgtcctgcaggagccattataaaaggagacgagtgcaatacggttgcagagaaatgcatcaaatgttgtgcttgtgtgaaaggctgtccgcagaaggcgcgcacgtatgacacgccgtttgccgtattgctttccgattgcttcaagaaacagaaggaggacagaatcattctgtgatggctactggtcgatggttgatacgaccaacactttccgggttttttcgtctattctgaaacggttgtccacccgttctcccaccagccagatgatgtcatctccgcagcaaagcacccattgccgttctttgcgcagaagggagaacttgcggtcggtcaggtagtcgcttaccttcttccggcctttcatgccgaagggcacgaagctgtctccctgcctgcaaaggcgcagtgataggggatgctggagtttgtcggcatcaaagcaggcggtagctttgtcgcgtggaatcatgaaatccggtgcatagggatgctctttcatttccaataacggctttacggcttcctgtacgggttctatcaacaacgagccgcggtctttgatgacacgccagccgggggtggcaaagactttgccgggctgtccgtccaatgtccggcagatgtcccttacttgtgcggcgttgaatccaagcggatgcagaatttcaaataagaccgtttccggtgccgcttcttgcctcagggcgccgatacttatgccttccggtgtcttgactcgcagtttggcttcttctatacctatattatatatagaggcggcatcgtccagatgctctgccgttttgaggatgctttccttgacggaggggtttatctcctgcatcatgggaagcaggttcaagcgtattttgttgcgggtatattcgtcctgcagattggtgctgtccgtcacgtaggcttgcccgatactttccagataaccgacgatttcctttctgtccaggcagagcaaggggcggactatatgtccgtttcgggggcgtataccccgcaatccgttgatgccggtaccgcgaatcagattgagcagcaatgtctctacactgtcatcttgatggtgggcgacggcaatgacagctgcactgcatgcttcccttgttttttcgaaccacgcgtagcgcaattcccttgcagccatttcgatggagatatgccgttcctttgcttcctgctccgtgttgaagtggacggtgtgcagcgtcacccggtgctccaggcagagctggcgtacaaagtgctcgtcgcggtcggattccgctccgcgcagatggaagttgcaatgggcggcttcgcatgtgtatcccaggctgaggagcaggcgcagcaacgccacggagtccgccccgccgctcagtgccacaagtatcttgtcgtccagcgagaagagcttgtggcgctcgatgtattgtactaccttctgcatattcaactatagagtggtgcaaagatagtgcaaacgatttttattgccatatctgcaagtatctattttcagaatctctatcggctaaggtcgtatttgctaaaagctaatcttaccacagctgtgttttatgcataccacacctttgttcttttcttaccacagctgtggtaagaaaagaacaaaggtgtggtgaagttacgatttagtatctctggaagtagtgttttgccttctgggcattattgtttagtgtctcttatttaaaaacattctaaattatttgtgccttgcggacataagtattatctttgcccccaaaatagaaaagaaaggcagaaagactatgcgtttgtccgaattgaataccggtgaaaaaggtgtaatcgtaaaagtgctgggacacggtggtttccgcaaacggattgtggaaatgggatttattaaaggtaaaacagtggaggtcttgctgaatgccccactacgcgaccctatcaaatacaaagtaatgggatatgagatttctcttcgtcggcaggaggctgagatgatagagattatcagtgagcaggaagctaaggagcaggctgtgcagcccgattaccacgaggggttgggcgaaaacatgcatctgggcgaagatgagctgaagcaactggccctcggcaaacgccgcaccataaatgtggctttggtgggaaatcccaactgtggtaaaacttctcttttcaacatcgcttccggttcgcacgagcatgtgggcaattacagtggcgttacggtagatgccaaggaggggtattttgatttccaaggttaccacttccgtattgtcgaccttcccggaacctattccctctcggcctactcccctgaagaaatctatgtccgccggcacattatcaatgaaacgccggatatcattatcaatgttgtggactcttccaacctggaacgcaatctctatctcaccacccagctgattgacatgaacgtgcgcatggtgattgcactgaacatgtacgatgagctggaagccagtggaaacacgctggactatgtaaagctcagccagttgttcggagttccgatgttgcctacggtcagccgtagcggaaaaggcattgaacagctgttccatgtgattatcaatatttacgaaggcggcgacttcctcgaccataagggcaggatgcgcagcgagatattgagtgaccttcgcagctggcatcaggagtatgttcccgaccatgacttcggcagccataaagaagagatagaacagccgcgtggcttctaccgtcatatccatatcaatcacggtcccgagctggaacgtagcattgaggaggtgaagcgcgtcatcagcgtcaatgagaacatccgccacaaatattccacgcgtttccttgccatcaagttgctggagaacgacgaagacttgaaaaagattgtggaagagttgcccaatggaaaggagattcttgccgtccgcgaccgggaagaggcacggattgccgaggtggtgaacgaggagagcgagcaggccatcaccgatgccaagtatggttttatagccggtgccctgcgcgagacctatgtggacaatcatcaggatacgtcgcgcactactcaaatcatagactcaatcgttactcaccgtgtatggggttatcccattttcttccttttcctttatctgatgttcgaaggcacctttgtgctgggcgactatcctatgcaggggattgaatggctggtaggcgaattgggcgacctgatatgcaacaacatgtccgaaggaccgctgaaggaccttctggtggatggtattatcggaggtgtgggcggtgtcattgttttcctgccgaatattctgttgctctatttctttatttccttgatggaagactcgggctatatggcacgtgccgctttcattatggataagattatgcataaaatggggctgcatggaaagtctttcattccgctgattatgggctttgggtgtaatgtgcccgccattatggcttcgcgtaccattgagaaccgcaagagccgtctggtgacgatgctcatcaatccgctgatgtcgtgcagcgctcgtctacccatctatttattgctggtaggcgccttcttcccgaacaatgcgagctttgtgctgttagtaatctatgccatcggcattctgttggcagtggtcatggcacgtcttttctgccgctttctggtgaaaggagacgatacgccgtttgtcatggagctgccgccttatcgtatgccgacgtccaaggccatcttccgccatacgtgggagaagggggcgcagtatctccgcaagatgggaggcatcattatggtggcatccatcgttatctgggcattgggatattatcccaaccacgatgaatatgaaagtgtgacggaacagcaggagaattcctacatcggccggattggtaaagccatggaaccggtcatcgaaccgttgggattcgactggaagctgggcatcggcatcctttccggcgtgggcgccaaggagctggtggtaagcacgctcggagtgctttatgccgacgatgccgaggcagatgccgtaagcttgggtgaacgcattccgataacgcccctggtggctttcggttacatggtgtttgtgctgatttattttccgtgcatcgccacgttggcagctattaaaggggagtcgggcagttggaagtgggccgtgtttgcggggctttatactactgcgctggcctggctgatgtctttcgcaatttatcagataggaggtctgtttttatgatgaatagttggcaggagtgggtagtagccttattgttgttgctctgcgctgtgcggattggcatgagtatttattctttttctcatcgggtcaaagaaaatggtaatccgtgtgatagttgtgcaagtagctgtgaactaaagaatttgtatgataagaagcgtgcggagtgcagtggagtgacgaaaaaaaagaagaaaagttgttgcggatagttggtagtttcaaaaaaagtgctacctttgcatccgcaaacgagaaataaagagttcttgtaagaaccggtaccttggatgagtggcttagtcagcggtctgcaaaaccgtgtacggcagttcgaatctgccaggtacctcgaagaataaaactccgaaactgctttttaaaagtgtttcggagttttttgttatagggaattgtttgcccattctataaaatatcattcgctgaatagttacagcttacttattaaagattgaataaaatgaaaaaagttggatttctgattttctgtctgtttgctatgtgcagcatggcaggcaaggcgcaggatgtagtggcggacagtaccggctacatcgttaaggtaggggagatggctccagattttacagtgaagctgacggatgggaaaagcattaccctttcgggacttcgtgggaaggtggtcatgttgcagtttaccgcgagctggtgtggggtatgccgtaaggagatgcctttcattgagaaggatatatggctgaagcataagtcgaatccggattttatgctgattggcatcgaccgtgacgagccgttggagaaagtgattgcttttggtaagtcaaccggagtgacctatcctttgggtctggacccgggagcggatatatttgcgaagtatgcgctccgcaaggcaggtatcacacgcaatgtcctgattgataaggaagggcgtattgtgaagctgacacgtctgtataaccctgaagaatttgcttctctggtgaaggagattgacggaatgctttctgaatagtaggaataggcaagatataaaaaaggaagtgccccctaaaagtttttgtctaacttttagggggcacttcacttttatgcttgtcgggatagtttggcaagatagtcataatgtgtaccctctttcaccagctctgctttgaagccattttcggcagcatagatgctcagggtctgaaagtcgatatagagccagtcaaaggagtcgcctttgacattcttgtattgcatctggaagtctacctctccgtagtaatcaccggcaaggttgataacaatactgccatcttcctcttcgaacagatagctcaggttgctggaatccattaaaacacagcctccaggccggagcagtagcttcatcttccggaaaaaatcaggcagattctccaactttccgataatgccggaaccgttcatcagcatcaggatagtgtcgtattcatcggcaaactgttcattgaacagattggtttgtgatacgctacgcacacctcgctgcttcatcacttccacggaaagcggggaaatgtcgatggcatggacctcttttccggcttcttgcagggtaaggctatggcaaccgctaccggcacccacatccagaatctttccggtcgccatttgcagagcagtacgctccagcaagggcatttgcttttctgtgcggaatagctcttcgacgggaatttcgtcctcatcgaattgtgaagagaacacgcgtaggcggtcggctttatgccgtttaaagtaatcggctatggctgcgcccatcgggtccttgtcggcaggcaataaggctgtatttatcatttcttatgtctgttagcgcgtttgcggcggatttctgctttcattttggctgaggcggaaccgtgttgcccggtaatgtaggttttcttcttggctttggtctttatcttgttttcttctttaggtttgtcctttttgcctttgaagacaataccacccatcatcgcttcttctatactcatatatttcgttgttttagtgatgtaaaatatcatttctccggcagtacctcaatccaatagtcatccgggtcattgataaagtacagtcccattgctgtgttttcgaaacatacccatccgttttccttatggtattggcgtatggcgtcgtaatcaccggatacgcggaagcagaggtgactctcgttctcccctaattcgtaggcttgtggatgctccttcaagcaggtcagttccagcaggaagccggtactgctgtcggtcagatagaccagagtgaaagagccgtcggacgactctttcctatgatgttctttcagccccagtgccttttcgtagaatgcgatgctacgttccaagttggtgacattgatattaaaatggtcgaatttactttttatttccatttgtttatttctgatttgattatttacaatttacagtctgcgtgtgcggtcatttgaccattgctttcagaatttcgcctacatacgtgcgtggcataccttccatcgttgccggtgaaggcagcttcttacattccagaatgaccgtaggctctgtctgtcccgtaggatagaaacggatggtatagctttctgctttttccatttgttcatacggctggtcgggcgacagtatgctgaatacaactggtttgccgttgactttgcccaaagaacctccggagtttgctgtcatcatggtcatgttgaaaggctcttggccgatgacgataaccaatttgcctgctccggtctggatggcatcggctgacaattgctcgggggctatggttttgtattcttgctgctggctcttttgggcaggaaccagtgcggcaggtttcttgacttggggcacttcgatgacttgggcatctttcacgatgccttcggatgccttttcagcagcctgggcaggttccacggtaacttgtttcttcggggtgattaccgtcggaccggaattgacgacagccttcacctctttcttttcttccttcttttcttctaccagagctttggcagtggtggcgctcaatgcttctgctgctcccaggcaaaggtcatcaacgaagtctacggtttttctgcgccacttggcaagtccgcgtaccagtttggtcttcgccttgttcaaggcatacttgtctacaatccactcctcggcggtatatttttcttttccttcgcggtagttaaaccgtatcttttctacttcgagcacgctcttttcgggttggcaggtcacagtcagctggtaaaggattttggtacggtctaatgacagagccgtagaactgaatacaatccattcatccccgatacctacaatttgtcctttctctttgtctgagaatactacacggctggtattttcattctctttcagacgggcatccatccagccgagcagacgttcgtagatttcatcctgagacatgccggggatgctgaattctttggtgaataccactttgccgtccacctcgggaacagcaccggccagatatttactgtcgtccctatcctgcgcctgcagcatggccggcagacaaaggcaaaacagtgtaaaaagaagttgtgtcaaatttttcataatagtatgtgttttaattattaatttacgaattatgggctacaagttggggagttcgaaactttcaccacggtgtgcaatgctcagaaagcggcatcccttgctctcggcaaactgccggaatgcgttgcctccctgataatcttcgctgaagtgcatcggtacaaatatagtgatttttattcgttccacgaattgttctgctccacgcatataatcttttccgatacggctgtccaccggaaacatggctacatctacggcaggtgcagtttgctgcagctctctcacttcggccagaaagtcaccttcggccttgcgtatttcctgcggagtggattcctcgctccagtgccagttgttcaggtcaccggcatggaacagccgtctgccctgcaggtctatcaggaaggagatacccacatcggtagaaccgaaggcctggatacggatatgttcgtcttcgtaggtgtcgcccttattgatgtaggtggcatcttccgctgaggcgcggcggtgcttcaggatgtctttggagaatatgtagcggatgtcgggccgcagttttttccatgaaagaacttcgcgattgaagtggtcgggatggaaatgcgagcatagtacgtagagtacgcccggcttttccaagagatagtcgtgcacgatacctttattgaaaacctcttccgaggaatctttatagtaatcgataatgaccgtcactccgtccgcttcaatcgcgaagccgctatggtagatgtaatcaagtttcatttacggattgaattatagcgcaatattacaaaaaacgctacacaaacttccggtttaagctgttattttatgcaaaagcacgctacatcggtacttctatgaagagaatgtgagagtctttcaatgtttccagctcaaaactgccggtttcgtatactcccattccgtcacgacgtgagagtattgtgccgtccactttgacttcaccttccattacgaagatgtatgcaccggaatgcgattggtgcatgtggtagtcaatcttctttccggcttctatttcaccgatagaaaaccaggtctgttgtagcagtctggcaggagcatcgccgtcaggggatactattagtgccatttcatttttgcgcaggagtggacgtacgtcgaagtcctggtatgcgggtggtgtgttcagcttttcgggcatcacccagatttgcaggaattctaccgcttcagtgtcactgccgttcatttcgctgtggtagatgccggtgccggcgctcatggtttgtatatctcccggagtgatgacgcggctgttctgatgattgtccccatgtttcagtttccctttcaggggaatggagatgatttccatatttttatgaggatgtgtgccgaagccctttcccggagccacacggtcgtcgttcagtacacgcaaggcgccgaaattcatccggcggggattgtaatactcgtcgaaactgaaggtgtggtggctgtcaagccaatcatatagggaatgacctctgctgtctgatttgtctataacttttttcataatttattccttttcttaaaatggtttatgtactagtaacgctttggaaagctataaagtttaaaaaccgatgtctaagaatttataaatgagtggggactatgccttgacctcgttctccagtggcttatggttcataaaatctttgatgttctgcaaggttgtcgaagcaatgtttgccagtgcctcgcgtgtgaaaaaggcctggtgcgaagtgacgatgacattattgaaggacagtagccgcgccagggtatcgtcatcaatgattttgtccgattggtcttcatagaagtattcgctttcctcttcgtacacatccaggccggcagagccgattttcttgttttttagtccttcaatcagggcgttggtatggatgagttgtccacgtccggtattgataatcattactccgtccttcattttactgatggaatagtcgttgatgagatatttggtctgttcagtcagcgggcagtgcagggagatgatatccgaattgtgatatagctcatccaggctggtatataccacttgatgttcacgggcgaaattatagtcgggatagaggtcgtaggcaagaatattcatgccgaatccacgcaggatacatatcagtttcttggctatttttcccgtgccgatgatgcctgcagtttttccgtacatgtcgaagcccagaagtccgtgcagcgagaagtttccgtctcgtgtccgccaggtagcacgtggaattttacggttgagggataacatcagggcaacggtatattctgctacggcataaggggagtaagcagggacacgcactacggtaatgccacggtcggcagctgcctttaaatctacattgttgtagccggcgcagcgcaacgccaataatttcacgccgttgtctgccatcagacggataacttcggtatcggccgtgtcgttcacgaaaatacagactgcgtctactccttgggttaaaataacgttgtgcttgttaagatgccctttatagtagcggagctcaaaaccatattccttgtttttttcgttgaaagacgcttcatcataaggtttgctgccaaaaaatgcgatagtgtatgccatgggatttgttgttttttaaaatgttacataattatagggagataacaagtggaaagttgatatggttcagtggccggaaggattcataaaatgataattatttctatttgtttcatcagaaactatttggtatttcaattaaagttctatattaggataactttatgcacaaaattctttttcatgtgcaatattattgtacctttgcgcccgaaaacaattaaaaaagatttagatgagaaaattttcgttgattggcattgcgatgttaatcgtttcaattccaacttttgcgggtggtatcctaacaaatacaaatcagcatgtatcttttcttagaatgttagcgcgtggtgcttccattgatattgacggtgtctattctaatccggccggtttggccttcttgccggaagatggtctctatttgtctttgaatggacaaagtgcttatcagacccgtaacataaaggcgacatttcccttgtttattgaagatgggaatacacgttattataaaggaaaagcttctgctcctttcattcctagttttcaaggtgcatataaaaaaggagactggactatttccggtagctttgctgttgtaggtggtggcggtaaggcatcgtttgatgatggtttgggtatgttcgattcaatggtgatgggacaagtccatactatttcgggtggtcaaatcactcccaatatgtattctatcaatagtgcaatggatggaagccagtttatttatggtgtgcaattggggttgtcgtatcaagttaatgattggttaggtgtgtttgccggtggacgtatgaattattttaccggtgggtatgaaggatttctgactgcaacagcacacagtaatattcctacttatggtggcatggaattggttggtatcgatttagactgcgaccagaccggctggggattgacccctatcttgggagctgatgtgaagttgggcaaatggaatattgggttgaagtacgagtttatgacaagtcttaatctcgaaaataaaaccaaaaaagctgaagtgcgtgcaatgggaactgctatgggagatgaagggaatcctttggctgactataaggatggtgtgaatactccgagtgatatccctgcattattgactgcagctgttggttatgaattccttcctacgcttcgtgcaacgctggaatatcaccatttttttgataaagcggcagggatggccaatgataagcagaaagcgttgaagcatggcacacatgaaattttgattggtgcagaatgggatatagctaaacagctgaccatcagtggtggttatcagcgtacagattatggcttggctgatgattttcagagtgatataagtttttcatgtgactcttattcactggggtttggtgctgccatcaaaatgacaaagcatttgactatgaatatagcctatttttggacaaactatgatgattatacaaagaagataagtgaaaccaccaagaatgtttatagccgtactaataaagtgtttggtcttggtgttgactataagttctgatttcacaatcctacctttatatattaagaagccgtctcaaatatcgatttgaggcggcttctttcttattttatattggattagaaagaatactgtacaagcaggttcatacggttggcatggttggtggaattgtcgaagttggtgcgccagccacgcagatattcagcgcctacctgcatgttcggggttacgttccagaatacgttggctacgaaatactgtccgtagcggtaggtacttggcaggtcgttgggataaccgtcttcagagtaaaggcgggacatgctgtaagtgcttgaaaggaatatctttggagaaatgttatattgtagacctgcataccagcccagcatgggcaatgcctgcattttgccttccttttcgggattggggacaatatcgacgttcagattactgatgtcattcaggtattgcccgatacctttaccatagttgacttgtccgaatgcctgccattttttaccgaggttgaaggtcgttgaggcttgtacaccgtatccggtgacgctggaagccttgtcccttttcgtgctggtatatgtcatgctgcggatgatacctcctatacgcagatgactgctgctgttccaactgtattgtgccgaagctgtgaagtccggcatgcgttgctgggcaatttcgaattggctgcttgttgtgccgtcaacggcaggcgcctcgatggaagcttggaaacgaaagtctttcagccctttataagtatatgacaattgtgtagcgcggtagaacgtggcaccgttgggcccctggaagtcaatggtggaggggagggcgcctaagtccatgaaaccgccgtaagtatatcccaccgttatatttcggaatgacatataagcattccgtagctggaatgttttgtctcctcctcggaaatttccggctgtatagactgtgaagtcacccaatagccgggtgtgtccgactaatttcagaaagatagtggccgtactggcatccatttgaaattgatttttgattttactactgcttggaatgttggcaggaacaaagtcaatatcatccacaatacctccaaaatcatactcgccggtggcacggacataccctccgatacccagggcgaatttgccttgtttgtccatcaataagaagcggggagctttcgggtcatggatgtaaggcaattgtgactcattcatgatgcggataatctcgtcgcccgctttgtcgatggtaactatgacaatgccgttgggggcttcgtcatcgataatctcttttttttgtgcatggatagtggacaagggaagtccggctacgcacaacagaaacattgcttttaagattgttttcatttaagttaggttttgatgaatgtgctttcaacaacttaaatgaaaaaaggttttgtagtcttggaggaggaaaggaggttattccgtcagtattcttgccttgaatgaagatcgtatgcaaaattacccttaccctaatttccggaataacctcctgagaatgtgtgttaagttacttattttttcatgacggcattccacagcgctttgcgtagggttcccatggtgtcatcgccttcataatcccagaacatcatgcctttcatgccattttttaatatccattcaccttttgcggcaatactgcggggattgtcgtaaccacagtagaaactgccgtttttggtgacataggggacattgccttctgtatcccaattttcgatgacatagccgtcatccttactcaggttgagaatatcccgataattgatgctgccgccggcattgaaatcggctcttccgtagaacggaattcccaacactaatttgtcggcagatacccctgcattcaggtattcgtctacggaacgctggcagtcccagtaattacttggcttgttcaatgctgattgatgctggggggcatcaaccagatcataggccatgatattgacgaaatctacatacgggtctacggcctttacatcaatatatttatagccttcgccttggggacgcttgtccatgcaataacctgcataggtcaatagggtggactgccccaacgctgcacgcaggtctttcatcaatagggtgaagttttccacatctaccaactcgtcataggcattgctgctgaaagtcataccgggaaattcccagtcaatgtcaataccgtctatgccctcactcgaaacaaaggctttgcagtcttgtgcgaattgcttgcgcatttccggactcttcgccagggcggagaaacctccgtcctgggaattgtcagtattggaaacgctattggtaaaagagagtaatatcttcacatgtggatactggctctttattttctttaccttatcaaaacgggatttatcaccttgcaggccaaacttttcataaattccgtttttaacatataattctgcaaaagcgtagtttatgtgggtcaggtatttggcatcgggtatggatgtgccataataagtgacgtagcccaatgcaacccggcctgcaacctgctcggccatttcggtctcgttgtcttcatttcccggagctggcagtccgggcatgtagtcgtcattgtgacatgcggctactagaaagacagtagctattataaatagcagtttccttttcatagagagtgcatattattcagaatcggtttctgcttcagtcttgaaataagcataccagccgctgtcgtcccaatccacaccaccgctatacttgccgggatgatagattgtgatatagttctcatccagtgtcagcagccaaaatttgttgctgcctacgctttgtccgttgtcgtcataatttcctccgatggtggggatacttgttatcagttcacccagtactccgtcttccggtttttcgtgtgtgaaggagaaagtaccttctgccttcaggtttccgctggcatcataggttttcatcttgtttccgtcgaattcgaataccatggactggtctcccgcttcggcggcagtgacattggcccaccaggcaaaatttgattcgggagtatagcctgcactggtatatttccagcctccatgagcccccatattgcagacggaaccccagctgacttcacggaatttccaggtcttcttggcagatttgtcactcttgtcggttgcaccggtgaagtaagtggaccaatcgtcgaatacattggtcacagtcactacaaccggatctgtcttgataatctgattggcggaaatgcccatatagtagatggaatagtccgcattggactccatgatgaccgtagcgttgtccgtgaccagagtcttactttgtttacttccttcgcccccccattctatgtgccatgaaccgccaatgtccgggcgggagtttttcagggctatatactggtcgccttccactactccgtcttggttggggaagggttgggtaatggatatggcggcttgtaatgcctctttggttatgggtgtaccggcatcagtcacatatttgtctcgcaagtcttcgtcttcgataggatcgcatgcagtaacgatggaggctgaagcaagcattgctatcaatatttttgttactttcatattgtctttatttataggttaatactcttacatattgttccaatccgagaactgggcagatgcatcccagcctggattctgctcaaggactccattggagatgtcgatttcgtcttgcggaatgggccagtagccttgggttgcttgtaggcgtttcttatagtcgaattttaccatcggtaccaccgtagcggcatttattatattgaacccggtctgtttgttgagtatgtcaccggcttcctcaagcgaaggacccgaccagcgaaggatatcccaccagcggatggactcgaatgcaagttcccagcggcgttcctgcttgatggcttccagggagtaggccaccggagccaagtgggagcgggcacgtaccttgttcagacccgtagcgtcttgtttcagctcggactgcatgagcagaacgtcggcaaaacggatatgaatcaagtcggctatttggagtagctgttgggatgtctgcgaagatattccggggaacatctgcttgccgaaaggttcgattttgccttcattgtaggaattgatattgatgtattttttctggaaatagccggtttgttcatagtaacgataggatacggtatattccggttcaccctcgtccatggtgcagtccatcagtacattgccggcaacattcggatcaagtgctttgtacgaccatatggaaccggtcagacggggatcctccttgtaaccgtccgtataggtctgcttggcggcccagtctttccattcgttgaccatagccggagatacagggccagctccccaaccggtgccgaagggataactgtctttgttggaatagttgtcggcagacggtgaatagaattgcgcgcatgtgttggagaaccaggtataggtccagtcggatttcaggttatgcttgttggcgaataaagtttcgtcggaactgtttccttcccatttcaggttatggttgataacgtattggtaacggaaccctccggtattgtcttcggtagcatcgttggtgtaggcccagatgttgcgttggtcggacaccagtttatgaccggagttgtttacacagtcatctatccaagagatgacctcctctttggtagttccgttggggagctcgtttttttcgtagcgtccggtatagaaaaggaatacacgtgccatcatggcttcggcagcatattttgtagcgtgtccggtcatgtctgagcctttcggataaatctttgccggcatcatttcgatagcgtttttcaagtcggctgcaatctgggtgtagatttcgtctacggatgcacgcggcaggttggtactttccagtgtggtgcgtaaaggaactccgccaaagacttgtgccagctcataataagccatggcacgtaggaagtaggactcaccgaaaagtcggttacgttcgctctcgctggaccatgatttcacattctccattgtgttgatggcattgttggcacggttgataagggtgtagcaacggtcccagataccggcaaatgtattcagattgccactgtacataaggaagttggtggcacagttgttggagtaggagaggttgcctcccagacagtcgtcacctgccaactgggcaatgtaatactgggaagaggtttcaggactttcaaacaacagatgggcgtatatggccgtcaccatctcttgggcatccttttctgtctccgggaagttggcggttgtcttttcggtcaaaagttccgaatcgaggaagttttcgcatcctgaaagaagaatcagtattgctgatgctatgaataatatctttttcataatttcttcggttaattagaattttacatttaagcctatcatataggtacgtgcactggggtagtagcccaggtcgatgcctgatgcccaaccataatcgtcgccaccgtaaccgatttccgggtccataccggaatagccggtgaaggtaaagaggttctgtgcggtcagatacaggcgcagctgttgtaccggtaacttcttgaatgctttcttgaagtcgaatcccacagtgatgttctttatcttgagatagtctccatcttcgatgtaaatgtctgatactctgttccagttggagctggaagcgctggacagtctcgggaacttgttggacgtaccttcgccgtgccagcgttggaatatctctgctgtatagttattcaagggtgaggaggagaagtcacgataacacttcagaatctgctggccgaatgcaccgtaagtagtgattgagaagtcaatggccttccagctggcattcagggaaagtcccattgtcaggtcgggattcgggttacctatcatagtacggtcattggcatcgagcgtaccgctattgtcggtgtctgcccagattacgtcacccggctgtgtcttgtcgccgttcagtttcggacctttgtagttgtctatctgttcctggttctggaatatgccgttactcttgtagccgtagaagtagccgatgggtttgcctacttcagcacggaagcactcttcggctccttcccacagaacgctgccgctaccgtggatgattccgtctttgttggcaatcttggtcacttcattcttgttgtgagcaagggtcaggttggctccatattggaaatcctttccgatgttgtcgttccagtggagtcctacttcaatacccgtgttttttacattaccgccattgacggacactgcattggcaccgaaggaagagagtaccggagccgtaaccagccagtctctggtatttttgttataccagtcgaattcaaagcccaggcggttgttcaagaagcgtgcatcgataccgaaattcaattgctcctgtgtttcccaggtaaggtccgggttggtcagtcggtaggcgtatgaaccggtactgatgaggtccatggagtcgccgaacgtataaccgccatatccgttgttggaagttatcagtgaaagatattggaaagtagatacattacagttaccgttttgcccccaggaagcgcgtagctttaagaagtccagccatttgattcctgacatgaaggactcgttgctgataacccatcctgcggatactgaagggaagtatccccagcggtgtccgcgggcaaaagtggaggaaccgtccgcacgcatgatgacagaagccatgtatttctcctgatagttgtagttgacacgtccgaagaaggaggcgatggaaccttccccgttaggcttgccagtcaaggaggacacactgttggcggtcaatggaacattggacaaataagcgtgcttgaaatcatagaagtttgagcctatggctgaaccgctcatttcttctcccataccccatttttcaatactctgacctaccaggacgtcgatgttgtggtcatcgatattgaagatgtagttggctgtattgtcccatgaccaacggttatacatagacatggattgggtaaccttgtcttctgcgttgttgagtgacgcactcagataatcgaatctcggcaaataggaacgataactggaggctcccatgatgtaaccgaactggctcttgatacgcaggttcttgatgggttgcagttctgcatagaagctgctctgcatgtaatgggacttgcttaggttctggttcatatagtagtccagataagctatcgggtttttattggctccgttggagatatcccatttgtagttatccttttcctggtctgcatagaggtagtagcccccgtctgaattgtaagggtgcatcaacgggctcatgatgagcatattgtgcactccgttccaataaatgccgccggttccgaatgaaccttgcgtttgcgaatatttgtagttgatggtttcgcccactttcaagaagtcaagattgccttttttcatgactacgtggtccgagttgacacggaagttgtagcggttcatttctggaaattcgccgggaactcccatggtggcttcttggttggtgtatgaaatacctatggcatatctggaacggtctgttcctccggtgatgttgactgcgtggttctgtaccaatgcatcttcattcagcacttccttcagccagtttgtccctttccatgttccgttctgtatggcctgcaaatccctttccggaatataggtcgcccagttgtacggactcaatccgtccattacacggccttcatcctgcatcatcatgtactcttgggcattgaggatagtagggattttgtaaaggttctgcacgccgacatagccgtcgtaactgacttcggcaacgccggttttacctcgtttggtggtaatcaggataacgccgttggcagcacgcgcaccatagatggcggcagaagcggcatccttcaagacgtccaaagattcaatgtcactcgggttcagtccgtcgatgctaccgttggcaactccatctaccacataaagcggggagaaggttccggtagtaccgataccgcggatattcaccttaaagcccgaacccaggaagccgttgttctgcgtgatgttgacacccggtgactggctctgcaaagcgcccagggcatccacagtgttcagcttggctatgtcttctccttttacttgtacagtggcgccggtgacaagtttctttttctgtacaccgtaaccgacaacaactacttcatccagtagttcggaatcttctgtaagggtgattttcatgttggcatctgctttggcttcctgcgtcttataaccgatgtaggaaatgaccagggtggcacctctttttacgtttagcgagaatttaccgtataagtcggtggtaactccattggtagtacctttttccaagatacttgctccgatgataggctctccattctggtcgacaatgataccgcgggctgtttgtgcctgcatctgttctgtcactccgaatgaattttccgagtaggtctctattgccatgattttgctgcttcctataaatagggaggcgatggcaattgctgtgaggattttgttgttcgatgttcctcgtttacgattttcattcataatagatgttttttgtttaagctaatggatctcaaaataaataggttgaatagaagatgacactaatagtgtcttggggctttcgggtaaatcataggcattcattgtttttctaaggttactatatataatatggtatattcttggttaatatcaatgtgctttccagagcttccggattgttgttatcaaatataatcctaattttcattatttaaaatatagaatcgtatgtattaaaatatgttgtccattattttatttgcttaagaaatttgcgtgaatgaaatcttgtttgagagcaaacttggttgcatgtttttgattttgtgctaaaatcagttaatatattgatttttatgctattggtttatgttttttaaaactattgtaaataatattcttggtttgggaaatcttatttaagtctcgttaactaaatatgcactgtctgtaattacttcgaataaaaaaaaggagctttgtcttgcttgggatttagttaaaatatatgttgtttgttcatttgcaaaacttgttgtacctttgcaaccggatttaaaatgtatgatgccgtgaatagcggtcgtgtattctagaacaccacgtaaaaaacaggagtatgaaacaaaaagtatctgtaccttttatgttgctgggcattctgttcaatgtatgcttgattgcagccaatcttcttgagactaaagttatccaggtttttggtattaccgtaacagccggattgctggtcttcccgatttcttatattatcaacgattgcatagccgaggtttggggctttcgtaaagcccgcctgattatctggagcggttttgccatgaacttttttgtggtaatgctgggactgatagccgtggcgttgcctgccgcccctttctgggatggtgccgcgcatttcaattttgtttttggaatggcgccccgtattgtcatagccagtctgacggcattcttggtgggctcttttctgaatgcctacgtaatgagccgcatgaaactggcaagcaacgggcgtaatttctccgcacgtgccatttggtcgacggtggttggtgagacggcagactcgttgattttctttccggtggcgttcggaggaatcattgcatggcgggagttgctggtgatgatgtgtatccagattctgctgaagtccatgtacgaggtattgatactgcctgtgactatccgtgtggtaaaagctattaagcggatagacggtagtgatgtctatgatgaaggcatctcctataaagtatggaaaataggcgatatttaaagccccttacccgtagtgaggggaaatcagttattatgtcaaacaaataattagcaatgccctctctgtttccctccctccctacgggggagggcaaggggagaggcttttaacaagatgaatagggacactgctttggtggtattcagtggcgggcaggactcgaccacttgcctcttttgggcaaaacgtgaatttaagaaagtgtatgcgctgagttttctgtatggacagaaacatcagaaggaagtggacttggcgagggccattgcccgtaaggcaggtgtggagttcgaagtaatggatgtttcctttatcggccggctgggacataactcattgacagatgccggcatggagatggaccaggagaagccggcagacagctttccgaatacttttgtgccgggacgcaatctgtttttcctgagtatagccgccgtctacgcccgcgagcgggggattaatcatattgtgacgggggtgtcgcagaccgatttcagcggttatcccgattgccgggatgctttcatcaagtcgcttaacgtgacgctgaacctggctatggacgagcaattcgtactgcacacaccactgatgtggattgacaaagcggagacctgggcgctggcagacgagcttggagtgctcgaacttatacgtcacgaaacgctgacttgttataacggtatcccgggagatggttgtggacactgcccggcatgcacgttgcgcagagaaggattggaaaagtttttggcttctactaaatgaggcacacttgtatcactaaaaatatatggctatgacagaattgaaagaccaactttcccttttggggagaaagacagaataccgtcaggactatgcccccgaagtattggaggcatttgataacaagcatcccggcaatgactactgggtgcgtttcaactgccccgaattcaccagcctctgtcccatcacggggcaaccggactttgcggaaatccgtatttgctatatccccgatgtcaagatggtagagagcaagagtttgaaactctacttgttcagcttccgcaatcatggtgctttccacgaggattgcgtgaacatcataatgaaagacctcattcatttgatgaaccctaagtatattgaggtgacgggtatcttcaccccgcgcggaggcatctccatttatccgtatgccaattacggacgtcccggcacgaagttcgagcagatggcagagcatcgtttgatgaaccgtgaatgaggactgtttttgaaggcctccgtaaataataaagggaggctttgggagcaaatgattgttgcgccgctatattttatattcttgcttactaaaaactattcgtccgacatatgtttaattatcgtccaacagctatcggacgataattaaacatatgtcggacgataatgtaacgactgtcggacgaatagtctttagtcaatgaaacattaacctgctaccatcttggaaagaatctttcctatagaggatagtaggggatgacttttgcaaagatatagacgattctttaataaaaatagcgccttttcccaaagacgctattccctctttatgacttattcactacaaagggttattttattcttttgtagccatagacagcaaggttacccagttcttcttcgatgcgcaatagttggttgtacttcgccatgcggtcggagcggctcagagaaccggtcttgatttgtccgctgttggtggcaacggcaatgtctgcaatggtggcgtcctcggtttcgccggaacggtgagaagtcactgtggtataaccgtggcggtgtgccatttcgatagcatccagcgtttcactgagtgaaccgatttgattgactttgataaggatggaattggcgcagcccatggcaatacctttttcaaggaattccacgttagtcacgaacaggtcgtcgccaaccagctggcaacggttgccgatgcgttcggtcaacttcttccagccttcccagtcgttttcgctcatgccatcctcgatggagtcaatcgggtagttattaatcaaatcttccaagtaagctatttgttcgtcggcagtacgttttttaccattttcgccttcaaagatggagtagtcatagataccgttcttaaagaactcggatgaggcacagtccataccgattttcacatccttgcccggttcgtagccggcagccttgatggcgctcatgatggagtccagcgcatcttctgttcctgccagtgccggtgcaaaaccgccttcgtcacctacggcagtgctgaggccgcggtcgtgcaacacttttttcaaggcgtggaatacttcggctcccatgcgcaggccttcacggaaggaagaggcgcctaccggccgaatcataaattcttggaaagcgataggagcgtcgctgtgtgaacctccattgatgatattcatcatcgggaccggcattacgtaggtatttactccaccgatatatctgtataaaggtatatcgagataattggcagcggctttggctactgccagtgagacacccagaatggcgttggcacccagcttggatttggtaggcgtgccgtccaactcaagcatcttgtggtcgatggtacgctgttccagtgacgaccagccaatcagtgccggtgcgattatcttgttgacgttttctactgcttttagtgtacctttaccaccgtagcgttgcttgtcgccatcgcgaagttccagcgcttcgtgctcgccggtagaagcaccggaaggcactgctgcgcgtcccataacaccacattccagaataacgtccacttctactgtgggattgccgcgtgaatcaaggatttcacgggctacaatcttttcaattttcatacttaaactttaataatttattgtccgttgtcttgttttaatttgcagcaaaggtcgtacaaaaaggcatattgggcaatacctataaataggggtttttcatttcccggctcctctttttttagatttattattgataatacccatcaatggtgattgcgtaatatgatatatacgataaatccactccatataattacctacaataagcgattgcacagctggctgttaataatgacctttgcaccggtttactaacaacattataattattataaaattgaaagcatatacacttaaattctcgctgctgtttttccttctgttggcttctctgtctgtacatgcgcagaggagaggagggatgatttcgggtagaatcatttctacggaaaaagaaacggtggattttgcgactgtttatctgaaagggacgagttatggaggaaccacgaatcaggaaggcctctatcacatcaaggcgcctgccggcgactatacgctggtggtgtctgccgtaggttatacaaaggtggagaaaaaggtgaaactggtcaatgatgagcggatgaagctgaacataaccatcgctcccgaaacgcaacagctggacgaggtgactatcgtttctaccggagtaagccgggtgaagaggtcggcattcaatgctgtggcagtcgatacaaaggaactccagaacaccacgaagaatctgagcgatgccttgaccaaggctccgggcatgaaactccgtgagtcgggtggggtaggttcggatatgcagttgatgctggacggttttagcggaaagcacgtcaaggtgttcattgacggtgtgccgcaggaaggtgtgggaagctccttcagcctgaacaatattccggtgagctttgccgaccgtatagaggtatataagggtgtagttcccgtgggcttcggtacggatgccattggcggtgtcatcaatattgttaccaacaagaaacgccggaactggttcctggatgcttcttattcttacggctcgttcaatacccaccgctcatacgttaacttcggacagactttcaagaacggtttcagctatgaaatcaatgcctttcaaaactactcggacaacgattatcatgtagatgcgccggtaaaggattttgagacgggcagtttcaacgaaagtgagaaggtgcgcgtgaagcgtttcaatgatacttaccacaacgaagccattgtggccaaagcgggtattgtggacaaaagttgggcagaccggctgatgttcggtttcacctattcgcacatgtacaaggacatacagaccggtgtacgccagaagacagtcttcggagaaaagcaccgcttcggtcattcactaatgccttcgatggaatacagcaaacgcaacttgataatcaaggggctggatatggtgttgacagccaactacaatcgcaatgccactacgaatgtggatactgcccgctatgaatacaactggcttggtgagaaacatccgctgaacagtcccggcgaacagtcccgccagtattcccgtgccgataatgacaattggaacggtacattgaccttgaattaccgcattgccagagtccacatgctgactttcaatcatgtgttgagtgcattccagcgtgataatacttcactgttggcggtggaagaacagacggatgccattgccaagcagacccgcaagaatatctccggtttgtcataccgcctgatgccttccgaaaagtggaacttctcggcattcggcaaatactaccgccagtatgtggcaggacctatggccgaggatgataccggtagtaattatgtacgcaccagccgtacggtagactcttggggatatggtgctgccggaacctacttcatcctgcccggcttgcaggcgaagctctcttatgaaaaagcttaccgcctgcccactatcgaagagatgtttggtgacgaagacctggagagtggagacatcggcatccgtcccgagaaaagtgacaacatcaacttgaacctgagttattcccggagttttggaaaacattctgtctacgtggaaggcggtgtggtataccgcaatacgaaggattatatccagcgcaatatccaggacttgagcggaggaaaagaaggggccacttataccaactacggcaaggtgctgacgaagggatacaatgtatcggcacgctatggcttcggacgctggctgagtgtgggcggcaacttcacgcagatgaatgtgcgtgacaatgagaagatgcaaatcggcagtaccggcaactctgtggaaaatctcggttacaaggcacgcattcccaatgtgccctatcagtttgctgattttgacgtaaacttctattggcgcgacctctggaagaaagggaatatgctgtccgtgacttacgacaaccagtacatgcacagcttctcctactattcgcaggccatcggtagcaagaacaaggatttcatggtacccgaccagttctcccataacctgacattgagctatagtctgaagaatggccgctataatatctcgtttgaatgccgcaacttcacgaacgaggatttgtacgacaatttcagtcttcagaaagccgggcgtgcgttctatggcaaggtacgtgtacattttggtgattaataaatataatggttttaataggtgtaattaataagaagaacaaatgaagaagaattatcttttgtccggcctcttggcaatggcaatgaccggaatggctttaatttcttgtacagacacagacgaaccgggttccggctccggttccggttcaaagggtaactatgtgatagctgccacggctacagtttcaggtagctccgttcctgtcctgctgacagccgagtcactggaaagcggtgaaattactgctgccggcaatggccttgtgaacgatggggctacttactgggtgttctacggaaacaaatatctgtatgccttgaactatcaccagggaaatgcaggcactacccagtcgttcattatgaatacaaacggtgaactggaaaaacgtagccaggagtataacgtcaatcgtttcactacctacggctattatgaccaatttataatgacgacttctaccggcgacggccctacggaactgaatgatgcaaatggatatactccccaatcttttttgatttcctatctggatgtcgagaaacagacttatacaaagaactcggtaacaaaggatactccatttcttgccgaaaatttccttgaaaatggtgaatacgtaacactggccggtatagaacaagtgggcagtaaggtttatgcagcagccattcccatggggcttagccagtatggttgcatgcagaagaacgaagacggtagctacaagtgggtgctttccggtaatgaggatttaataaagacagaatccggcgggcagggtagcggtgcctatgagaaggacgaattgcaatggacccagtatcctaatgaatgccatatcgctatctttggtgatcagacactgaattctcataaggtcatcactacagacaaaatcagttatgctgccggacgtaaccgttcacagtactaccagatgaactggcttgccgacgacggctatgtatatgtattttctccgagctatgccaagaccatgagtgattcgcgtcagcagactacattgcctgctggagttgtacgcatcgataccaaagcagaagaatttgatgccgcttattactataatcttgaagagaaagccaatggcgcctctttcttgcggacttggtatatttcaggtaattatttcctgctgctgatgtatgataaggcaattacggcatcagacaaggttgccaaccaacttgccgtcttcaatgcctccactggagctttgacttatgtgaacggccttccaagcgatgtctctggctttggtaataccccgtacatggaaaatggcaacgcatatgtggcagtcactacctcttccggctatcctgccatctataaggtagaccctgccaatgcaacagctaccaaaggtctggttgtcaatgcaacccaactgaacggtgtaggtaaactggaataaagctcctatgaagaaagtttttcgtaagatacatttatggctttcagtccccttcgggctactgattacccttatctgtttttccggagccatgctggtattcgagacggaggtgatggagctctgccaccgcgacctctactatgtggagaaagtcgggccggcaccgcttcccatgggcaaggtggccgaaaaagtggccgctactctgccggatagtgtttctgtgacgggtgtcacagcctcgtctgctccggagcgtgcctggcaggtgaacctttccaaacctcgtcgtgcttccgtctatgtagaccagtatacgggtgagataaagggcaagtatgagcgtgcgccgtttttcacgaccatgttccgcctgcatcgctggttgctggacagcatgaagcccgatggaggcatcttctgggggaaaatgattgtgggcactgccacgctgatgtttgtctttgtcctgatatcgggcattgtcatttggtggccccgtacaaagaaagttttgaagaacagtctgaagattgttatcaataaaggttggcgccgcttctgctacgacctgcatgtggcaggcggtatgtacacgctgatttttctgctggcaatggcgcttacgggactgacatggtctttctcctggtatcgtaccggtttctacaaggtcttcggagtggaaactgcgcaaggaggtgggggacacggtgctccggcacaaactgctgcccacggaggagatgggggacaaggtcggtctgatggcagaccgggaactgagaatcgtgaaagaaagcccttctctccctttgcaaactggcagaaggtttacgaagaactgaaggaactcaatcctgattataggcagataaccgtatccaaaggctctgctacggtatctttcaatcggttgggcaaccagcgtgctgccgaccgctatacgttcaatctccgtagcggtgaaatcaccgggactaccttatataaagataccgacatttcagggaaaatccgaggctggatattctccgttcatgtaggcagttggggaggactcgccactcgcatattgagtttccttgccgctttgacaggtgcaagtttgccgctgacgggctattatctttggattcgcagattggggcggaaaggcagtaggaaagcgaacatgcaattaaagaaagttgcttagaaaaagcaggcagttttataaaaggatgaagatgtccgcaagatgcgcaggcgtgcgtgttttgtgggcgtttttttataaatacttttgggcggagatttcatttatccgcatttccttctcttctatccggatgcatccttcgcttgccagctccgataaggcacgtgccagcgagggacgcgccactcccagtatttgtgccacttcctgctggttgagtatcgtgccatgcatgcgtagatagttcagtatgcgcgatttcaggctttgcagggcaaaggcattcagctttttggagaggaacagagttctgtccgataccagttgcagaaagttgcgcatcacagtggggtgtcgatgcaggaactccaggaaaacattcttgtttatgatgagtatctcacatttctcttttgcttcgatatttaccgggaagcggttttcggaggcaaagacaaaagccggggcaagtagttgcggggctttcagcgtttctatggtgagttgctttccctctgcactgaccatttgggtacgtacactgccgctgcacaatatgaatagagaacggtatgcttctccctgtatggcaataaagtcagcaggtttgtattgcctgcgtgcatgttcgggtgccagaatgagggataataattcttcttctgttatgccttggaaaggaggcattttcaataatgtatggatttccattttcttttttacttttttgtgattcgatgtaacattcgtgacagttttcgcgttgtagaactctcatctttgcacaaagataatgcaaaccgaaagtaatagaaaataagcttgcttatttttattgctaaggtgccgcttcttttatggaaagataatgtaaacttttaaatgaataggaatatggaatcaaacatgttttgttatcaatgtcaggagactgccaaaggaactggctgtatattgaaaggtgtgtgtggaaaagaaagccatacggctcaagcaatggacttgttactgtttgtagtcaggggcatctctgttgttgccgatacattacgtaaggcagattgtccggtctctgaggaagtgaatgtttttgtgacggatgctctgttctgcaccattacgaatgcaaatttcgacgatgaaagcatcttgaagcgggtggataaaggaatcatcatgcgtaatggattgattcaagaagcggaacacaacaaagtgttcctacccaaagtagatgaactgacttggcagggaacgcgtgatgactatgccgaaaaagcgaagacagtaggtgttctgcgtgaacaagatgaagacctccgctcgttgaaagaattgcttgtctatggcttgaaaggtatggcagcctatctggagcatgccatgcgtctgggattcaatgatgatacggttcatgttttcatgcaacgcgcactggctaccattgcggttgagtctctatcggcagaggagtgggtgaagctggttctcgaagccggtgagttcggagtaaagacaatggctctattggatgcggccaataccggtacttacggtaatcctgaaattacaaaggtgaatatcggtgtgaagaaccgtccgggaattttgatcagcggccatgacttgaaagatatggaagaattattgaaacagactgaaggcacgggagtagacgtctatacacatggtgaaatgctgcctgcccactattaccccgctttcaagaaatattcccattttgtaggcaattatggtaatgcctggtggaaacagcgcgaagaattcacttccttcaacggaccgattctgtttaccaccaattgcatcgttcctcctctggcaaatgccgtgtataaagaacgtatgtttaccaccaactctaccggctatccgggttgcaagtacattgataaggatgctgaaggtaggaaagacttttctgaaatcatagagattgccaaacaatgccagcccccggtggagatagagcatggagagattatcggcggttttgctcataaccaggtgctgcaactggcagacaaggtggtaaatgccgtgaagaccggggccatacgccgctttatcgtaatggcaggctgtgatggacgtatgaagagccgtgactactacacggaatttgccaaggccttgccgcaagataccgttatcctgaccgcaggttgtgccaaataccgctataacaaacttggtttgggagatatcaacggcattccccgtgtattggatgccggacagtgcaatgacagctattcactggcggtaatagccatgaagctgaaagaagtattccagctgaacgacattaatgaacttcccatagtctacaacatagcgtggtacgaacagaaagcagttattgtattattggcattattgagcctcggtgtgaaggatattcacttaggacctacattgcccgctttcctttctccaaatgtcgtcaaggtactggttgatatgttccatattgcaggtatcggtagcgtggaagatgatttgaagaaattcgggttatagatgaaagggtactgaaactatccttttatcacgttatttatcgcttcctccgttccgcagaatggcccgtgtgattgtagttttatggtacacatggcggcggcaaagcatcccgcttcccggtgggatgcgcctttgttgcgcatatacagataccccaccatataggtgtctccgcatcccgttgcatctgttatctgaagggccggataggcgggtatttcgtggaattctccttgggcatatatcagcgaacctttatctcccagggtcagcagcacttccttcacgccccagtctgcaatcagcaatgcagcttcgtgcggttcactgcatccggtcagcacttccatttcagcttcgttggctttcaggatatggatatacttcaatgcttctttcttttccggccagtctacggccagcaccttttcattctccaccttgcggagaaatccttgcacgtctaccgagaggagtcccttgccggacaagaacttgatgacctccaaagagaagtcgtcggcaagcagactgcccaagtggataatccgtgcatcggtatctttcaaaccttccacggtgaaagggtctgcttttgccgtgacacgttgtgtacgttcgttctggttttctccataaatattctcgaaacagacggaatgtgtgctgtgcaaggctttgacggaaataccttctttccgaatgtcttccacaatgcccatgtcagtatcagccaaagctgttaccaataaaaaatcgttagcattcaagtgcttgatggcatgtgcaaagtagaaggaggtgcctcccggcatatatatggtatttttaggggttacgactttatcttgggtaatataaccgatgcaacatagactgtgtgtgttcatttctttgttggctttttattgctttattgtattgattccgtaaattgggcgcgaagatagtgatttaataacaattcgactatatttgcagctgtaaatgtagcctcattgaatatgaattcattaaaaacgaaaagagtacgtatgatagttggcattatagtgggtattgtggctgttgcggtcatagtgggattcgtttttgtcaatcagccgagtttcgggagggctcctcaaggagaacggttggagaggattaagaagtcgcctcattacaaagacggagaattccggaatctgcacagtacgatgatgatgacttcccaaaagggacgtttgggagctttctggggattcttgtttaagcaagaaaccgatttacgtcctgaaaaagagattccggttataaagacggacctcagcaagataagcaaggacgagaatgtattggtatggttcggacattcatcctattttatccagatagacggaaagcgtatactggtagaccccgtattttgtggggcttctccggtttcgtttgtaaacaagccgttcaagggggcagatgcctacaagcctgccgatatgccggagattgactatctggtgatatcacatgaccattgggaccatctggattatgaaacggtgatgcagctgaaaaatcgggtagataaggtggtctgtcctttgggggtaggtgaacatttcgagtattggggatttgagaaatcatccctggttgagctggattggtttgaagatactgtactggataagggatttctgcttcattgcttgcccgcccggcatttttcgggccgctcgttgaaagcgaatcaggcactatgggcctctttccttatcgaaaccccttcgcagaagatttatatgggcggtgatagtggatatgatacgcattttgccgaaataggcaagcaatatcccggcattgaccttgccatattggagaatgggcagtataacgaagattggaaatatatccataccatgccccaatatttgggacaagtggccagggacttgaatgcggaaaagcttctgactgtccatcattccaaatatgctttggctagacaccgctgggacgaaccgttgaagaatgccatgaatctgaaagagaaagactctttgaacgtgttgatgcctattataggggaagtggtccggttaaaataatgaacgatattgattatttagctattgacgagttattaacggaaatatatatccctatcgaaaataaaagtaagataatatgttggaattacccgaagttatcaccctgagcaaacaagtgaacaacgccttgagcggtaaaacaatcacgcaggtattcaatgccaccaaaccgcataagtttacgttctataacggcgatccgtcggagtatggtaaactgctcgtaggcaaaaccatcctttcatccgaaggatatggcatgtttgtcaatttcaatctttcggataatgtgatcatgaacataggcgacggagtcagtgtccgttattatagtgcgggagatgagattcctgccaattaccagttgttgctgacgtttaatgatgattcattccttgtcttcacggttgcaatgtatggttttatcaatgtttaccctgatagctatatcgacaataagtactataaattgagtcgggaaagcatttcgccgttgagcgataaatacaccgaagcggaatttgagaaactcgttgccgaagcaaagaagaccctctctgctaaagctctattagcaaccaatcagcgtattcccggtgtaggtaacggcgtaacgcaggatattctgttcaatgcacggataaatcccaaacagaaagtgctatttctgtcggataatcagaaagaagttctttttaatgctctaaaagaaacattggtggatatgacgttcgagggtggacgcgatacgcaaacagatctttatggcaacgccggaggttacaaaaccattctttctgccaaaacatggaagaatccttgtctccgttgtggcagtaccatcataaaagaggcttatatgggtggttcggtatattattgcccaacgtgtcaacagataaaagaataaatgtccacattctgttagctccctttatgtacgatgcaaggaattaatattctgtataactgtttattaattccttgtatcgcattctgttaatatcgtgtagacacgatattaacagaatgcgaacacgatatgaatatcttcttttctttatactttgtacggacaaaaggggtgttttataaagcccgccctttgtaaacgtttgactgggacaatggaaccaggactccgttcagcgtcagggtattcgaattgaagttcgggctgattcttgccgatgcattattgccgccgttggtcagtgtgatatacacttgtgcggatattccgatgccttgtacgctgaagctgcaattcacgtttccctttttgtcggtcgtgattttcatttcctttctgctgccgtccactgtgatgccgcctattccgttggggcctgcaagggcattgttggcagctatttgtacggatgcgtgttcaccgtccatcagaacgaagtttgttgtcgatgaaacaaatgcgctccgtcctctcttgaacaccagctggtctgcttccaatacaaacttgccctctttcaatgcctggacggcaatggcatagttcctttcattttccgctttttcgcgtgctttctgggcttcgcgttgggctttacgctctgcttggcgtgtttcgctgctactctgtgcatacatcagggtcgatgcacttaccaacaccagtgtgattaatgtaatgattcgtttcataattgttctttgttatttagttaagaccttctggttaattaacaaatgaaaaaccaaaaagatgcagcttgaatcttaaataagcgtaagacttaacacttctttggttttgttggaagttcgtattaaatttcttccaaggcataatactggtaatcccggagaatggtctgaagaaagttttccgggttactgtcatgaggagtgatggagagaagttcctgcacttttttcgcaagggaggcaatgcggcgtgtacggtctttcttacccgattgcagggtccgggtaatgacgttgatttgctccaatgacaagtcggaagcttgtggataggtaggtcggtagtctttggtcaggtagtcgaactcatcgaggctgacgtgtatcttgcggtaattcttttccttgattaccatggtgccggcggcaaggtctcccattcgctggctgtttttggtcaaaaggacgaccagaagtcccagaccaccggtcaccggtccgtcgatagggaagagaagccatcggagcaggtacgagcctatgccgggcgtggagccgtctgcctttacgacacgaatgttcatcagccgcttgccgaaactttgtccctggttgaacatttcgcagagaaatgcataaagcaagactggcaggtagacaatggtaaaaaagaaaagcatcgtgaaatcagagggtagatgaatccgtgaaaacaaggccaaagtagaaaatacatagaatccgagcagaatataatctatggccagtgcaatgagccgctcaccgatactggcaggcgtttgactgatgcggacaaattgtccggtgataattgtagattctgccattcctgataaaacatttttagtatttcattgcaaatatatcattattctcttatttttgttacctatttcagacaaaacttctctgaaatagtcatggggtatgaaagaagtgacgtttatccggcagaacatcgaaaaatggaaacgagcagaaacaatggtggagcaggcggaaagtctgtctcccgatgaacttgccgacgcatatacggagcttacggcagatctggcttttgcccaaacgcatttccccgcttcccgcatcactatctatctgaacaatcttgcctcggcattgcacaaccgcatttatagaaacaagcgcgagaaatggtcaagaattatcacctactggacccgtgaagtgccttcggccatgcacgatgcacgccgtgagctggtggcttccttcattatatttgtggtcagcgcattgataggagtggtatccgctgccggagaccccgattttgtgcgtttgattttaggaaactcctatgtggatatgactttgaacaatatcgctaatggtgaacctatggctgtatataacggttcctccgagttccccatgtttctgagtatcacgctgaacaatatcatggtctccttcaactgctttgccatggggttgctgaccagttttggcaccggatacatgctccttaacaatggtatcatgataggggctttccaaaccttcttttatcagcacgacttgctttgggagtccttccttgccatttggctgcacgggacactcgaaatctgggcgattattgtagccggtgccgccggtcttgccctgggcaacggatggctctttcccggaacctattcaaggctggaatctttcaaacggggagccaaaaaaggactgaaaatagtggtgggtacggtacccgtattcatcatggcaggatttatagaaggattcgttacccgccataccgaacttccggatgctttgaggttcggctttattctactctctttgtcgtttatctttttttattatatttatttacctaacagaaagaagcatggaagcacagaaacctaaaatcgcactgtatgtacaacgttcttttggagagaaactaactgctacctttgattttatcaaagagaattggaagccgttgatgaaattcaccacatatctgatgttgccgctttgtctgcttcagggactgagcttgaacgggctgatgagcggtacaatggctctgggtgatatgaccggaggctcgttcgactcttctgttgtcggagcgtccatcatggcactggtgacttattacagtctgtatgccgttctctatctgctaggaactgtcatgctgacctctttggtctacgcattggtccgtacttacaatgaacgggaaaaacgcttggagggagtgacgttagggatgctgaagcccttgttgttccgtaatgtcagaagggtatttctgataatgattgtcggtgtgcttttggtgctgtttgtagggcttattgttggttttatagccaccgtcattccgttcatggcgattgcgttcttgttcgttctgctcgttgtggtggtgtctgtgccacttgctatttgggctccagtctatctgttcgaagatatctatatcatagatgccttgaagaaggcctaccgactgggtttcgctacctggggaggtatcgtactgatttccattgttatgggattcatcgccgccatcttgcagggagtgacgatgattccatggtatatcgggactattgtgaaatatatctttgcaatgactgatgcaggtggcggtgccactgtatcggcagcctatagctttgtgctttatctgctggcggtggtccaggcattcggcgtttatatgtccatgattttctcattgctgggactggcttatcaatacggtcatgcttcggaaaagatagattatgtgatggtggagagtgatattgacaattttgataaactctgataacggactatgaatatggctccggctgatacactggtttgtgatactgcacaggttgccgcttggcagtctgacccggcgtttgcttacagtcgtgagttgatagctcccgaaattaatgtacttgagtggttcagcagatggttcggcaagctgctggacaagatattcgggaatacgttggtggcagaatattcggaagtcgtattgatatgcattgccgttcttatcctggtattggtcatttggtttgtgtacaagaagcgtccggaactgttcatgcgttcgcgcaagagtaccctgccctatacagtgggggaggataccatctatggagtggattttgcggaaagaattgccgatgcgcttgcccggacggattatcgggaggcggtgcgtttgctctatctgcagacgctgaaacagctcagcgatggaaaacgtatagactggcagttatataaaacgcctacacaatatatctatgaagtccgtctgccagctttccgccaaatgaccaaccattttctacgagtacgttacggaaattttgaagcgaccgaaactttgttccatgcgatgcgggatttgcagaaagaagtggagaaaggaggggcggcatgaaggggaaccattggtttatagccggtatcattgtttttctggtgttgatgtttgcgatagagtgccgtctgccaaagaagtttgtctggaaccctacgttcagccattatgacaagcaaccgttcggctgtgccgtgttcgatagcctgctgtcttcatcgttgccgaagggatattcgttgtcgagaaagactttttatgaactggagcaggaagatacgacgctccgccgcggaatactggttgttaccgataacctgcatttgacggatgtagatgtggaggcgatgttgaagatggcgggacggggagaccggattatgctggcggggagctctttcagccgtattttgaaagatacgctgggatttgagtgcagctattcctatttcagtccgtcggctttgaaaaaatatgccactgcattgctttcgaaagacagtttgtgctgggtgggggattcggcggtttatccgcagcagactttctgtttctatccccaactttgtcagtcttatttctttgcagattccatttctagtaaagtgttggcggaaaaaactgttaccggagaagctgctcatccggttgccatgtcggtttcttggggaaaaggggaagttatactggcttccactcccctgctttttacgaactatggtgtgctggatgggaagaatgcggcttatctttttcgtatattgtcccagatgggtggatttcccattgtccgtaccgaaggctatatgaaagaaacagcccaggtacagatgtctccttttcgctatttcctttcgcagccgccgcttcgctgggcattgtacttgagtatggtttccatcctgctctttatgatatttacagcccgcaggaagcagcgcaccattccggttatccgcgaaccggaaaataagtctttggagtttgcagagttgataggtactctttattatcagaagaaggaccatgctgacttagtccgcaagaaatatctctattttgcggaggaactgaggagggaaatacaagtggatgtggaggaagtggcagaggatgagcgctctttcggcaggattgcccggaagacgggtatggaagcgggggaaatagccgcgttcatccgcgaggtgaggccggtggtgtacggagggcgcagtatctctgaggaagagatgaaacggcttattgatagaatgaatgaaataatcaatcatatataaagaagatatttatggaagagaacacagaaaaacgggtggacttgactctcttttccgagaagatacaagcgttgaaggaccggattgctacggtcatagtggggcaggagcagacggtggacctggtgctgacggttgtcctggcaaacggtcatgtgttgctggagggagtgccgggggtggcaaagacactgcttgcccgtctggtggcacgcttgattaaggcggacttcagccgcattcagtttactccggacttgatgccgagtgacgtgttgggtactacggtcttcaacatgaaaaccaatgactttgactttcatcaaggaccggtgtttgccgacctcgtgctggtggacgagataaaccgcgctcccgccaagacgcaggcagccttgttcgaggttatggaagaacggcaggtcagcattgacggtaccacgcatcagatgggagaactctatacgattctggcaacccagaatccggtggagcaggaggggacttataagttgcctgaagcgcaactggaccgcttcctgatgaaaataaccatgggatatccctcattggaggaggaggtggacatcctggagcgccaccacgccaatgcttcgttggtgaagttggagagcctggcgcccgtgctcacaaaagaagaactgctttcgttgcgcaggctgatggaacacgtgtttgtagaccgcacgctgcttcagtacatcgcgttgattgtacagcagacgcgtgccagcaaggctgtatatttaggagcttctccgcgtgcgtccgtggcaatgatgcaggcctccaaggcatatgcactgttgcagggacgtgactttgtgacaccggaggatattaagttcgttgctccgtatgtgcttcagcatcgcttgatattgacagcggaagccgagatggaaggctattcgccggtaaaggtgacgcaacgtctgattgataaggtggaagtgccgaaatgagattaggccgccgattctatattgctcttgttctgatagtcctgctgatgggtatcgggtacgtctttgctccattctttgcaatcgggcagtgggcgctttttgttttggcggtgtcggcgctggtggatggggtgatgctctatcgcattcgcggcatccgggcattccgccagtgtgctacccgcttctccaacggagatgagaacaccgtgaacatacgtgtggagagcagttatccgcatccggtggctgtggaagtggtggatgagattccttttgcattccagttgcggaatattgatttccggatgaggctccaggcgaatgagggcaggacgattacgtatcatctgcgtcccacgcggcgggggatttactctttcggacggattcgggtgtttgtggcaggcagaatgggattgctttcccgcagatatacttgcgatgctccgctggatgtcaaggtatatccgtcctatctgatgctccatcggtatgagttgcttgctatcagcgacaacttgacggaattgggcatcaaacgtatccgcagggtggggcatcatacggagttcgaacagataaaggagtatgtgaaaggcgacgattaccgcacgataaactggaaagcaagcgcccggaggcacgaacttatggtaaatgtctatcaagacgagcgttcccagcaaatctataacgtgatagacaaggggcggattatgcagcaggcatttcgcgggatgaccttgctggactatgctattaatgcctccctggttctttcgtacgttgtcatgcggaaggaggataaagccggactggtaacgtttaatgagcactttgatacatttatccccgcctcccgacagcccggacaaatgcaggcgttattggagaacctttacagccagcagactacttttggggagaccgacttttcctcattgtgcgtacatttgaacaagcgcgtcaacaaacgcagtcttttggtgctgtataccaatttttccggcatcggcagcttgaatcgccagttggcttatttgcagcagttgaaccgccagcaccggttgctggtcatcttcttcgaagatgccgctctgaaagagtacgtcgccactcctgcgagggatacggaagggtattaccgccatgtcattgccgagaaatttgtattcgagaaacggctgatagtctccaccttgaagcagcacggcatcagttctgtgctgactacaccggaaaatctttctgtggacgtgataaacaagtatctggagatgaagtcacgtagccagatataaaaacagtaactaaggttatataatccgtaataagggtagtgaagatgtctggattttcctctaattttgtaattggtatattgtgaaggtgtggaaaacatatccttaagattttatatatctgaagttacaataatgagaatgactttataggtgatgaaagacaatacattggacataaagaccgtatgtgaatgtaaccggtgcctgggatgtaaaacgttgcatcctcaggtaagcattattaatctggaaaatcctagtgtgtatcaggatgctgtgaagtttgaattctatgccatcctactgattgaggactgtgaaggggattgtgactgctgcggacggaaatattatgattattccaatgctacgatggtatttcttactcccggcgagatattccggatgaacaagaacaatacgcttccggacaaaggttggctgctggcatttcatcccgatttattgctttgtactacgttaaagaatcatatcgacaactatactttctttttctaccgcaaggaggaggcgttgcatctgtcacagcgcgaaacggccaaagtgacgtgttgccttgagaatattgatgatgaacttcatcattccattgatacgcatagcaataccatcctgtcccgtcacatcgaattgctgctggattattgctcacgttactatgagcggcaattcatcacccgtgagaataagaacaagatgattctggggaaaatggaagggatattggacgagtatatcacttccggaaagttgcaggaggggaagctgcccacttccggatgctgtgccgaaaaactgaatctttcgacggcttactttgatgatttgctgaggtttgagacgggtaagacattggctgaatacttccagttcaaatgcttgtacacggccaagaaaatgttatcggaaggcggtaatacacctgctgccgtagcgcgtcggctgggctatccgagtgtgcaatatttcagtctggtgtttaagaaagcaacgggagttgcaccgaatgaatatagatattcacaaaattgagatgatgcagatagaatgaatttattagaccaaaatattttataatggagaccaaagctatatttttagatgtagacggaacattggtgagtttcgacactcaccgcgttccgcagtcggctatcgaagcgttgcagcaagttcatgaatccggtataaaaatcataatagcaactgggagggcgtttaccgatcttcacgagcttgaagagattccatacgatgcagtgatagctttgaatgggtccgattgtgtactgagagatggcactcctatatctcgtaaacagattcccgaaaaggattttcagatggtactggtattggctcaacattatgggtttgctctggctatcgaaacgaataaaggtatttttgtcaacgaactcaacccgaccgtcatcgaattggccaggctggtcaatcaccctacaccgccggtggcagacatcgaaaaagagtttatgggaggcgaatgttgtcagttatgcatatattgtgatgaagaaatggaaaaagaagtaatggcacaacttcccggactttctgtttccagatggaaccctttcttcgcggatgtcaatgtggcgggagtaaacaaggctatgggtatcaatgagtttgcttcctattatggatttgatgtttcaagaaccatcgcttttggtgatggcgggaatgatatttccatgattcgtgcagccgggatgggaatagctatgggaggagcttccgaggctgtgaaaagcgttgccgattatataacggaggcggtggatgagaatggtgtccggaacgccttggttcgtttcggtattctggaataaaaatcggctatcaaaactgatgaaaactatagtctgtaaatattatgctttttagaaaaattacttaaaggatttaattttagcatcaatatttttaatttggaggaatctaagtcatttgaccaatattttgagcggatattgattagtaaagatacatttttgattaaggaaggagaaatagaaagatatagttatttcgtttttgatgggatattgcgttgttggcttttgaatcataaaggggaagagtaaattttttggttttgtaaagaaggtacgttttcaatgtcgaacatgtcttttaccttacaaacatgatctgcatttaatgtgcagacaattgtagatagcgttatttaccgaatagacaagaagcgagtagatgaactgtatactgctattcctaaggtaaaaactgtatttgaagatttgaatgctatactactgagtaaactcttgaaaagaaatatcgacttgattaaatattctcctgaatagtattatctacagatgattgaaggatatggcattacattaaactatataccactcaaagatatagcttcttatttgggtatcatgccacaagtactaagcaaaatccgtaaacgtattttttaacttgggttcagtgtattgaatgtataagttccgaactttgcggttttaaatagcaattacaattatgattagaaaaattaaagttacggattatccacgtttgatagaaatttgggaaagtgcagtattgagtacacatgattttcttaaagaagaagattttctatactataaggaacagcttccggtatattttcagtatgtcattctattcgggtttgaacaggagggaatcttaatcggatttatgagaattgcagaaggaaatcttgaaatgttgtttattaccaataattattgaggcacaggaattggggaaaaactggttacttatgccataaatcatttgcaggtaacgaaagtcgatgtgaacgagcagaatattcaagctgtcggtttttataaatatataggctttagcgtatacaaaaggtccgatttggacggagaaggtaaagaatatcctattttacacatgcagttgtagttcgtaagtcagaccccgattttaaaaatcatcatttttgccagcactactttttcttctcatattcggctttaactatctgacagcaagaatttaaccacgtgtttttttttctgtttttttgtttataataaataatatttgttaatgtctattttgggcttattttccgttttctttgtgcaaatatggtgattaaggggcgaactccgttgtctatagtgccggaagtatggctttggctccccgtatatgggcattttttcccttcatgtcctgtgtgtaatgcagagaagcttggcgcataattcccgaaaccttattacaaaacttcgtcccacgcatgtgtgttcgccggtttgcctgcgtgaaccgtcgagcccacgtgcgtgggacgagggtttacatgaaccttcataataaaaagcatgggacatacgtggattctgcctataccttcttccagttttgtccctatccggaggacggtctgcccattcattgctgctcagtttcttattcttgtgatgtaagtctgagaaagctgaaactcgaaaattgcttatgcaccggatatttcgggtccccatttttgccggagcgagaaaaagaaaaagctctgaaatacttgaatttcagagctttgctttaatttgctatttgctttcgcggtgcgtacgggactcgaacccgtgaccccatgcgtgacaggcatgtattctaaccaactgaactaacgcaccattatttcattctttcgttgctatctctcttgattgcggttgcaaaggtaggcatttctttgatatctgcaatagctatggcgaacttttttccaagcgttttgtgctgtatttgctttatatcctcatattgagaagattggaaaaataagagaaaagtaaatttaacaactgtttagaaatacgtttatgcactgttttattcttgatatgaaaacctttcctggagaaaacgaaacatttcggagcttgttttaaacttcttgctcgaaaagttcgttgttttgcaataaatcgttatttttgcggactcaaaacgagaatgttgtaatttgaaaaatgataaaaaacattttaggatgatgaaaacagccaaactgttgctgcactgccctgacaaaccaggcatattggcagaagtaacagactttataacggtgaataaaggtaatattatctatctggatcagtatgtagaccatgtagagaatatcttttttatgcgtattgaatgggaattgaaagattttctggtgcctcaggaaaagattgaggattattttgccactttgtatgcacagaaatatgagatgaatttccgtctctatttctccgatacaaaaccgcgtatggctatctttgtttcaaagatgtcccattgcttgttcgacttgttggcgcgttacaccgctggtgagtggaatgtggagatacctcttattataagcaatcatcccgatttgcagcacgtggccgagcgtttcggtattcctttccatcttttccccattaccaaagagacaaaggaggaacaagagaagaaggaaatggagttactggcaaagcataagataactttcatagtgctggcgcgctacatgcaggtcatttccgagcaaatgataaacgcttatcccaataggataatcaatatccatcactctttccttccggcatttgtgggagcgaagccctatcatgctgcgtttgaacgtggagtgaagattattggagctaccagccactatgttaccacagaattggatgccggtcccatcatagagcaggatgtggtgcgtattacacacaaggacactgtgcaggatttggtgaacaagggtaaggacttggaaaagattgtgctttctcgtgctgttcagaagcatattgaacgcaaggtgttggcatataagaacaaaacggtaatatttaattagttgatagttgataattgatagttgatggtggggaacttgtcattacctttcaattattacctttcaatggtcaattctcaattaaaaaaatgaaagttgcagttgtcaaatataatgcaggcaatatccgttcggtggattatgctttgaagcgtctgggagtagaggcagtgattacggcggatgaggctgtgctacgtgctgccgataaggttatctttcccggtgtgggagaggcggaaaccactatggactttttgcgtgccggtggtatggataggctgataaaggagttacgccagccggtattgggcatttgcctgggcatgcagttgatgtgccgccactctgaagagggggatgtggattgcctgggtatttttgatactgatgtgaaacgtttcatttcgcagaggcacgaggataaagtacctcatatgggatggaataccattgcccggacgaatagcggactttttaaaggctttactaaagaagagtttgtttatttcgtacatagtttctatgtgccagtcaatgattgtacggcagccgtgacggattacattcatccgttcagtgccgctttgcataaaggcaattactacgccacacagttccatccggaaaagagtggaagtgtgggagagcgtattttgcggaatttcctggaactgtaaatcgtcaaatcgtaaataaaatgatagaactgattcccgctattgacattattgacggaaaatgtgtacgcctttcccaaggcgattatgacagcaagaaggtgtacaacgaaaatcccgtggaagtggccctggagctggaggctcatggtatccgcagacttcatgtggtcgatttggacggtgcggcttcccatcatgtggtaaactaccgtacgttggaacagatagctgtgcgtacgtctcttattattgattttggaggtggggtgaagagtgatgaagatttggtgatagcttttgagaacggtgcgcagatggtgaccggtggcagcattgctgtgaagaatcccgaattgttctgcaaatggcttcaaatgtatggttccgagaaaattattcttggcgctgatgtgaaagagcataaaatagccgtcaatggttggaaggatgagagtggctgcgaactgtttccgttcttgaaagactatgtagagaagggggtccgtaaggttatctgtactgatatcagttgtgacggaatgctgcaaggaccatcgatagcgttgtataaggagatactggagcaccatcctgaactctatctgatagccagtggaggcgtaagctgtgccgatgatatacgccatttggaagttgtcggcatacctgccgttattttcggtaaggctctgtacgaaggccgcatcaccttcaaagaactggaaaactttgttagttgaaaggtgaaaattgaaaattaatcacttataactcataacttataactcaaaccgccgtgttagcaaaaagaatcatttcttgcctcgacattaaagatgggcagacagtgaaaggtaccaatttcgtgaacctccgccaggcgggcgacccggtagaactggcgcgtgcttatagtgagcagggtgccgacgaactggtttttctcgacatcacagccagttttgaaggccgtaagactttcactgaattggtgaaacgcatagctgcgaatatcagcattccttttactgtaggtggaggcattcatgaactgggtgacgtggataggctactgaatgcaggtgccgataaaatctccatcaattcctcagctatccgccgtcccggattgatagacgagattgcgaagaacttcggttctcaggtttgtgtactggcagttgatgccaaacagacagagaagggatggcggtgctacttgaacggtggtcgtgtggaaacggataaggaactgtttgcgtggacaaaagaagcccaggaacgtggtgcgggcgagatattgttcaccagcatgaatcacgacggtgtcaagaccggttatgccaatgaagcgctttccagccttgccgacggattgtccatccccatcattgcatcgggaggggcaggtgccaaagaacattttcgtgacgtctttttgcagggaaaagcagatgctgccctggcagccagtgtttttcatttcggagaaatcaaaattcccgaattaaaatcgtatctttgtgcccaaggaattgcgatgagaagatgaaggtgagtttacgattggacgatttacgatttacgattgggattactcaagcaaatcataagtctccagtcacttaaagtaatatcaatcgtaaatagtaaatagctaaatcgtaaatagaatggattttgacaagatgaacggactcgttccggcgattatacaagatgcagataccgctaaggtgctgatgcttggcttcatgaacaaggaggcttatgacaagacggtggaaactggaaaggtgactttcttcagccgtaccaagaaccgtctttggacgaaaggcgaggagagtggcaacttcctgaatgtggtttccatgaaggaagactgtgaccgggatacgttactggtgcaggtacatcccgtaggcccggtttgccataccggcacagatacttgctggggtgagaagaacgaacagccggttatgtttctaaagcttcttcaggatttcatctgtaagcgttatgatgaaatgcccgaaggttcctatacgaccagtcttttccagtccggtatcaacaaaatggcacagaaggtaggcgaagaggctgtggaaaccgtcattgaggcttgcaacggtacggacgaacgcctgatttatgaaggagctgatttgttgtatcacctcatcgtgctgctcacatccaaaggataccgcattgaagaccttgcgcgtgaattggaggaacgtcacagtgcgacgtggaagaaacattaagtaattaaaaattaataattaaaatgggggtgggcgaggcgctgataagatatacggacgtagagatacaccagcaggagttgtgcgtactgaacgatgtgaatttggaacttcacaaaggggagttcgtgtacctggtaggtaaagtgggctccggcaagacgagcctgctcaagactttctatggcgaactggatattgcatcgggcgaggctgaagtattggggtatgacatgctccatattaagcgtaagcacatcccgcagttgcgccgcaagctgggaatcgtattccaggacttccagttgctgacagaccgtacggtgtacgacaaccttgaatttgttctccgtgctaccggttggaagagcaaaggggagattaaggacaaaatagaagaggtgttgaacctggtggggatgagcaacaaaggatataagctgcctaatgaactgtcgggtggtgagcaacagcgcattgtgattgcgcgtgcagtgctcaactctccggagataatccttgcggatgagcctaccggaaacctggattcggaaaccggacatgccattgcagaacttctgcacggcatcagtgaagccggcgcactggtggtgatgaccacgcacaacctgcagctgctgcgagagtttcccggcaaggtgtaccggtgcgcagaccatctgatgactgatgttacagcagaatacgcccctgcaataaccaatgattagtagttaagtagttatctctaactactgattcttataaagaacagaaattaacgataaagctccgcagctgcctacttgtagctcgtagcttgtaactataaactaattaatacaggaacgaaaatgaaagttttaaagtttggaggtacttcagtaggttcggctcagcgaatgaaggaagtggccaaattgattaccgatggtgaacgtaagattgtggttctctctgccatgtcgggtaccacaaacacattggttgagatttcggactatctgtacaagaagaatccggaaggtgccaacgagattatcaacaagctggaaagtaaatatcgccagcacattgatgaactctttgctactccggagtataaacagaaaggcctggaactcatcaaatcacattttgactatatccgttcttataccaaagacctcttcactctgtttgaggagaaagtggtgttggctcagggcgagttgatttccaccgccatgatgaactactatctgcaggaatgcggcgtgaagtctgtgttgcttccggctttagaatacatgcgtacggacaagaatgccgagcccgatccggtctatatcaaggacaagctccaggttcagctggaactgcatccggatgctgagatttatatcactcaggggtacatctgccgcaacgcctacggcgagatagacaatctgcagcgtggcggaagcgactatacggcttcgctgattggtgctgccatcaacgcttccgaaatccagatttggacggatatcgacggcatgcacaacaacgacccccgtattgtggacaagactgcgccggtgcgtcatctgcatttcgaagaggccgccgagctggcatacttcggtgccaagattctgcaccctacctgcatccagcctgccaagtatgccaatatccccgtccgtctgctcaatacgatggaccccactgctccgggtacgctgatttccaacgatacggagaagggtaagattaaggcggtggctgccaaggacaacattacggccatcaagataaaatccagccgcatgttgcttgctcacggattcttgcgtaaggttttcgagatattcgagagctaccagacttccatcgatatgatttgtacttcagaagtgggtgtgtccgtatctatcgacaatgtgaagcatctcaatgaaattctggatgacttgaagaagtatggcacagtgacggtggacaaggacatgtgcatcatctgcgtggtgggcgacctcgaatgggaaaacgtcggtttcgaagccaaggcattggatgccatgcgcgacataccggtacgtatgatttctttcggtggtagcaactataatatctctttcctcatccgcgagtgcgacaagaaggcagcgttgcagtcactcagtgatgcgctgttcaatgaggaataactcttgatatttttcagacgcagattacacagatgacgcagattctttttgcttcctatttgtgtaatctgcgtcatctgcgtctgaaaaattatttgtagacacctctttcatcttcctttttttaaactaaacaaagattacgattattatatgaaaggaacattccctatccatagattccgcgaattgcgtactcccttctattactacgacacaaaggtcttgcgcgacacactttcgtgcatccgtacggaagctgcccgatatggcaactattcggtgcattatgccgtgaaggccaatgccaatcccaaggtgcttgccattatccgcgagaacggcttgggtgccgactgtgtaagtggcggtgaaatccgtgcagccatcaaggcaggttttcccactggcaagattgtttttgcaggggtgggcaaggctgattgggaaatcaatctggggctggattatgacattttctgctttaatgtggagtctgtccccgagctggagattatcaacgagctggctgccgctaaaggtaaggtggccaatgtggctttccgtatcaatcccaatgtaggtgcccatacccatgccaatattaccactgggctggccgaaaacaagtttggtatcagcatgcaggatatggaccatgtgatagacattgcgcagaatatgaagaacctgagattcatcggactgcatttccacatcggttcccaaatattggatatgggcgatttcgtggctttgtgtaaccgcgtcaacgaattgcaggataagctggaagctcgccatatccgcatcgagcacgtcaatgtggggggcggactcggcattgactacggtcaccccaaccgtcagccgatacccgacttcaaaagctacttcgagacttacaacagccatctgaaactccgtccccaccagacgctccacttcgagctgggacgtgcggtagtgggacaatgcggttcattgatttcgcaggtgctttatgtgaagcagggcaccaacaagcagtttgccatcctggatgctggcatgacggatttgattcgtccggccctctaccaagcgttccataagatagagaatatcacttcggatgcaccggttcaggcttatgatgtcgtagggcccatctgcgagtcttctgatgtattcggtaaggctattgatttgaatggggtgaagcgtggcgaccttatcgccctccgttcggcaggggcttatggcgaaattatggcttcgggctataactgccgtgagctgcctcaaggatatacgtcggacgagctggtatagagaggctggagatgcgttgcatgaatggcgaagcatttattataccaaggcttctgtttttatataaaaaatgttattgcgtgaacaacttttaaggtttcttgttacttttgtaatgatttcaatttaaataaatacgattatgattacagaaaaattacagaatgcaattaatgagcagattacggctgagatgtggtcttccaacctttatctggcaatgtctttctatatggagaaagaaggttataacggcatggcttcctggttgaagaagcaggcttctgaagaaaaagctcatgcttgcgaaatggcttcttatatcatcaagcgtggcggtaaggccaaactggacaagattgatgttgttcccaatgacttcggtactccactggaagtgttcgagcaggtagcccagcacgaacgccgtgtttccaaaatgattgatgaattggtagatgttgcctctgccgaaaaagataaggctacacaagacttcctttggggattcgtgcgcgagcaggtagaagaagaagctactgccgacggcattgtagatatgataaagaaagccggtgatgccggaatcttcttcgttgattcaaaactgggagaacgcagataagagagaaactaaaaaaatcccgcggctaattttagtcgcgggattttttttagttatgagttataagttgtgagttatttgttgatgaagggcttatatccgcaagggaaagcacaagcaaataacttataactcataactcatcactcatttcagcactcccagctctttccccaccttaataaatgcagcgatacatttgtccagatgctccttttcgtgtccggcagagatttgtacgcggatgcgtgcctggtctttgggcactacggggtagtagaagccggtgacgtagatgccttcttcctgcatgcgggtggcataaatctgggagagtttggcatcatacagcatgacggcgcagatggcgctttgtgtcggcttgatgtcgaaaccggcggcggtcatcttgtcgcggaagtagttcacgttttccagcagtttgtcatgcagggtatcgctctctttgagcatcttgaatacctcgaggctggcgccgatgatgcccggagccaatgagttagagaagaggtacggacggctgcgttggcgcagcaggtcgatgatttccttgcgtccggtagtgaatcctcccaaagcgccgccaaaggctttgcccaaggttccggtatagatgtccacgcgtccgtaggtgccgtattgttcgcttacgccgtgtcccgtagggcctaccacgccggcagagtgtgattcgtccaccatgaccagcgcgtcgtatttctcggcaaggtcgcaaatccggtccatcggggcaacgttgccgtccatggaaaataccccgtctgtaaccacgatacggaaacgctgtgcctgggcttcctgcaggcatctttccaggtcggccatgtcggcattggcgtagcgatagcgtttggctttgcagaggcgtacgccgtcaatgatggaagcatggttcagggagtccgagatgatggcgtcttcctcggtgaagaggggctcgaacacaccgccattggcgtcgaaacaagcggcgtagagaatggtgtcttcagtcttgaagtagtcggagatggctgcttccagctccttgtggatgtcctgcgttccgcagatgaagcgtacggacgacatgccgtatccgcggcgttccataatctgctgggcggcggcaatcagccgcgggtggttggacagtcccaggtaattgttggcacagaagttcagcacctctttgccttttacgctgatggcagcttgttgtgcactctcaatcagtcgttcttccttgtagagtccggcttcttttatttcagcaagtgtcttgctgagatggtctttcattttaccgtacatagcattttattttttaggtaatacgttgtcattacatttcccacaaagaacatcatttttcttggaataaacaatatcaatatggcagaaatatgaaaaaaaagtatgtatatttgcaccatatataataacgaaaccttataaataactcgtatgaagaatattttggtaattggagctaccggacagattgggtcggaactcacgctggagttgcgcaaacgttatggcgatgaccatgttgtggcaggatacattccgagtgctatgcccaagggagaattgaaagcatccggcccttcggccattgccgacgtgacagaccgtcagtccatcgaggtggtggcacgtcagttcaagattgatactatctacaacctggctgccttgctctcggtagttgccgaaagccgtccggccatggcttggaaaatcggtatcgacgggttgtggaatgtactggaagtggcacgtgagtacaattgtgccgtgtttactccgagttccatcggttcgttcggcgaagctacgcctcatgtgaagacaccgcaggacactatccagcgtccgcgtaccatgtatggggtgacaaaagtgacgactgaattgttgagtgactattactatacaaaatatggtgtggatacacgctcggtacgttttccgggaatcatttcgaacgtgacccctccgggtggcggcactacggactatgcggtggatattttctactctgccgtgaagggagaaaaattcgtatgtccggtgaaggccggcacgtatatggatatgatgtatatgcccgacgcactgaacgcggccatctcgctgatggaagcggcaccggcaaggctgaagcaccgcaacgctttcaacatcgcctccatgagttttgacccggaacagatttatcaggaaattaagaagcatatgcctgattttgagatggcatacgagattgatccgctgaagcaggccattgccgacagctggcccgactctctggatgactcttgtgcacgcgaggaatgggactggatgccgcagtacgacctggagtccatgaccgtagacatgcttgagaaattaagagctaaattaaacaagtgaccgtaagcggtccgtaaagaatgaaaaaacttttattgggatttttgttgttcacctttttgatttcgtgcggaaacaaaaaggcgaaaatggatccctttgctaccattacggaaatggtggattcggccggtcacaaggccgatacgctgctggaagcagaagtgaaggaagaaccgaagccgatggaggcagacgagctgtttgatgattttatcttcaattatgcttcggatgatgccctgcaaaggcagaggacggtatttcctttgccctattacaatcgtgacacgccgtcaaagatagaggaagagttttggaagcatgattatctgtttaccaagcagaactattacaccttgctttttgataaggaagaggatatggacatggtgggcgatactacgctgacatcggtgcaagtggagtggattttcttgaaaacgcgtatggtgaagcgttattattttgagcggaagcggggaatgtggatgctcgaggccattaacctgcgcgagatggagaaaggtgaaaatgaggacttcgtggaattctatacccgttttgtgacggacagtgtctatcagagcaagcatatcaggcatccgctacaattcatcaccatagaccctgatgacgagttttctattctggaaactactttggatgtggaccagtggtatgcctttcgtccggtaatgcctaccgacagattgtctaatatcaattacggacagaagaatgaggacttgtcggataccaaaatactgaaggtaaatggcataggcaacggatactccaatatcttctatttccgcaaacgcagtaagggatgggagctgtacaaatatgaagacacgagcatttaaaataaaggaggaaaggtttgaggaagatacccaatacatttggaattgacgttactgctgcaagatttctggaatacggttcggaggatgaactgcgggggctgattgcagcaggacaggtcgttgcgccctggctgcatatcggtggagggagcaacctgctctttattaaggattatgaaggcacggtactgcattcacgtatcggtggcctggaggtgacgtcagaggatgaggagcacgtgtcggtgcgtgtgggcgccggtgtggtatgggacgattttgtggcctactgtgtggagcggcattggtatggtgccgagaacctttcgctgataccgggtgaggtgggggcgagcgcagtacagaatatcggtgcctatggtgtggaagtaaaggacctgataacatccgtggaaaccataaacatggcaagggagaagcgtatctacggggtggacgaatgcggctactcctacagaaagagcttgtttaagcaaccggagatgaagaccgtgtttgtgacttacgtgaacttctgcctgggtaaacgggaacattatacattggattacggtactatccggcaggagctggagaaatatccggtgctgaatctggaaattttgcgccgcgtgattatagacatccgtcaaagcaagttgcccgacccgaaggtgctgggcaatgcgggtagtttttttatgaaccccatcgtgccgcgtcggcagttcgagtctttgcaacgggaatatccggacatgccccactatgatgtggatgccggtcgggtaaagataccggctgcctggatgatagaccggtgtggctggaaaggcaaggcgctggggcctgctgcggtgcacggccggcaggcgttggtactggtgaactcgggtggtgccacgggagcggatattgtcgctctttcggatgccgtgcgggcttctgtccgcgagaaattcggcattgatattcacccggaagtttgtttgataaaatagtaagagagttttgacacacccaaacatcgttgtatataacctgattttagaaatttatttgatttagtcaatgggaaaactcagaatattaggaagcggaacttcgaccggtgtgcctgagataggctgtacttgtccggtctgcacttccactgacccgcgggacaaccgcttgcgtgcgtcatccctgctgcatacggatgatgcggtgatattgatagattgtggtcctgacttcagggaacagatgctgcgtgcttcttcttttgagaagatagacggcgtactggtgacacacgaacactatgaccatgtgggtggtctggatgatttgcgcccgttcggtcgttttgccgatattcctatctattccgatgcttacactgctgcccatctgagggtaaggatgccttactgttttgtcgataaggtatatccgggagttccgcgtatctatctgcaggaagtggaggcggggcaagcgttctacatcaatcggacggaggtgctgcctttacgggtgatgcacggcaggcttcccatcctgggctaccgcattggcggccggctgggatatatcacggatatgcacgcaatgcctgaggaatcttatgaacaattgaagggcttggacgttttggtaatgaatgctttacggccaaagccgcatcctacgcaccagagtatttcggaggcgttggaggctgccggacgtattggtgccaaagagacctatttcatccatatgagccatcatgcagggcttcatgccgacatcgaaaagcagctgccaccccatgtacactttgcctacgatggacttgaaatagatttctaaactttttgaaacatttgttttgttttattagtagaaaatgctatttttgccaaaagttgatgaataaatgccatgaaactccgactcctcatacagatagctgtcgttgtgtccatagtgctgctatgtaccggttttggtgtgtattccttcctgcggttgaattcggtggagaaccggcaggatttcaatctttatactttggtgccgcaagatgccacagccatactcgaaaccgaccgtatggcagacctcgtggaggatatcaatgaactgaattgcagcaaagacaatcattttctatacgtatcggagctttttgtttacttgaagaagtatttgtatactttggtggaggatactccgcatggactgagtaaacagatgaacaagatgctgattagctttcacgagccggatacaccgatgaaccaagtattgtattgcagtttgggttcgggtgattatgagttggtggagtcttttgtggagaagtactgctccagttcgtttccttccaagtatttcgattacaagggagaggagatacgtatctatcccatggcagacggtcgtttcctggctgcctacttcactcccgattttctggttgtaagtttccagaagcgtttgatagaacatgtgattgatgcgcggcgcagcaaaaagtccctgatgaacctcccttctttccgcactatgtacgcgggcaagcagagtaacgtggctgccacggtctatgtgcgtatgaaaggagtggatatggggaagcctacggacggtatccgttcgcagacgcagctgggcagttgggcggagtttgacatgaagttcaatgaagatgccatttattgctccggcatcagccatgggtcggattccacacagacgtttatcaatgccttgcgggtgcagcagccggtagaggacggattttccggggctctgcttccgtcttccactttcttttacgatcgctgggcaatgtctgacagaaattcctggtttggctttactgccagtcaggagtatgccaaggccacctattcagactatatcaagcagcgcgacgaggagtggattgcttacttgaatgagcatgcgggcgagagcgtgatgtcttgcttgttccagtctaaagacacgttggacaagctgccttgcgccgtgatgtgtatccctctcaaggatgaactggcagcggaacgccgcttgcagtctctgctttacagtacccccaaggaagaggatgctccgcttatgccgaaggtggtttcaaataattcgttgtatcccaaagcaaggaagttccctaaatatgtgttgccccgtaacacgctgctcactcagctgacgggcatcacggagtctgccctttatacctttgcctgtttctatcggggtagtctgttgctggctcccgatgcactgagcctttcggcctatattgaggcggtggagagtggagatgtgttagacggaacaccggtgtacgaagagggtataggcagtctttcacccatatataattttgtgatgatggtggatatggagatgatgctgagccagcctgaaacgtatgtgcgtctgataccgaacttcttcttccgtcaatccaacttcttccgtcatttcatgcttgcagtacaattcacttgtacagaaggggtggtttatccgaatatcgtattgctttataaagggtgattaatcggtcattctgtagagtgctgagggaaaataagcacgaggaaagtcaaaatacacactcaccacagattgcacagattaaaacagctaaaaattcttgattatcaaaattctagaatgaactgtgttaatctgtgcaatctgtggtgaattataacatattcttagaacggcaggtcatcctttgcatcccctgcgaggaattccggtgcggcagtgggagccggcggtggaacgggagcgcccggagcgggtgcggcagtgcttacgcgttctaccttccatgcgcgaatactgttgaaccaacggtcttgccattggcgtgcgtctacatcaaaagatactgtcagctcttcgcccatctgaatattgaactgttcgattttgtccgctccaaatacgtcaaaacacattttgcgcggatattggccatggtcttcaatcacatattcttgtgatttccattcgttacctgacttggaaactccgcctctgggctggagtatagcgatgatttttcctgtaaattccattgttttctttttaaatgatgcggcgaagttacaattttttaggaatatgagacgaatattcggctgttttttcttgctatttctttgtcgtagggaattctttttttaactttgtccgtcagtttgaaaaagataaaaacggtttctaagacgttagcaaaataaaaaacttaaatatacagaagatatgaaatttatcgtttcgagtactgcgctctccagtcatttgcaggctatcagccgtgtgattaattcgaagaatgcgttgcctattttggattgtttcctctttgaactgcaagacggaaccttgtctgcaactgtttccgacagtgaaacgacgatggtcactacggtcgaagtgaatgaaagtgatatggacggccgttttgccgtcacagccaaaacccttttggacgctttgaaggaaattcccgaacaaccgttgacttttgaaatcaatacggattcccttgaaatcacggtacagtatcagaacggtaaatacagcctgatggggcagaatgcggacgagtttccgcagtccgccatgctgggcgacaatgccgtacgtgtggaaatggatgcgcaagtgttgctgggtggcatcaaccgtgctgtgtttgccacggctgatgacgagcttcgtcccgtgatgaacggtatctatttcgatatcacaacggaggacatcacgatggtggcatcagacggtcataagctggtgcgctgcaagacactggccgccaaaggtaacgaacgtgccgcctttatcctgcccaagaagccggcttcgctgatgaagaatctgctgccgaaagaacaaggcatggtgactatcgagttcgacgaacgcaacgctgtgttcacactggaaagctaccgcatggtgtgccgtcttatcgaaggacgctatcccaactacaactctgtgattccgcagaacaacccttataaagtgacggtagaccgcctgcaactgctcggtgctttgcgccgcgtgtccatcttctcctcgcaggcaagcagccttatcaagctccgtatgcaggagaatctgattgtcatctccgcacaggacatcgacttctctacatcggccgaagaaacactggtttgccaatatgcgggcaatccgatgagcatcggtttcaagtccactttcctgattgacattctgaataacatttctgccgatgaaatcgttatcgaactggcagatccttcacgtgcaggtgtcattattccggtagagcaggaagagaacgaagacttgctgatgctgctgatgccgatgatgctgaatgactgatgaatattagcaatcggattatgagctacgagctacaagtggctgcgcaattatgccgcacggtacttgtagctcgtggcttgtaagttaaacttataatttatagctcatagccagagcttataaaacgaaaaaacaatgaaattgaatctgaaaaatccgatagtcttttttgatttggagactacgggtaccaatatcaactcagaccgaattgtcgaaatctgttacctcaaggtatatcccaacgggaatgaggagtccaaaaccatgcgtatcaaccccgaaatgcccattcctgccgaagcatctgccgttcatggcatctacgatgccgatatagccgactgccccacattcaaggaagtggcgcgcaacattgccaatgacattgaaggatgcgacttggcgggcttcaactccaaccgttttgatatccccgtcctggcggaagagttccttcgtgccggtgtggacattgacatgagccgccgcaagtttgtggacgtgcaggtcattttccacaagatggagcaacgcacgctgtctgctgcctataaattctattgcggcaagaatctggaagacgcccatacggcagaggctgatacacgtgccacttacgaggtgctgatgtctcagttggaccgctatccggagttgcagaatgacgtggctttccttgccgactattccagcttcaataagaatgtggactttgccggccgtatggtctacgacgataaaggtgtggaagtattcaacttcggcaagtacaagggcatgtcggtatccgatgtcctgaagcgcgatcccggctattacagctggattctgaacagtgattttaccctgaataccaaagccacgctgaccaagatacgtctgcgtgaaatgactcagaaataaatggcaaatatactgaaagggaagaaaatagtattgggcattacgggcagcattgccgcctataaagcatgctatattattcgcggactgattaagcgtggtgcagaggtgcaggtggtcattacgcctgccggaaaagaatttattacccctatcacgctctctgccctgaccagcaaaccggttatcagtgagttctttgcccaacgcgatggcacttggaacagccatgtggacctcggtctgtgggcagatgccatgctgatagccccggctacggcttccaccatcggcaagatggcgaatggcgtggcagacaatatgctgattaccacctatctttccgccaaagctccggtgtttgtggcgcctgccatggacctggacatgtatgcccatccttccacccaaaagaatctggatacactccgctcttatggaaaccacatcatagaacctgctacgggagaactcgccagccatctggtggggaaaggccgtatggaggagccggagaatatcatccgccacctggaaatgtactttgctgccaaagatggcgacctggtgggcaagacagtgatgataaccgcaggacctacttatgagaagatagacccggtgcgcttcatcggcaactattcttccggcaagatgggacttgccctggcagatgaatgtaccgccagaggggccaaggtgatactgattgccggtccggtgcagcaaggcacttacttcccgatgcaccagtaccatgcggtagagtcggcgcaggagatgttcgaggctgcatccgccgcctttgtccatgccgatgccgccatcttgacggctgccgtggcagactacacccccgaacaagtggcggatgagaaaatcaagcgcgaaaagaccggggagatgagtttgaacttgaaacctacccgcgacatagccgctttcttaggcaatctgaagaacgatgcggagcactgtcaacgcctcctcataggctttgcccttgagactcataacgagcagatgaatgcggaagacaagctcaaccgcaagaatctggacttcatcgtgctgaactccctgaacgacaagggagccggttttcgttgcgataccaataaaatcagtatcatagaccaccagggaaagacggactaccccttgaagtccaaagccgaagtggctgccgacatcgtagaccgtctggtgaaagatttaaatagtaaatagtaaatcgtcaaatcgtcaatatccttatgttgcgttcgctttacatacagaattatgcgcttattgaaaagctcgatatcagcttcagcagcggtttctcggtgataacgggtgagaccggtgctggaaaatccattattctgggtgccatcggtctgctgctgggacagcgtgccgatgtgaaagccattcgtgtaggagcttcgaagtgcattattgaggcccgttttgatatttccgcttacggtatgcagcctttctttgaggagaatgagttggagtacgaggaagaatgcctcctgcgccgcgaggtgtccgcttcgggcaagagccgggcattcatcaatgacacgcctgcttcattggctcagatgaaggagctgggagaacagctgattgacgtgcattcccagcatcagaacctattgctgaacaaggaaggatttcagttgaatgtactggacatcttgtcgcataacgaagaggccttgtctgcttaccagcatatcttcggatcatggaagcaggcacagcaggatttggaggcccttgttgcccgtgccaatcaggataagtcggacgaagactatatccgtttccaactggaacagttggaagaggcacacttgtctgccggtgagcaggaggagctggagcaagaggcagatacgctgagccatgcggaagagataaaggccggactctatcgggtagggcagacgctctactcggacgaaggaggcttgttgtccgggctgaaggaatgcctgaatacgatgctcggcctgcagagggtttatccggttgccggggaacttgccgaacgcatggaaagcacttatatcgagctgaaggatatttcgcaggaagtgtcgggtaaggaggatgaaatagagttcgaccccgaacgtctggatgaagtgaacgaacgtctgaacttgatttatacgctccaacagaagcaccgcgtttccactgtcggtgaacttctggcgctgacggatgaatacgccgccaaactctccgccatcacttcgtccgacgagcacatcgaggaactgaaagcgcgttgcgacgctttatataataaggtgaaaaagcaggctgccgtcctcaccaaggcgcgtactgccgttgcccgtgaagtggagaagcagatggctgcgcggctggttccgttgggcatgcccaatgtccgtttccaggtagagataggtgcccgcaaagagccgggcatacacggggcggatactgtgaacttcttgttttccgcgaataagaacggggcattgcaaagcgtctcctccgtagcttcgggtggtgaaatagcccgcgtcatgctctccatcaaagcaatgatagccggtgccgtcaagcttcctaccattgtattcgacgaaatagataccggagtctccggcgagatagccgaccgcatggcggatatcatgcaggagatgggcgagcaggaccgccaggtaatcagtatcacccatctgccccagattgctgcccgcggacgcgcccattataaggtgtacaagcaggacaacgagacggaaacaaacagtcacatccgtcgtctgaccgacgatgaacgtgtggaagaaatagcccatatgctgagtggcgctaagctgaccgaagccgcactgaacaatgccagagcattgctggaagtatcaaatagtaaatagtaaatcgtcaaatagtaaatacccatatatggttgataacagtgaaatgattttcggcgtccgtgccgtgatagaagccattcaggcaggaaaagagatagacaagatattggtaaagaaggacattcagagtgatttgtcaaaagagctgttcgctgtcttgaaagggactttgataccggtacagcgcgttccggtggaacgcatcaaccgcgtgacgcgtaagaatcaccagggagtgattgccttcatctcttcagtcacttaccagaagacggaggacttggtacctttccttttcgagcagggcaagaatcctctgtttgtgatgcttgacggcatcacggatgtccgcaatttcggcgccattgcccgtacttgcgagtgtgcggcggtagatgccgtgattatccctgcacggaacagtgtatcagtcaacgcagatgccatgaaaacttcggcaggagccttgcacactttgcccgtttgccgcgaacacagcctgaaagagaccctgcaattcctcaagaatagtggtttccatatcgtggcagccacggagaaaggcgattacgactataccaaagccgactataccggtccgatgtgcatcattatgggtgccgaagacaagggggtgtcctatgacaatctggcgttgtgtgacgagtgggtgaaaattcccatgttgggaaccatcgagtccctcaatgtttccgttgcagccggcattttgatttatgaagcggtaaaacaaagaaccaactaagatatgaaaaagaaattgctgttgatgctcactctctgtttattggctcagtggagtgtggcacaagccccgaagtgggtagacaaagccaaacgtgccgttttttcggtggtgacctacgaccaggacgataagatactgaatactggaaacggcttttttgtcactgaagatggcgttgcgctttctgactacaccttgttcaaaggtgcccggcgcgccgttgtgatgagctcggacggggcacagatgccggtggaggccattatgggagctgatgacatgtacgatgttgtcaagttccgtgtcggcatccccggaaagaaagtcacggcactcactttggctgctgtggctccggccgtcggtgcggatgtatatctgctgccttattccacccagaaggaccgttccttcactgccgggaaagtaaaggaagctgataagatttccggcaactattcctattatacgctcgatatgcgtctgaaggacaagatggtgagttgtccgctgatgactgtggacgggcaggtcttcggccttgcgcagaagtcctccggacaagacacggctaccatctgctatgccattgatgccaatttcgccatgtcgcagaatatctccgcattgtcttatggagatatgtcattgaagggcatcggtatcaagaaggcattgcccgataccgaagagcaggctttggtgttcctctacatggcttcttcccaactgtctccggagaagtatatggagactctgaacgatttcattgcacaatatcctgccagtgccgacggttatctgcgccgcgcttcccagcatctgttcatgtcccgtgaagatgcttccatggataaggtcgccgcagatatggataaggctttggaggttgcggcaaagaaagatgatgtgtattacaaccgggccaagataatctataattatgcattgggcaagcccgagaaagtttataaggattggtcgctcgacaaggctctggacgaggtacggaaagcgatagccattgacgagcttccggtttatgtccagttggagggtgacatccagtttgccaagcaggactatccgtcggcatttaccagctatgataaagtgaataagaccattctggcctctccggctaccttcttcagtgccgccaagaccaaggaactgatgcaggcgcctgccgaggaggtactggctctgatggacagttgtgtggcccgctttacccagccctatacggaggaagccgccccttacttgctggagcgtgcccaagcccgtatgaatgcagaccaggcgcgtaatgccatgctggattatgacgcctattacaatgccgtgaacggtaaagtgaacgacatgttctactattaccgtgagcaggctgctttgaaggccaagcagtaccagcgtgcgctggacgatatggcgaaagccatcgaactgaatccggaggatttgacttaccgtgccgaactggcagtggtgaatcttcgcgtgggacgttacgaagaggcgttgaatgtgctgaaggctgctctggagaaagaccctaagtatgccgaggcctaccgtctgatgggtatcgcccagctgcagatgaagaaggacaaggaagcttgtgccagctttgccaaggcaaaggaattgggtgaccccaatgtggatgctttgattgagaagcattgcaagtaaagggatgggatagaataaaggctctgctttcgcaagcagagcctctgttttggggaactcccccgtgttaaatgagttaagtctaggtataacaggttatgagtgaaattacgttgttttatttataaaatgcgtggatttccggaatactgcatatacttcggattttttttatttcaaaaaagaaaatagactcgattattaataaaaacaaactttgacaatcatgaagaaagtgatttgcagccagaaggcaccgggcgccataggcccttatagccaggctatcgaagccagtggaatggtatttgtatcaggtcagttgcctattgatgcagctaccggagtgatggctgaaggtgcggaagcgcaagcctgccagtccttggagaatataaagcatatcctggaagaggcagggctgggtatggcgaatattgtgaagacaactgttttcctggcagacatgtccttgttcgctgatatgaacaaggtatatgccacttattttgacggtgctttcccggcacgttcggctgtggcagtgaaggcgctgcccaaagatgccttagtagagattgagtgcatcgcggttcgctaacaagtcggccacaatgaaactgctgcctcccacgaagatgaaatcttccgggaggcttttttcttgtgcggcccgcacggcggtgggtacatcaggatagcaatgtccttccagacctgctgcttcggcaagctcctgtagttcgctttcgggcaatgctcgtttcacgctggctttggtgaagtagtaggtcgcttcccggggcagcagggccagtaccccccgtatatccttgtcattcaccatgcctatgatgatgtgtagctggcggtaagcctgctgtttcagttgttctgtaatgtaggtgatgcctcccacattgtggccggtgtcacaaatcagggtgggcgagtcctgcagtttttgccagcgtcccatcaagcccgtcagttccaccacacgggcaaagccactgcgcactgcttgtccgtccagccggtagccggcttctttcagtagcgggagggcggtgaggatggtccgggcatttttctgctggtagagccctttcagttcgtattctattccgggatagtcttcacggtcattctcctcggcaaagtagatgggagcacccgttgtctgtgctttttccagaaataccggtttcgtttcgggagtggtctcgccgattacaacggggataccgcttttaatgattcctgccttctctcctgcgatttttgccaaggtgtcccccaggaattgggtatggtcaaaactgatgttggtgatgatgcatacatccggacggatgatattggtacagtccaggcgtccgcctagtcccacctcgattacggctacatccaccttttcatcggcaaagtagcggaaggccatggcggtggtcagctcaaagaaagagggatggaggggttcgaagaagccacgttcctgctctacaaaacggatgacgtattcctcgggtataggctgtccgttaatccggatgcgctcccggaaatccaccagatggggcgaggtatagagcccgaccctgtatcctgcctcttgcagtatggcggcaagcgtatgcgagcaggaaccctttccattggtaccagccacatgaatgctgcggaaactgcggtggggatgttcgaagtgtgcgtccagggtcagagtgttttccaacccttccttgtatgctgagccgcccacttgctgaaacatgggcacactgttatataagtaagttaaagtgtcctgataatccatcttttataatatttaacggagaagcaatcctttctccctattaatttgttatctttaaaagcgacaaagataatgcagaccgaacgcaatcaagcttgcttgaaattgcttgcagtgtagcttatcttaagcttatgcaaaggtattaacaatttaaatctaacgtgtatgggagctaagaaaaattttgtgattgatacgaatgtgattcttcacgattataactgtttgaagaattttcaagagaatgacatttatcttcccatcgtagtccttgaagaactggacaaattcaagaaaggtaatgagcagattaatttcaatgcgcgtgagttcgtccgtgagcttgatttgattaccgatgacaatctgttcaccaaaggggcgccattgggagagggcttaggccgtctgtttgtggtggcaggcatggtggactctccccgagtacgtgattcctttcccgaacgcatccccgaccatcagattctgtcggtagtggactggctttccaccaaaaagcctaaaatgaaaaccatccttgtcacgaaagacgtgaatctgcgcatgaaggcgcgttccatcggtctgctgtgcgaagactacatcaatgataaggtaatcaatgtggatatattcgaaaagtcgaatgaagtgttcgagggtattgaccctgcgctgatagaccgcatttattcttccaaagaaggactggacatcagcgaattcgattttaaggacatcattcgtcccaacgaatgttttgtgctgaagagtgaccgcagcagtgtgcttgcgcgttataatccctttgcccattcgatttgccgggtccacaagacaaagaattatggcattgaaccgcgcaatgccgagcagagctttgcttttgaggtgctgaacgacccgaacatcaagctggttgccctgaccggtaaggcgggaaccggcaagaccctgctggcattggccgccgcattgggaaaacttaccgactacaagcagattctcctggcacgtcccatcgtggccctatccaataaagaccttggattccttcccggtgatgccaatgagaaagtggctccttacatgcagcctttgttcgataatttgaatgtaatcaagcatcagttcgctgccaattcctctgaagtgaaacgcttggaggatatgcaaaaaagtgaacaattggtcatcgaggcattagcctttatccgcgggcgcagtttgagcgagacctactgtattattgatgaagcccagaacctgaccccacatgagattaagaccatcatcacccgtgccggcgaaggtacaaaaatggtgtttaccggtgatattcagcagatagaccaaccctatctggacagtcagtccaatggacttgtctatatgatagaccgtatgagggaccagaacttgtttgcccatgtcaatctggtgaaaggagaacgtagccagttgagcgagttggcaagtaatctgatgtagcggataccgcattttccggggtaaaactatttctatcccgctttccgactgttaaaaacgggggaggtgggatggtttctttatagacgataaataattgttataacatttttttatcgatttattgtctgttttgactaaaatagtgtatctttgcctcgcctaaaacaaaactgtcaagcgaaatgaagcgaaatttttttcatcggtatctttccgcgaaagtgcttccgatatggactattctgttaattgatgtatttatcatcgtcatatccagtctgttggcctatgctctccgatatgatttcagaagcatttttctggaatcatctaccattgacaagaccattttatggacggttgctgtcaacctgattttcttccgtgttttccgtacgtattccaatgtactgcgcttttcctcctttgtggatatcatgcgcatttttgtgtcattgacggtgtcgtatgcactgctgatgataacgagcgtcctgacggaaagctatttggagtttaacctggctccggtcagcgtgctgttcatgtcctatatcatcagctttgccatgatggcatgctcccgtgtgattgtcaagactttcttcgaggcgctgaacttcgacggcacccacagtgccaatgtgtttatttacggtgccaaggaagccggggtcaacattgccaaggcattgcgtgtcaatctgcgcaaccactaccgtctgcgcggattcattgcggacgaacctgagcttatcaataagatgatgatgggtgtcaaggtgttccccaacgatgatacgctgattgatgtgctgaacgaccgcgatgtgcagaccatcatcatttctcctgccaagatggaggaactgaagaagtctgacatggctgaccgcctgctggtgcacaacatcaaactgatgaccgcgcctcctttgagcgagtggaacggtcaggcgctgagccgcacacagttgaaggaaattcagattgaggacctgcttcagcgcaatcctatcgagatagatatccataaggttgcctctcatctggagggcaagcgtgtgatgattacgggcgccgccggttccatcggcagtgaaatcatgcgccaggtggcttcgttcaatccctataaacttattttagtggaccaggccgagacccctctgcacgacatccgtctggaacttcaggaccgttggcgcgacatcgatgccgagaccatcatagccgacatctccaatgccacgcgcatggaggatatcttcagggagttcaagccccagtatattttccatgcggccgcctacaagcatgtgccgatgatggaggacaacgtttccgagtccatccaggtgaacgtattcggcacgcgcaccgttgccgatcttgccgtgaaatacggtgccgagaagtttgtgatgatttctacggacaaggctgttaaccctacaaacgtgatgggctgttccaagcgtatttgcgagatttatgtgcagtctcttgcgaagaagttgcagaaggagggaggccatgccactcagttcatcactacgcgtttcggcaatgtgctgggttccaacggttctgtcattccccgtttccgcgaccagattcagcgtggcggcccggtgacagtgacccatcctgagataatccgttacttcatgaccattcccgaagcttgccgccttgttcttgaggccggcagtatgggcaacggcggtgaaatctacatcttcgacatgggtaagccggtgaagattgtggatcttgccaagcgtatgatcagcctttccggacgtacggatgtgaagattgaatttaccggtctccgtcatggcgagaagctctacgaggaactcttgaatgtgaaggagcttacaaaacccacctaccatgagaagattatgattgccacggtgcgtgagtatgactatgacgaggtgaaggagcgtatccagaagctgattgatgtaagttacacctatgaccagatgaaaattgttgctgccatgaaggatattgttccggaattcgtgagcaagaattcctgctttgaggcgctggataagaagaaataaaaagatagcggtatagtataaaatgaaagggtgataacgtcattgtagtgttatcaccctttcatttttattgtcttcttgtcagccttttgtctcattcatgtgaagagaagtatttcaagaactgtgtacgttcgaaagtattgactcccttcgggtcgtttacgttcagaatacctttgaactggctgatggtttccatacctttgcggtccatccacaagttgaggaagcggatgtattcttcaatgatggtagctgaattctgataaagcacactgcatatctctacggccgaagcacctgctaatattgccttgacaacgccttcgggcgagtggataccaccggaagcggcatagtccagcttgtttacggctgccgaagcgatgcctatccagcgcagggctttagataaatcggcttcgttgctgaatacgttgccggatacttgtatcattttctcaatgttgatgtccggctggtagaagcggttgaacagcactactgcggcggcaccgttggcatacagctggtctatcagagctatcggattggtcaggttgtcacccagcttcatgatgacgggtatcttgaccgtcttcttgatgtggctcagaatgtcgatgtggcgttgctcgaaactgcagtaagcatattgtacatccgtctgcagtgcaaggatattgatttccagtgcgtctgcaccggcctcttctattttggcggcaaattccacccagtcggcattctgatagcagttgatgctggctatgatggggatgttgcacaccttcttgctttccttaatcaagttcagatattcgcctaacttatgttcacggatatatcctacaagatagtcgctgccttcgggatacatattcgggtctcccagccagtcagcctccatcatgatttgctcttcaaagagtgattttagtacaatggcacctgcgccggcctcagatagtttctggttcttggcggcactgtctgtcagtccggagctgctgacgataatggggtttctgagtttcagccctgcaaaagtagtttctaatgttgccatgataatgattttttatggttaatagtttctttctccaaaaatcttgcttcctacacgtatcaaagtgctcccggctgcaatggcctcgtggtagtcgtgagacatccccatggacagttcccggaatgactctgcatcggcaaaccacttggctttcacttcattgaagaagctacttaaagaacaaaactcagttttgatttgttcgtcattgtccgtattcgtggccatgcccatcaatccgcatatccggatatgcttgagctctctccattcaccggctgccagcatttcccggcattcgtcaaagctgaatccaaacttggtctcttcccgggcaatgtgcagctgcagcaggcagttgacggtttttccggctttggcagcctgcttgtccacttcggccaacagcttgtaggagtctatgccatgaatcagcgctacgtaaggaacgatatattttattttgtttgtttgcagatgcccgatgaaatgccattctatgtctttgggcagactttcgtatttagcggtcatttcctgcaccttactttctccgaacacacgctggccggcacgatatgcttcttctatcgcctcgttggggtgaaatttggaaacagccaccagccgtaccttttcaggcagttcgctcagtacttgttttaaattctctgcaatcatcgtttttttgagttatgagttatgagttataagttatgggtcgcaataataactcataacttataactcatcactcaaattaaacttccggtttgtcgtcgggctctgcactgtacggatatacatccataatggcggtttccgctacagatgctatctgatagtcggccattgtgcctttcatgccctcatccagtttcttcactgcatcacgcaggtcggcagcctgcaccaatacctgggtagaggttttcttttccgcaccgcttttctcgtccagtgtgatgaaaaccagtttacatttaaaccagcggtcggcagattcctcttcgctggggaacaattcgctatagttggcacgtttgatgtccgatacggtgaactctcccgaaatgaacggcgtcatctcttcgatgatgcgtgcttccgcttccgtaaaactgagggcatccaccagatacggttcggtcaccttcttgttcattccattttccattgttttctcgtaacggatcttacattcaaaccatgtatgcattgccataattttctgtttttaattattgatttattgttagttaagctgctttatgcgtgcctatgcccaccaaaagcagtgcaaagatagccaaaaactaaatggatataaaaagttgccttgcattttacgtgaaaattttattggagaaccgggacggtacgtatgggcataaaaaaaggagtaccgctgtactccaacctttgttaaccttaaatctaatactatgaaaaacacattgcaaagatacg

SEQ ID NO: 4406 - DNA, 2416 bp, Unknown
  gut microbiota DNA sequence
attaaacgaacgtttattggacacttttatgagtctaatatcttctttaatagcttattatcattgcaaaagtgtacaatacggtttgggtgggaaaatgtctcgttcaaaccgcgaagcgcacccggaactgagctgattcattcgaaagaaaattcctaagtgactgaacaacagaaatattggtttgcagcccgcacccgtgacaagcaggaattcacagtccggaaatctctggaccgacttaaatcggaagaacatttggaccttgactattatcttcccacgcgttttgtcatttcacaattgaagtatcgccgtaagcgtagcgaagttccagtaatccgtaatttggtgtttgttcattccaccaagcagacagcctgcgatatttccaacatttataatgtcccccttttttatatgaaggatcttgccacgcattccatgctagtggtaccggataagcaaatggaggactttatgttcgtaatggatttgaaccctgacggtgtcagccttgatagcgaaattcttactgttgggcataaagtaaaagttatcaaaggcgaactcagcggtattgaaggtgaggttgccatcgaagccaataaaacatacgtcgttatccgtattaaagaccttttgacggcaagtatcaaagtccccaaatcctatctgaaaataatcgggtgacttctaaataagtataatcttatatttttatcatatatcataataatgaatgatttaacttcccgtgctcttgagcttcagcatgcagctcatgagctgatgtatcttggtatggacggtgagccggtctattccgacaatttttgccggttgaataaggaagtgcttgttaagtccgattctcttttttctgctcaaagttccgatgttgaggaagaggcgaatttgtgtctggctcttttgatgggatataatgctactatttatgatgatggggataaggagcaaaagaaacaaatggtattgaatcggatttgtcttgttttggagcagttgcctgcttctttgcttaaagtccgtttactaacttattgttatggggaaatttatgaggaagttttgcttcaggaagctcatgcgattattgaaggttggaatagagatgaattgactttggaacaaactgaaatcattgaagaattgaaaaatatcgaagagaatccatacccgtttgaggaagtagaataggatttgagtgtgataaagaaatcataaaaaatagataacttttattgatatgaaagcatgttttatggggttgggttatattggcctgcctactgcgattattgctgctaaacacggaattcagattatcggggttgatattaatcccaaagttgtagaaatgactaatcagggtaagttgcatatcattgaaccaggtatgcaggagcttcttcaagaagtcgttactaccggtcagttgaaggcttcaacaactccagaagtgagtgatgcctattttatggtggtacctactccttttaagggaaatcatgagcctgatatttcttacgtggaagctgctacccgtgccgtaattcctttgttgaaagagggagatttgtatgtcatagaatctacatcaccggtaggtactactgataaaatgtgtgatttgatatttggattacgtccggaattgagagataaaatttatattgcttattgtccggagcgtgttcttcctgggaacgtcatttatgagttagttcataatgaccgggtcattggcggtttgaatgaagcttctacagatagggctactgagttttatcgtaattctggaaaacttctgttagtaccttatacaaaggactttgggataattacccgtttttgaggtaatgacttggcaacggtacaatctgctgcgttctaccttgaattgctttcaagtaactcgtttctgtgtacaaaaataatagaatagtccgatgcacacaaggtacatcaaagaaaaagttcgactatttttttagtttgtttaatcgcattacaatcgaagtttgacttctacccattttgtttgcaatatatttgacactcttaccttcattgtgcagtttcaataaaaattggtctgcacttcttgtccatcttttattggcgttagggtgctttacatagctttcttctgacaccttttcggggtgcaagaattcatccacaaatacagacgggaaacgcttatcgtataatacaagcgtttttatcttagcccttgttattgcaacatagaataatcttctttcttctccgtatgggaattggtcgctcttagtgagcacatagttaagcacagggtcgtcactcacctgtgatgggaaaccgtatgtatctttattgcattgtaagagtattacataattcgctt

SEQ ID NO: 4407 - DNA, 252631 bp, Unknown
  gut microbiota DNA sequence
aacgactatgattttttagtggacactaatgatagacagtataagatgatacagaatcagagacctcctatccgtagaattgcttttcctattcttatagcattgagtatttcgcattgtttgaacgatatgctgcaatcggttatttcggcagtataccctttgttcaaggaggatttatccttgagttttgcccagattggtctgattacgttagtgtatcagatgtcggcgtccgtgtttcagcctctaatgggattgttctttgataagcgccccattgcctggtcattgccgataggtatgggctttactttggtcggtatcatgaatctggcttttgctactaatctgtattggttgctggcttcggtattcattgtgggtatcggttcgtctgtactccatccggaggcgtcacgtattacttttctggcttccggcggaaaacgcggactggcgcagtctctgtttcaagtgggtgggaatttgggaggctcgcttggaccgttactggtggctttgctggtagctccttacgggaggcatcacattgccttgttcacggtttttgccttgattgccatcgtggtgatgattcctatatgtcgttggttccgttcctacttgaaccacatcaagaaacgcccgatgcttgtggcaggaaagatagaacgccctctttcctcaaagatgacggtgtttgccataagtattctgctgatacttatcttctccaaatatatctatatggcaagtttgacgagctactatacattctatctgatccataaatttggtgttactgttcaggcttcacagcttttcttgtttgtcttcctggtagccactgccatcggaacattggtgggaggtcccgtaggtgacagggtaggacgtaaatatgtcatctgggcttccattcttggaacggctccatttagtatgatgatgcctcacgtagggcttgcatggacagtagtgctgagcttctgtgtcggtctgatgctttcttccgcttttcctgccatattgctgtacgcccaggaattgctacccaataagctggggttgatttccgggttgttctttggtttcgcttttggaattgccggtattgcttcggctgtattgggaggcatggctgataaatatggtatagaggctgtttataatgtatgtgcctttatgcctttgttggggttggtggcttgctttctgcctaatttgaagaggagataaagtttttttattcccattgtcagccatacggaaagaacgaaaggtgcggtcaatgtaataattccccaactcattcccacaatttgcaatacaacagagagtaaaacggaacatacagcccatataagctcatccagcttttacctcctaaagcaatggcacacaatacgccattatatcccatcaggcctatattcaaagcttcggaatctgctcccaataatatggctagggggagggggagaagtacccccaatatggtatatactgctgcattccgagaattcacgagaatgcctgcaaggaaaaatagtccggtcattatgtttccttgaaacatcacctggcctatactcatactgaaacattgtaagtaatttatggaggaagaagcaggtgtttctgtatcagagacgagtagcatgtcaggcatcagccaactgcacaatcccagcagcatccatacagaaaggataaaaagggtagtgaatccgggcaacatgcgttgcatgttgaaaaaccgtgcaatgtaggtagatgcacacgaggcaatagccattagtatcaaggaatttacagtcagatgcataaagacccctacggctattcctaccagtgtaccgttaaaaccatataatccattttttatatcatcacggtcatatcctgagatacggcctgtcgatgtacttattatgttgccacttacagccaataggcccatttgccatgaattcaaaaagattccaatcagcatcaataatccggacaatgcattgttttggaacatgacttgccctatgccacgtcctaaaataagtaatgacttgtgtgtaaaagcttctttcatgagttgtcgaatgaaaatggactatatgtaaatttatagctcgttaatacgtacaaaaaaaacgattagactaatctaaccgttttaatttttgtggagcgtatgagactcgaactcatcacctcgacactgccagtgtcgcgttctagccagatgagctaacgccccgttgccaacgtttgcaggcttgctttcgtttttgatggtgcaaatataatgcattattctgaaataattgctatgtttgcgaaagaatttgaaaaaataagttatgctgatatataataccacttatcatgtagaggaaggagaagacaaaaacttcctgatatggatgcaggaacactatcttcccgaggtagaaaagaacggaacattgtatgctccacgtatagcccgtatcttgagtcatattgaagaaggaagcatctgctattctgttcagtttgaggtggaaaactctgccaaactgcatcgttggcatcaagagcaaggagtgaaactgaacgaggaattactgaatatctttaaagataaagtgattggctttcctacattgatggaggtaatagtgtgatacaaccggtcaaagagaaaataatattgggtatagaccctggtaccaccattatggggtatggagtattgcgtgtggtaggtgtcaagccggaaatgatagccatgggaattatcgacctccgcaaatttggagaccactatctgaagttacgccatattcatgaacgggtactgagtatcatagagagttatttgcctgacgagctcgctattgaggcccctttcttcggaaagaatgtacagtccatgttgaagttggggcgtgcgcaaggcgtagcaatggcagctgctttgagcagggatattcccattacggaatatgctcctttaaaaataaagatggctatcaccggaaacggacaagcatccaaggaacaggtggcggacatgttgcagcgtatgctgcattttcctaaagaggatatgcctacttttatggatgcaacggacgggcttgctgctgcctattgtcactttctgcagatggggcgtcccacggtggagaaaggctatcatggctggaaagactttattgccaaaaatccggataaggtgaagaagtgataagaattgaaatgtagaatctaaaaataatatcatgaaattgaatgaacttgctatcattggagtggctgcaacgacgattgtaagctgcactcccgcgaagacggagtatgcttcgtacgaactttaccctgtccgttcgggtagtctgacagagatggaatatacacctgctgccacgcaattcacattgtgggcacctacggcagatgaagttcgcctgatgttgttcgaagcaggagatggagggcatgcctatgaaactatttcaatggaaccctctgaagaaggaacttggaaaactaaagttgaaaaggacttgatgggtaaattctacacattcaatgtgaaaatcaatgataagtggctgggggatactccgggtatcaatgccaaagctgtaggggtgaatggaaaacgtgccgccatcatcgacatgaaatccacggaccccgaaggatgggcagatgataaacgtccggcattggcctctcctgccgatgtgattctttatgaaatgcaccatcgtgatatgtccatcgaaccgtcgtcgggcattgagcataaaggaaagttcctggcactgacagaacaaggaacggtaagtcccgacaagctggcaaccggcattgaccatctgaaagaattgggggtgacacatgtacatctccttccgtcttatgactatgcctccgttgatgagacaaagctggacgagaacaagtataattggggatatgatccgcagaattacaatgtgcctgatggctcttattctaccgacccctacaaaccggatgttcgtatccgggaattcaagcagatggtgcaggctttgcacaaagcaggtatccgtgttgttctggatgtggtgtataaccatactttcaatacatccgacagtaattttgaacgtacagtgccgggatacttttaccgtcagcgaccagacggaacgtatgcagacggttcggcttgtggcaatgaaactgccagcaaccgtccgatgatgcgtaaatacatgatagagtctgtattacattggattaatgaatatcacattgacggattccgttttgacctgatgggtattcatgacatcgagacaatgaacgaaatccgtaaggcggcaacgtctgtagatccgactatatttatatatggtgaaggatgggcggcatcggctccacagatggcggaagattctctggcaatgaaagccaatacttataagatgccgggtgttgctgctttctctgacgaaatgcgtgatgctttacgcggtccgtttaatgacaatcatcaaggtgctttccttgctggattgccgggaggagaggagagcataaagtttggtattgtaggagccatcaggcatccgcaagtaaataatgactctgtgaattatagtaaggctccgtgggcggaacaacctacacagatgatcagctatgtttcctgccatgatgatatgtgcttggtggataggctgaaagcaagtatcccgggtattactcccgtagaattggcaaagcttgacaaactggcgcaaacagccgtattcacttcccaaggtgtaccgtttatttatgccggtgaggaagtgatgcgtgacaagaagggagtacacaatagttttgagagtcccgattccatcaatgcgattgattggagacgaaaggcggagcatgcagatgtatttgcttattataaagggttgatacagcttcgtaagaagcatccggctttccgtatgggtgatgcggatttggtgcgtaagcatttggaatttctaccggttgacggcagcaatgtggtggtttaccgtctgaaagaaaatgccaacggtgatgcatggggagatattatactagtcttgaatgcccgtaaggagcctgccaaacttaccgtacccgaaggtaaatatacagtggtctgcaaggatggctttatcaatgaacaaggtttgggcacactgtacggccccgaagttgttgttccggcccaatcggcactgattatgtataaatgatgattggatgatgcaacaacatacaatacacatagcggggggcgtagtacgcaacccgcttgttcgtttgacagagcctgtcacccttgatttcctggcaggagaacacattgccattgtaggaccgaacggagccggaaagagcctcctggtggatatgctgacggaaaagtatcctttgcgtgatggtgagcttacctatgatttctctccctccctcacgaaaactgcctatgacaatatcaaatacattgctttccgtgatacttacggttctgccgatgccaattattactatcaacagcgttggaatgcccacgaccaggaggatgctccgctagtacgcgaagtgctgggagaggtaaaagacgatgtcttgaggcggcagctatttgaacttttcagcatagagccgatgcttgacaagaaaatcattcttctcagcagtggggagctgcgcaggtttcagttgactaaagctttactgactgttccccgaattcttatcatggacaatcctttcatagggctggatgcgcctacccgtgaactgctttttaatttgctggagcggcttacccggctgggcgagttgcagattgtccttgtgctttccatgttggatgacataccttcatttattacacatgttgtgccggtagaggacatgaaggtgggcgaaaagatggaacgtgaggagtatgtgcaggcattctgtgcgggcaatcagatgcgtattcaggaagaggccggagcgttggaggaattgcagcggtgtattctcgatttgccctacgaacatgcgaatttcacttcggacgaagtggtgaaattgaacggggttagcatccgttacgatgaccgtaccattctgaaggagctggattggacagtgatgcgtggtgagaagtgggcgctgagtggcgagaacggtgccggcaagtctaccttgcttagtttggtttgtgcggataatccgcagtcatacgcctgcgatatcagtcttttcggacggaagcgcggaacgggggagagtatttgggaaatcaagaaacacatcggttatgtcagtccggaaatgcatcgtgcttatctgaagaatctgcctgccatagagattgtcgcttccggtctgcacgacagcatcggattgtataaacgtcctcatgccgaacagatgtcggtatgtgagtggtggatggagattttcggtattgccgccttgaaagacagtccttttctgcaactctccagcggggaacagcgtctggcattattggcacgtgcttttgtcaaggacccggaactgctgatattggatgaaccgcttcatggactcgatacatacaaccgccgtcgggtcaagaagattatagaggcattctgccatcgtcgggataaaacgatgattatggtaacccactatgagaatgaattgccgcaaacaattactaaccgtttattcttgaagcgaaaccgctgaccagataataattagtcaagcaaagataataaaggactagcaggaaccatttatggtgtaaatcgttatatttgtaatatcaaccatctaaacatttatatcatgaagttttttattgatacggcaaatttagaacagattcgggaggcctatgacttgggcgtactcgacggagttaccactaatccttcgcttatggcaaaagaaggtatcaaaggagtggagaaccagcgtaagcactatgtggacatctgtaatattgtgcaaggcgatgtgagtgccgaggtgatagctaccgactatgaaggcatgattaaagagggtgaagaattggcagccttgaatccgcatatcgtagtgaaggtgccttgcattgcagaaggtatcaaggccgttaaatacttctcgggcaaaggtatccgtacaaattgtactctggtattttctgtcggtcaggcattgcttgcagccaaggcaggtgcaacgtatgtttctccgtttgtggggcgtctcgatgacatctgtgaggatggcattgcattggttgcgaagattgtagagatgtaccgttattatggatataccacccaggtacttgccgcctctatccgtcatacggcacatatcatgcagtgtatagaggtgggtgctgatgtggctacttgtccgctttcggccattaagggtttacttaatcatccgctgaccgattccggtctgaagaagttccttgaagattacaaacgcgtgaacggataaacttaaaatatcctataagcctatctttcaatgtaattattgactaatattggtgagaaatagaataaaaagatttatttttgcaccttatatttagatatacaataaggcaccgatgaaagataggctcataggatttattaagacatactgcttgtttgtctgcatttttgtgttgcagaaaccactatttatgctgttttacaaatcgctgtatccggatgcctcgtgtgcggactggttcagtgtcatttggcatgggttacctttagacctatctctggctggttatctgacagctattcccggttttcttttcataacctctgtatggacactttctaaatcccttcatcgcatctggtgcggctatttcctcttcatttcagtacttatctccataatttttactgtcgatttaggattatacgagtattgggggttccgtttggatgctactccgttattctatttcttttcctcccctaaagacgcagtggccagtgtcagcatttggatggtgctggggggaattgtggcaatggctgtttatgctgtcgtgctgtatgctgttttctacggcatcttgctgcagaagaagctgttgctgcggatgaaactgccttatcgtcgcctgaaggtgtcaggtatattgttgctgatgacggggttactgtttattcctatccgtggaggctttacagtatctaccatgaatgtggggaaagtctatttcagtgccgagcagcgtctgaaccatgcagctatcaaccctgcattcagtctgatggaatctcttgccaagcagaaggacttcagcaagcagtaccgttttatggaagctgcggaggccgaccggctttttaaagacatgcttgaacccgcaggtgccggtggtcaaacggaagagacagattctgtgctgcaacctgccgattcactgcatactttattcaatactcagcgtcccgatgtactctttgtgattcttgagagtttttcctccaggttgatgacagctttgggaggtgagccgaatattgccgtccatctggatagcttgagtaaggaaggggtgctctttacgaacttctacgccaacagtttccgtacggaccgtgggctggtggctatcttgagtggctatcctgcccagcccactactagtattatgaagtatccccgtaaaacgcagtccattcctgccattgcaggcagcttgcggaaggcgggttatggtaccaagtattattatggcggtgatgccgactttaccaatatgcgttcctacctgatgtcatcaggctttgaagacattgtttccgaccaggattttcccgtaacggaacgtttaagtaagtggggggcgcacgaccatctcgtattcaaccgtctgctggaagacttgaaagccgaagctgccgaaggaactgccgaagagaaaactcctcatttccgtgtcttgcagacctccagcagccacgagccttttgaagtacctttccgtcgtctggagaatgaccggctgaacgcctttgcctatacggatagttgtgcaggcgattttgtaagacagttccgtgagcttccccagtggaagaatacggtgattgtgtttgttccagaccacttgggagcttatcccgaacatatcgacaatttgtcggtagaacgctaccggatacctctgttgatggtgggcggtgctgtccgagagccgaggcgcattgacgtctatggctcgcaacatgatattgcagccacgttgctggctcaattggcgctgccccatgatgagtttgttttcagtaaagatatgcttaatcccgcttcccctcatttcgcgttctttaccgtacccgatgctttcggtatggtgacagcggacaatcaagtgatattcaattgccaggcgggtactgtggtagtggatgagggcacagcaaaagggaagaacctgccgttgggcaaagcctatttgcaaaaattatatgatgatatagccaaaagataacgtatgacagcacttatggacgccttgcaaggggcaatagatgtagacacaaacatctttttttccatcaatcggatgcacaacatgtatttcgattattttatgagcgcttatagcggtaagtgggtttggattcccatgtatgctgccatctggtatgtgatgttgcgcaattttcattggaaggtcacactgttttgcatgataggccttgcgctcaccattacttttgccgaccaggcatgtgccacttggatacgtccctatgtggagcgtatgcgtccttctaatctgaataatcccatttcggagatggtgcatatcgtcaacaatcatcgtggagggcgttatggttttccttcgtgtcatgccgccaataccttcggattggcgtttttcctgttctttctattccgcaagcggtggcttactcttttcattatggcctgggcgttgctgacgtgctattcgcgcgtatatctcggtgtgcattatccgggtgatttgttggcagggactattgtggggctgattggtgcctggctgatttaccgcttgtttgtgaaggttagcggatataagcgtgtcgagcatgtcactcatgtctatgctcctatatgggtagggttgctgacgatagcggggatgctggtttatgccggaatacggatattgttgtagatgacagtctttagaactgataaccagcagtcaccataacctcccgtggacggatattcaaccgtgaagtatagctttgtgtggccgagtaggtagtataggcatactctttcttgttgaacagattgctgaggctggcttccactctccatttccttgtcttataaatgagtgatgcgtctacaaacagtgtgttgagatgcgtatcgctgtttaaatcgttccggtaatgttctccggaaaggcagaggtcgacgtgcccgatgctgaatgtgaggtgcatacgctgtacgaagtccagtagaggagcaaggtgcgcgtcgttccctattttactgccgccatagctgattgtggcatgatattcggcttcgaaagcttcggcgggcgaccatatcagtttgggttccatcttaagatagtcataacggtatttttgaggcgggccgtttccggctgtttccgtttgtggagtgagggcgtctgtatctgaaacctgtgtcaactgccagccggtattgcggctcagttgtaagtcaagtgaggttttcagattccagtcgaaaaatcccttggagagagtgctgagcaggaaccaactttgtgtactgttggaatgtaggcgaagggtgtggacaatgcggttttcagagatactctgttcattcaaggtgttgtagtgtacatgtcggtaggacaaagtggcggtggcgaaaaattcctgcacggtattcttgtattctccataaaggttgtattgttggcgtatactgacggggaagaggccgtcagtgtttttccaggtacggtagtctgtccgataggtaaaagggcagaggtctgtgacatctcctgctgagcggtgtaaactgccgtagagggaaattttccaatggtagtccggctgatagcgcagatagagtgacggattgaaaaagagaaaagaacgctgttgcgagaagtagcgcttatagctgagagggagtgacagacttccctgccacttgccttgctccaattggaagtaggaggagaggtagggagaaaaactggatgcgccaaatgtttccattcgggtggaatggtactttaccgatgcccattcgccctttataccggcggtgtattgccgggtgaaaccgttgtgttttcttaggtggctggccttattgtcgctgtaaaggctgtgctggatgaatttgtcttccccgtcgtgtagtgacaaggaggagggcagataggcatactgtgtggcagaattgaacttccatgtgcttttctctccattgcggataaggctgaagaaattctttgccgtaaactgggaggtgcgcatcgtttgctgcaactcgtgggaggtgccgcggttcgtttcactttctgccaggaagcggttcgacagatagtggatggtcttgttatcctcatagtgcatttccatatgggcggcatcgttctgcaggcagtagtggtaggcttcatccatgcgtatggtgtcatcgggctggtagtagacttgcgagttgccccgttgctgggtaatccggttatgggtatatccggcttgcaggcgcagggaacgttcgtcgttccatttatacatgcggttggcgttcagtgtatgggtttcgttgaagagcagccgttgcttgtcgaggggagcgctgatgcccggttgtaccagaaagccgtgcaggggaatctgttgggatgtgttgtttgtcagtatatgttgctcacggctaaggtcggtaccgttgttgttgctcttgtagccgtagatgctttgcttgcctttacccagttggagggcattggcggcgttttcccaaagaagcgttcctttgtccctcttcgtttgtgccgttccggtcgtttcttgtgttccatcactccagcctgcacccagggtaccgttgacaatccattggtcgcgtgcctgtgggtcgagtttcaagttcagggctatttcatccgaactgagttttcctttcaatgccttgaccgattggtagttctccataatttctgccgattttacggctttggcactgaggttgttgttgatttggctgtagcgtccacccgtcacgtccataccctccacaaaatagtggtcgatggctttacctttatatttcacctgcccgttgtcgtcaatatccacaccggggagttttttcagaacatccttgatgtgtacgtccttggaagaggcaaactctgccagattataccttacggtatctttcctgccatgaatgcggccgggacgtatttggacttctttcagtgcaatggcttcgggatgcagacgaatatggagtgttcctgctgccgatatgttgcgtatttcccgtctatagcccagcagtgatacgctgacttgcaggctgccgttgtatttccatggcagggaatatctcccccgggcatcggtcagggcgtaatctatcatggtgccgtttcgcagcacactaatcattacggcttccagcggttgtccggtttcttcgtccgttaccaagccactgagagactgtgcatgcgctgtcattgcaaacaaggcaaggattggcagcaagagtttcttgaagtgtatatccattggagttcgatgggatgaatcagtcaagttccagcggattgtgggctatattcttcggcttcctggcttcattgccctggtcgtcgcgtatggtgatacgtacgttgggcgtgttgcccataatgaatcctaccgggtcggcataatatctttcgtggattttgttgtacgccttgcggtttacgggttcataatcttttccgttgaagaggataggtcggtaggaatggcattgctccataccggtgcaggtaaagagataatgccccctgttgtcttctgctttcagtatcagtccgggcagtccgaacagcttccacggcccttcgctggaggaaatctccggactgtaccagacaatccatctgcgtcccttaaacacgcattctgctttttggcagagatacgagaggatggttgccgtgtctgtctgcagcgtccactgtggacgctcttccggttcctcgcaccggagtctgttgatgtctccggcaatttcatccagtgtggtcactttgcctacggggtatctcttgtaggtctgttcgttcagcttgctttttctgaactgtttggcgtgttcaatcatcgtttcttgcgaggcgttattggcaatgtcggcagcaaataccgagtcgcccacatactttgtgtaactgtagaacttggagcatttcttgccgatttccaacatcatggtttcctggaaacgctcttccgacagtgtgtccgtacagccgtccacttcatactgcaccatgagtacagcctggtctatggtatcttttctgaacgtcttgccggagccgattttgatgttgaactgtgcgcaggcggttgcggcggttatcaacagcatggcggtgagtagaatctgctttttcatactttttcgttgttagaaattactgtttcgaggacgtgtcatgtgtcctgtcgtcgcaaatctatgcagaatttgtctttccggagtgagaaagttattactgaaatgttactcaaatgagaataaccgcctcgcgcgtacctctgattggaggaaacccttacctttgtatagtataaaagaagaacagactctgagatggaaaaacgaatcagaatagtatgggcattgtcactgatctccatgctgctgcttgtagcagggcagggatattggttgtggaaccagtatcagtataagaatgaggaatatgaagaagagatacaccgccttgtcatggatgccgtggcagtgaacgactctatccggcgtgaacagccgaagaaagtgttcaacaagcctaatatatcctttttcaacaccaatgtggacatgcatacggatagggattcattgaccaacaagctcaaagagcgctatacgcgtacgtttgtggtgggggccatggcagataaatccgttctatccacggcaatgaaggatagtattgtctataaggacaagattgtgatacatggcgaagacaagctgcttttcaacatgagcttcagcgaggcgatagttgcttatcagttgcagatagatgtcccttttacgttgcagcgcttcgattcggtgctggcgactaaactggacggcatgtctttcactaccggactagtcacgccgcgcgacagcctctatcaatgggtggaaaccgtagaacggctggggagtgatttgcatccggtcatccgtctggtttatccttacaatccgctgaagcgggagttggtacaagtggatgtgcaggtgatgccgcatactcttttgctccgtatgggctggcaacttctgggcagcttggtattgattcttctgctggctgtctgtctgctgttccagataaagaccattttgaagcagcaccgtgtggacgagttgcggaaaagctttgtcaacaccatgatacacgagttgaaacgtcccgtgcaggccttgaagatgtgcgtctcttttctcaatgacaaaacaatgcgtaccgacgagcaggccatggatgaagtggtgcgtgattctgtttccgagctggacaacctttccgcctacctccggaagctgcgcgacatgacccgtgctgacgatgagcagacacaactttccctcagtactttcgatttgaaaccggttgtggagaagttgatacgcctgcagcatgctcctgagggaaaacaagtgtctttcgagacacatttcacggacaacctgctggttacggccgaccccgtgcacatggcaaatatcatcagtaatctgatggaaaatgctgtgaaatattcgggaagctccgtcagtatccgggtagaatgccgcctgcatggccacgagctcacattgaaagtttccgatgacggcattggtatccctgtttccgagcagggacgggtattcgataagttttaccgtagcagcaacttgcctgaccgttccttgccgggcatcggtttggggttgagttatgtcaagttgttggttgaggctcataggggaaccgtctttctgaccagtcagattgggagggggacgacggtggaaataaccattccacaataatctgcacagatggatattgagaatataaatagcaactcatgaaaccactgaaaattctttttgctgacgatgacctgaagtattccatgcttctgaaacgcttcctggagaaagagggttatgaagtgacctatgccggaaatggtcttatcgccctcgaccagtttcctcttgtcaaaccggaccttgtcttgcttgacatcaatatgcccgggctcaatggctttgaagtggcaaaacgaatccgggaggcggacaagcatgtcctcatcttttttctttccgaccgcagcgacaaggctgaccgcctgcaaggattccaactgaaggcgaacgattatcttgccaaacctttctatccggaagagcttacggcgcgtatccgcgagcgtttcacttcgcagttgtccggcgtggcagaggatgagatgtatgctttcggccattccgtattcaattacagtacgaacgagattcgtacgggaaatagtaaggtgctgattacttcccgtcaagccgatatccttcgcttgcttgcgctgaatgtgaataagactgtcagtcgcgatacgttgctggatgctgtgtggggcactgcctcgtatgccaactcccttgccttgaatgtacagatgtcctatctgcggcggtcgctaaaaaacgacccgagcgtgaggattgagtcgttgatgaaaaaagggtatatgcttgccgttctctgaaaacatctttatctttggattgttatacaaacaagacatttcaaaaaaaagagagcttatgatgagtttaggaggatggatgaataaaatcttgataggttgggggatagacccgaagtttgccgatatgtttgacgagacgattattgcactgctgatggtggggctttcgatagggctggactatttgtgccaggcaatcttcgttggcggtatgaagcattatacccgacgctctccccatcagtggaatacgttgctgatgaaacgcagggtgatacaccatttgatacatattctgccgggaatcctcatctactacctgctgcccatggcctttgtgcgtggaaaggagatgcttgagttctcacaaaaggtgtgtgctgtctatatcattgtggcggtgctgcttactattaacggcttgttgctggtactgctcgatgtttataacatgaaggacaagcagaagaaccgtccgctgaaaggcttcgtgcaggtattgcaagtgctgctgttttttatcggaggtatcatagtggtttcagtgctgataggcaagtctcctatgaccttgtttgccggtctgggcgcatctgcagctgtactgatgctggtatttaaggacagcattctggggtttgtggccggcgtgcagctctctgccaacgacatgttgcggataggggactggatagcactgccgggtggcgttgccaatggagttgtagaggagattacgctgaacacggtcaagatacgcaactgggacgaaaccatctcgaccgtaccgccgtataccctggtgaacaactccttccagaactggcgcggcatgcaggaaagtggcgggcgacgggtaaacaagaatatctttctggatatgactaccttgaagttctgcactccggaaatgctggataatatccgcaaggaagtccccttgatggccgactatcagcctgcagaaggagaggtgccaaccaatgcgcagctctatcgtatctacatcgaacgctatttgtgcagcctgccggtggtgaaccaggagatggacttgattatcagccagaaggaacccacgacgtatggggtacccatccaggtatatttcttctctcgcaacaaggtatggaaagagtacgagcgcattcagtccgacatcttcgaccacttgctggtgatggtacagaagtttgacttgaaactgtatcagtattccgactaatatatcaaccggaactccgcatatacaggcaagtggtcgctgtatcctccttgatacttcatcccgtagtaggtgcggaagggttgctgccctccgtatttcttgtctcttgtcagtaggaagggcaggcagaatacgtctgccttcgcttcctctgtatatagcggtgcgtgttcttgcagcagcgtacccgatacgatgatgtggtccagcagtccccattctccttgatacttgtagctgccgaagtgcttgcgtgtcttggtttttcttgccagtagatggtaaagtttttgtggatgtagagagtcttgcaatgttgacggtgctgctgcctccaacacctcctttaccgatttattctccggataatcgttgaaatcccctaaaaggacaatttgcggatgtcggcgtatcgtgtataggctgtctatggcatgcttcacctttcgggcagccagtagccggtaaggttcagactctcttgcccctcccgaacgggatgggaagtgagctaccagtacatcaagcgtatcccggttcagcaacaatccgctgacgtgaagaatgtcccgtgtgggacggctattcttccggggcttgtctacggggaggctctgataggaaagcagtttgaaaagattacgttgatacaacagcgctacgtcgatgccgcgttcgtcgggagattgtgtcatcacataccggtagtctgcttcgcgcaaggcagagtagcgggtaaggtcgcgcatcacactgtcattctccacctcacacaaggcaacaagggcggacggcgtccatcctccggtggcgatgatgacgcgggctatattatccagtttctttctgtatttagagtaattccaatgccgggtggcatccggcaggaactcgtagtcattctttagtgtgtcatgtcgggagtcgaataggttttctacattgtagcttactatccgaaacgtgagggtatcttttccttcttgcccgtacagactgatgtacgggcagagaaggaagagtataactcctatcttatggataacgttcatacaaacgattcccgttcccctttaaggaacgcgggatatttatttcaccggaatgtgcttcagtatatccagcagatggtcccagaacttctgtacggtaggaatcagcatccgttcgtcgggagagtgcacaccctgcagggtaggtccgaaggaaatcatgtccagtgccgggtatttgtcaaggaacagtccgcattccagacctgcatggatagcttttaccttggcatctacaccgaacaaacgtttgtaggactcaacagccacttccaggatttctgaatgcgggttgggcttccagcccggatacccgtcgccgaaggatacggctgctccacccatttcgaatacagtacgcaccatattggcaatgtcttgtttggaggaggcggtagagctgcgctggctggtctcgatgcggatgatatggccggatttcatctttacggaggccagattggtggaggtttccaccagccccggaatgtcttggctcatggcatacacaccgtgaggtgcggcatagatggtttgcagcaagcgcttggcggtatctttgtcaatggctttgggacgggctgcttccgattcgagtacgaattggaggtccgggtcaacgacggcatattctgcctccacttcggcggcaaagacattcaagtctgtgcgcagggcatgcttgtcggcatcgggtatggcaattaccgcgtgtgcttcgcgggcaatggcgttgcgcaggttaccaccgtctatttcgcaaaggtacatgtcgtacttctgggatgcctggctcaggaagcggttcagcagtttgttggcattgccgcgccccaggtgtatgtcgccgccggagtgtccgcctttcagcccctttacctgcactttgcagcagaaataccctgtcggtacgtccacttcccggtaggtgaattcggcaacggaatctatacctcctgcacagccgatgaagagctcgccttcatcctcggaatcgaggttcagcagaatgtctccgttcatgaagccttctttcaatgcaaaggcaccggtcagtccggtctcctcgtccacggtgaagaggcattcgataggaccgtgctcgatgctgtcgtcggcaaggatagccagttcggtggctacaccgatgccgttgtcggctcccaaggttgtacctttggctttcagccattcaccgtcaatttcggtttcgatagggtcggtcaggaagtcgtgcttcacgtcgttgttcttttcacataccatgtcgatgtgcgattgaagtacgacagtcttgcggttttccatacccggagtagcgggtttctttatcagaacgtttccggcttcgtccaccttcgtttccaacttatgtttttctccgaatgcttttaagtaagcaatgattttctcttccttcttcgaagggcgcggcacttggcagatttcctcaaaatagtgaaatacaccagccggtttcaagtcttttttttccataattatctgaattagcggctgccttacatgtgtttatgcagccttcattatcaattgtcaaatatcaattctccattaaattaaccacttattgctaaatatggttaaattgattgactattttattcccctttctctttttttagagtaaaaaaggcgagttagtccaaccaaagccctatatttgcacccacaaaaatagtaaaaacactattttcatgtaacaaaattaatggaaatgcttgatacaatattgataactctgttaatagttgctatttgcattgttttattgggtgtgaaggtcttttttgtgaaaggcgggagattccctaacgggcatgtcagtggcaataaggcaatgcgcgatagaggtatcggttgcgtgcagtcgcaggatagggaagcgcaacgcaagtcccgtttttccattgatgaactggaaaaagccttaaacgatagtatgaactaattttaaaaaacaatatttatcaattatgaagagattaaactacctcatgaacggtctggcagctctcgcactgatcgttttatttgctcaatgtgccggcaatactgataaacagacgacaagcgctcctgcacaagccggcggattatcggaaatgaaaattgcttatgttgaaatagatacgcttttggcaaaatacaactattgcatagacttgaatgaggctatggtgaagaagggcgagaatgtccgtctgacattgaaccagaaagccagcgaactggagaagcagaagcaggaattccagacaaagtatcagaacaacgcttatctttctcaggagagagcacagcaggaatacaaccgcattgcaaagttggagcaggatttgcagaacctgagcaacaagctgcagtctgagctgatgagtgagaatgaaaagaacagcctgcaactgcgtgattctatcaatgctttcctgaaggagtacaataagacaaaaggttacagcatgattatcagcaatacgggttttgacaacctgctctatgcagacagtgtctacaacatcacccgtgagattctggatggtctgaatgcaagatactcttctccggtgaagaaataatatttatcctatgatataaaaaaggatgtgctgaaaagtacatcctttttttataggcctctcccccgacccctcccccgtagggaggggagttttgaagtgtttgtattttgtaggactatctctgtccccctccctacgggggaggggctaggggagaggcttttaatgctccgattgtacgctttacccgctccgcagtagtgatggtgtgtgtgtattcatcaatatgtaccgttcctcccatagagacggcggaattgtgatagagcatggagctttcgatattttccctggcggagaaatgaaactcgcggataccggtttctcgggcaatgtgggctatgttggcttcattcaccccacagcctgccaatagaatgattcggcctgatgcttgttgttggagctctttcaaaaggggaatgccttgctctgctgtagattgctgtccggaagttaggatgcggttgcatcctaatgcgataatatcttctattgctttttgtggatttctgcatacatcgaaagcacggtggaaggtgacggacatcccttgtgaggctttcataagctgctccatcaatggaatgtctacatctccttctgccgtcaggcaaccgaacacgactccgtcagcgcctaggcggcgggcattctctatgtctttcagcatgatgcgctgttcggtggaggagtaaaggaagtctcctccacggggacggacaatgatatgcaatttggtctgctgcaatacttcccgtgcgatgaggatatcgccgtatgagggggttgtccctccctcggggatgcctgcgcatagttccacccggtctgctccgccggcttgtgcggcaatacaactctctacggagttggcacaaacttcaaactgataatctttcattttgtaaagttatggttgtggtgcaaaaataagaaaagggtgaataggaattcacccttttctgcatttattttcttttctgatgttactttgcgtagctcaccgcacgtgtctcacggataacggtaatcttcacctgacccggataagtcatttcgtcctgaatcttcttggcgatttcaccggaaaggttctccgtctgcttgtcgtcaatcttgtctgcaccgacaatgacacgcaactcacggcctgcctggatggcatatgtctttgtcactcccggataggacatggccagttgctcaaggtcgttcaggcgcttgatgtatgcttctacaatttcgcgacgtgctcccgggcgtgctcctgaaatggcatcgcatacttgtacgattggggccagcaggctggtcatttccacttcgtcgtggtgggcaccgatggcgttgcagatgtctggcttttccttgaacttttctgccagcttcataccatagagtgcatgcggcaattccggttcctcatcgggtaccttacctatatcatgcagcagtccggcacgttttgctttcttcgggttgagtcccagctctgatgccatcacagcgcaaagattggctgtctcgcgtgcatgctgcaaaaggttctggccgtatgaagaacggtatttcatcttaccgataatgcggataagttccggatgcagaccgtggatgcccaggtcgatagtagtacgtttaccggtttcgatgatttcctcttctacctgcttgcgtactttggcaactacctcttcgatgcgtgccgggtggatacgtccgtctgtcaccaactggtgcaatgccaggcgtgcaatctcacggcgaaccgggtcgaaagctgacaatacgatagcttccggagtatcgtctaccacaatttccacaccggtggcagcttccagggcgcggatgttgcggccttcgcgaccgatgatacgtcccttgatttcatctgattcgatgtggaatacagttaccgagttttcaatggctgtttccgtagccacgcgctggatgctctgtatcacgatgcgcttggcctctttgcttgccgtcagcttggcgtcgtccatgatgtcgttaatgtaggactgggcctgcgttttggcttcttcctttagggattctaccatgcgctctttggcttcttcggcagaaagtccggaaatggcttccagcttttctatttcctggcgctgcatgtgctccagttcttctttcttcttgtctacgatggacagttgggcttccagattttctttcacggcttctgcttccatcttcttgcgctggatttcttcctggcgttggttcagtaccaattcacgttgtttcagcttgttttctgcctgctgtatcttttggttacgttgggccacttctttttccaagtctgccttcttgttcaggaatttttcctttacttccagcaacttatttttcttaatcacttccgcttccgcttccgcatctctcaggataccgtcgtatttgtttttcagcccgtgcttgaagaacaagtacgaggcaaaccctccgacaatgaagcaggcaatggataatactattgtaactactgtcattttattaatttgtttttagtgtataaataaaaaagcactgcataaaagcttgctttgatgaagggcaaacttttgtacagtgcgcgaatttctctcttttaccgacccgacggagggattgcagcttattgttccttgaaataggtctccaatacctctgtcagttcctttattttggtggtatagggttcagtatcattacgatccttcaactgaaggttttctaaagcgaactgataggccaccatggctataattctctctagagatacattcagataatgctcccgatacgcattgagcctgatatctacctgcttggcggcttctcttaccatttcctcgtcctcacggttgattgtgagagggtaggaggctcctgccatctgcaggtttatctttatcttatcgttcatacatcctcttctctttattcattcaacaaagcgatgcatttatcgacttcacgcactaatttggacaatcgcagtttcgtctctttcacgtcgctgccgttaaggctgattgtcgtagctgtttttaggttcgtgtagttaagttccagttcccggtattcagcttgtaccttcccgtattcctcctctttggcttcaagaagttgctttagctcagcattttcgcgttttaattcatcgtgcagatagattaaatgccgcagtctggcttcaaaggtacttaatagcttcttttcttcgtctgtcatcactacaccaaaattgtacacaaaaatacaatttacttggagattacaaaaacttttcggagaaaatgtgttgtagaagtgccgaaataaccgaaatggcctatgaagtactggttttgagggattgaaaaagggtggcggaggctggcttttcaagagatgtggataggtatggaacaatttgctttttagaaggattttatttcttgcttttcgaaagcttagtatctccgttactaaatagtaatcgtccgacagttgttggacgataattaaacagatgttggacgataattgaacggttgttggacgattactgtttagtaaggccgaaattactttttgctgttttaggcactactctttaggtgcggttggaatagtatgtagtaaaggaaggaggagatgctaagaaataaataaaataatttatataataatttggtttataaaataaaccttttatctttgtatcggagttcgaacccgaaatgtgattttggtatgtataacttaaagagaatgattatgaaaacgattgtttgtagaagtatggcggcagctcttctttgtgtatttgcattgggggtgtctgcgcaagatgttctgaaagtgaaggtgatgaacataccttctgctgtgggaaagataatgattgccactgacaaggggcagtatggtatggtagatgccaagggcacggaggcggtactggaactgaaagatgtgacagtgggtaaatataagctttatgtctatcatgatgaaaacaacaattatcagttggatagggaagacggaattccatctgagtattgcgcgatagcggatgtggaggtgagcgccgacacgaagcaggtggagatagcacttaagcgggtattaaaaggaagcaacaaataaggcggcaggaaaatggaagaaagaaaattgaatgagaaagagagtttagaactcatcactcagatgatacagaacacgaaggacagaatggcggaaaattcagggacaccttttttgctgtggggatatgtaacggtaattatctcgttgctggtttggtttctattgaaggaaacgggcaataacaattggcaattcctatggttcctgcttccagtcatagcctttcctgctacgttgtggagtcagcggaaggctcggaaaatgttgaagacctacatagaccgtgttgtggattatgtgtggacggtatttggactgggcgctttcttggtatcgtgtaccgccatatttgtatggaagattcctattctgtttgtcattttgctgatgatggggatgggaactgccctgacgggactgattgtgaacacgaaagtggttacgatagggggagtgctgggagccttgctctcgttgggatgtttctatatgcccggcatagaccagatactgttttttgcattggcgttcgtctttatgatggtgattcccggacattacatgaacagtgtggcgaagcgtcacaaacaataaaagaagaggatgatatatgtttaaagaactgaaccctttgctccatagcgaactgcggcttgcggtgatgtcgttgcttattagtgtcgaggaggcggactttgtctatatccgccagcagaccaaagctacggcaggaaacctgagcgtgcagatagacaaactcagcaaggcgggatatgtggaggtgacaaagacttttaaaggaaagatgccttgtacgatttgtaagatcactccgcaaggagtagacgcatttgaggaatatgtagagtcattgaaatcttatctggcagggaggttgtgagtgtgggtgactttacatttatggggcaaagatggaaatcttctgaaaaaggtttctatctttgcctttttcatgagaaggaggagggtgtgtcatcaaccgttttgccaccctcatgccggacaaaatttaaacagactctaaaaagatagaatgatatgagaattttagtcacttatgccgtacaaggcgaatttacggaattgaaatttcccggactgataggggaggaagaggtgcagataggctatctccgtaccggtgtgggaaaggtgaaatcggctttttatctttctgaagcgataagccatgcgcaaccggacttggtggtcaatgtaggtacggcagggactatccgtcatcgggtaggagatattttcgtatgccgtcattttgtggaccgtgatatgcagaagctggtggagcttggtatggagtatgagattgattcaatggatttgttgtcccaaaaaggatattgtttacactggtcggcaggcggtgtatgcaatacgggggatactttcttgacagaactctcggatgtgtccggtgatgttgtggatatggaagcctatgcccaggctttggtatgccgtgccaagaatgttcctttcatttcggtgaagtacgtgacggatattatcggacagaactccgtgaaacattgggaagacaagcttgccgatgctcggaaggggttgggagaattcttcgagaagttaggaggagtttagcacatcatttcaacgtcttgaatgacagtatatgccaagtcacccccacagcgacaaggaacaatactatctttatttctgttagtggaatcaggaagaagatgcagtaaaccattgttccccacatcagcagtagggagatgattttggcacgtagtgggatggctttgttctcgcggaagctgcggatgtagggaccgaggcatttgtggttcagcaaccattggtacagtctgggtgagcctctgaagtagagtgctgccgtgagcagcaggaaaggcgtagtgggcagcaacggcaggaagatgccgatgatgccgagtgtcaaagaaactgttcccaaaatgatgcagacggttttcatgcggcaaatgtaggaaaaataataatatagataatatgtatgcgaataaagtaaagaaggttgttgccgtccacgacttgtcgggagtcggacgggtgtctctgacggtggtcattcccatcctttcgtctatgggtttccaggtgtgtccgttgcctacagccgtattgtcgagccatacccagtatccggagttctcttttctggacttgacggatgaaatgccgaagattatttccgagtggaagaagctggaagtacagtttgatgccttttataccggctatctgggttctccgcggcagatacatattgtttctgactttattgatgacttccgccgaccggacggtctggttgtggtagacccggtgttgggcgataacggacggctttatgcgaacttccacgagtccatgattgatgaaatgaaacatctcatcaccaaggccgatgtcgttactcccaatttgacggagctgttctatctgctgggtattccttataaggagatgaatacggatgaggaattgaagtcataccttcgccagctttccgattgtggtcccgaagtggtgattattaccagtatacccgtacgggatgataaacataagacgtccgtgtatgcctataaccggaacggtaaccgctactggaaggttacgtgtccttacctgccggcccattatcccggaacgggggatacgtttaccagtgtcatcaccggggcactgttgcaaggcgacagtttgcccattgccctggaccgtgccacgcagttcattctgcaaggtatccgtgctactttcggttacgagtacgacaaccgtgaaggtatacagcttgaaaaggtgttgcataatctcgacatgccgattcaaatctgcagctatgaattaatttaaaccaatctcatcttatgaaaaagaaaatattcctgacagtgtttctctgttgcggcatgtttgcagcaatggcgcagactgctgccgactctcttgccattgtttctgccaactggcagactgagcccctgcagaaagggatgctgtataaaaaggcagtattcagttctttgtatggagttcctcaggaagtgtccatttttgaaatatccccgaagcactaccgtttcgatgtgctcgtccacaatcccaaggaggagaccagtgtagccgcccggcatgcaggtgcggtggcggccatcaatggctcctattttgatatgaaagccgggaattccgtctgctatctgcgtaaggacggggtggtgatagatactacctctactggggttctggcaacagtgtccaatggagctgtacttataaagaagggcaggctggaactgattccctggagcaagcaggaagaaaaggcatgtactttgaaaaaaggcactgtgctggcttccggtcctttgatgctgaaggacgggcaagtgtgcgacttgtccgggactaaccggaattttgtagataccaagcatccccgcagtgctgtggcgctgacaagagaaggaaaaatcctgcttattgtcgttgacggacgtcggaagggaaaagcggaaggcatcaatatacccgagcttgcccatatgattcgtgtattgggtggggaggatgcgttgaatctggacggtggcggttcttctacgctgtggagtggggagttgccggataagggaatagccaataccccgagtggcagcgcagagcgtaaggttgccaattctctttgtgtgtacgaataagttagggaagtgaatggataaatcttaagttttttgtaattttgccgtcgcatcgaggtgacattagatgcggcaacttattatattaattagcgtattaacaatatgtacacagtcatcaaacgtatggaagtgtcggctgcccatagcctgaaactttcttatcgcagtaagtgtgagaatctgcacggtcacaactggattatcactgtctattgccgttccaaagagctgaatgcggacggaatggtagtagacttcagtcacatcaagcaggtggtaaaggaacagctggaccaccataatcttaatgaagtgctgtccttcaatcccacagccgagaacatagcccgttggatatgcgaccagatacccacttgcttcaaggtagaggtgcaggagtcggaatcaaacattgccgtctatgaggaagattaatgagatattctacagtttgcagggagaaggataccatacgggtaccccggctgtctttatccgtttttccggttgcaacctgaagtgcctcttttgtgatacgcagcatgaggacggcatactgatgtccgatgaagatatcgtaacagaagttagtagataccctgccgctaccgtgatactgaccggtggagaaccctccctttggattgaccgtgaatttgtggattgtctgcaccaggcgggaaagtatgtctgcattgaaacaaacggtacccgtccgctgccggataatatagattgggtgacctgctctcccaagcagggggtaaagctggaaattacgcgtatgaatgaagtgaaggtggtgtatgaagggcaggatattactgtttatgagcagttgcccgccgggcatttctttcttcagccttgctcttgcagcaatacggccgaaacggtggattgcgtgatgaagcatcctaagtggagacttagtttgcagacacataagctgatagatatccggtaggcatttataaaacgaataatggctgtaagcaatacttacagccattattcgttcatgcacgggaggagaggctcgaactcccgacacccggttttggagaccggtgctctaccaactgagctactcccgtgtttgcggctgcaaaggtaatgcaaactttcaaatatgcaagtaacggacgtacttattttctatagaaagttgcttacaacatctgtaagtcctgatacataatgcgatacgctgctgcttttttttccagtgccagcgggtaggctcttgaggaagaaggcatccggtagaggcgcatcggatggttttcgaaaagaaactccgtgaagtcgcctactttgggcttgtcgatggaaaactgcgtgcacagcgtgtccgttgccttctcgccggtggtgacgatagccttgcattgcggtatccggtgtagcagggcagggacgtccgtgggttgcaccacttccagaaacttatccgaggcgttgtcctgcaggcgccgtatggcagaggctgtgtcgaacaaggcaatacccttttcctgcaggaaactgatgaggcgttctttgcagaaagccttcttcgtcttgtttataaaataatccttgtcattgaagaaaaggaacccggtaatcctccacatgtcattgttccagttggggtagtaaaactccatggaccaccgctttttctgcggaggaaagcttcccagcatcagcagacgggcgttgccgggaaggaagggttctaaagggtgttgttctatttccatactttccaatttcattgttctgcctgcaaaagtacggaatatatcttggatatgctatcctgcaatgtcctgattgctcattctgtcggtgatttggaaggggaaatcaggatattcgtagaggctgaaccgggattctgtcttgccttccgtatagttccagatggtggcatattcttcggcgtcttctcccatggcctgcagttggcggaggtaggaggctatggacttgttctctacgatatatatttgccccaagcggtctattatcgggctgtggcggcgagtattgtcgtggtcgaaccgcaagatacgcttgccctcgggggtgatgcctaccatgttgaaagtcatgctcttgccgatggcgggcaggttgagcacattgcggtcggtggcgaggaaaggcaggtggtgtgttttcaggaaacgccggatgcaggctgccgggtcatggacggttccaagcagtacggacagattatgggcatcttccttggtcagctttccgaagcgcttttcttcccattgctcttgtacggaacggctgttgggggtaaacacggcattgttttcttcaaaacctttcacggagaaggtgtagtagcaaaccactcccaactgattgagcacttgccgcaggcgggtggtatgcccccggcgggatgcagctacgttgtataccagttggttgtcaatgagccagcctgccgccagcagtttgcgtattccttcggcagcttccggagtgacttcgagtggggtttggaaatgtgtctggataatgaactggcggatgccgatggtagacgccttttccttgaattcccttagaatctccaccagcccgtcattgatgcgcatgggcaggtaggcggggaggcgtgagccgaggcgtacacgttgcagctctgcatacttttctccttcgggccgttcctgattggctttccgcttgcggactgccatgcggtagacggcatccagaatattgcccagcgtcttgttttggctcatcagtgcgtcaccgccggtgatgagaatgtcccgcagttgcgtgtcttcctcaaaataggccatcagccgacgcagcttcttttcccatgtctccttgggacgcagggtgtcaaactcaaaattgagccgtttgctttgaaagtcgtacatacgctgacaagatgcgcagagtcctccgcaggcgcgtcccatggtgtcggggatgaggatggccacttccggataacggcggtggatgttatgcccgtcgggcagcagccagccggcggcgttgggtttacctggttctacgatatcctcccgttcccaggcacgtatctgtccgtaggtttccaccagttggggtgaatagagtatatagctgcgcagggcctcgtcgtcgtatccgctgccggtgcagttcagcagtgacagataatagggggtggcgaagaaaggcattcccttcttgcgggcttttgagagcaggtacatggtttcggcagaaagggagttgccgagaagacggtttagctccgtagggcttttgacggccatggcaagatggaaacggaagtcattccaccattcgctgacgaggttgaacttctcctcgtagctgagtccctcttcgaaatggaagcgggaagccgggttcttgcggtgctcaatcttctgcaccagtgcatgcaggatgcgttccttgttctttgcacggatatgctgcacgtcttcatccagtccgctgggccagcgttcggtcagggttttgattttctgtgcggagggcagggtgggggctggctggtggaggcgtttgaactgctggaacaagtcgatgaacaggtccgtctccgtttcctcttcccattgcctcgtgaggaaggagtgcagcattgataaagttgatatgggcagttgttctccgatggagagctcgtgtacttcctgcccgtcaaattcaatcaagagtcgaatttgcttaccggcctcgttgtccacttccggatgtccggcaatgtactccgtcaggttggccttgaaggcttccgcatcgtcgctttgaacggcgatgctgaccaattcagggagttcgtgccgataaagttgttccagttgtgatagagtgagtgcaagcattttcttttgtttcataagcgattgtttttttgaagttaatatttatgatggttgacgcggggtgcgtccttgtgttccgtgaggggaaaatgatttcatttgctaaaaataacaaaaaaaagcgggaaatttctttcccgccttcttgtttctaaagttctttagaattctttttcttttatttctcttcgttggctttctgtttcggttcctttttggccagcatcactacgttgtaaacgtactcggtcatccattgttccgaatatcccagacgctctttgtactggcgtactgccgctgccgtcttgtgtacatcgtcctttttccatacggtttttgtacagacgtcgtgtacggttttttcggtcatgctgcgcagtgctcccttgaagatggaaggcatgcggaatttccactgcatcaggtttcccatcagcatcatcaagtcattggagaatccttgatacataaagagataaccttgtacgtcgttctgcgtacggcagtgcttcttgacggaagtatcaatttccttgaagaagttttcactgatgccgtagtcctgcatcagcatcttgcgcgaagcggccttttccgcttgtcccagacggcctccctgcgtggggattttgaacagacgcttgaagttggctacatccggcacaaagcggatattggtgatgcccaggttggcggctattacagactggaagtagacgcgtgtcagtgacacgaagtcttccacattcttcgaagatacttctccggtattcttgttgaatagtttggcaaataaactcatatcaaattacgaattactgattacaaattacaagaccgcaggtcatccggcggttccggctgcaaaagtacgaaataagttggttatcaccagcactctatgtctttttctacctctttcaggcggttcttggtgaaaacggggtctttgataccggcgcttttctgtgcgcggtagtcttcaagcagcctgaaagcgtattttccgagcaggctgatggcgataagattgcagagcaccatgagtcccatagtgacgtcggcaaggctccatgccaggtcgaaggtggcaacagcaccgaacatgaccatgccgcccaccagtatacggtagatgttgagcacccatttacggtgggtaaggtagcgcacattggcttctccgtaataataatttcccagaatgctgctgaatgcgaagaagaacaaggctaccgcaacgaagatggctcccgaaggtcctatctcgttggtcagtgcatgctgggtaagctgtacgccgtttgtggaaccatccagtggagcaccgctgaacagaatgatgaaagcggtgcaggtacatataatcagcgtatcggtaaatactcccagcgtctgaatcaagccttgcttcacggggtggctgacgtgtgcggttgccgccacattgggggcggaccccataccggcctcgttgctgaacagcccgcgtttgatgccctgcatcagcgccatgccgacaccccctcccaaagcctgctcccatccgaaggcgtggccgacaatgagtgccaggactcccggcagctctttgatgttcaacagaacgatgataagtgccagtgcaatgtatcccaacgccatgatggggacgatgatgctgctgactttggctatgcgctgtacgcctccaaagatgattgtcagcgtgagtgcggtgatgatccctcccacaacggcatggtcgaacccgaaagcgccttcgaaagcggcacacagtgtattgctctgtaccgagttgaatgcaaatccgaaggtaatggtgataagtacggcaaacagtgcccccatccacggctgtttcagtcccttacgcatatagtaggccgggccgccgataaaggagtctttgccctttatcttatacaattgggccagtgtagattctacaaacgagctggaagcacccaggagggcaatcacccacatccagaatacagcgcccggaccgcctactgcaatggcggtggcaacccctgcaagattgcccgtacctacacggctggcaatggagatggcaaatgcctggaacgatgagatatgcttttccttggcatcgcctttcccgcccgagtcgcccagcagacgtaccatttcctttatcatccggaactgtacaaagcgggttctcagcgtaaaccatacggcgcatcccaacagcagggcaacgaggatgtaggtccagagcaggtcgtttatcagatttattattcccataatgtatatgtacagttatctatttgtagtaaaaaaaactcacacaaaacaagtgctaccctctgtcgttactttaggctgcttctgtcgttattcaaggctacctctgtcgttaactgagatagatttcttgcaagtcggtgataatcaacgtggtatgagctcgtgtgctgcgatttgtaccatggacaaatctggacaaacctgacggaatctccttgcctatttcagcttgaagtgaaatttgtgtccttcaaacaccggttccactatgtcataacgaacaaactttgccagcagatgttcggcggcgcgtcgggaaatatgcgccaggcggcagtaacggttcagtgaaaggcggtcgttttcttccagcagattgagcaacagttgttcccgttcggtatattctatcagttctcctttcggacttccgctttgctgccagacgcgcagatggacgggagtagccaggatgttttcatccttgatgcggagataggccaagtattttcctgtttcgtccttggcatataccggcttccggtcactttcctcgatttgtaccaccagcacactgcggccttccaccagataggtctgcatgatgtagttcacttcggggctgcaataaagttcggcagccgcttctatcatatattgttcttcgtccgaacgaacaccggcaattttcccgttatctttcactccgatgagcagttttccaccgtctgtattggcaaaggctgaaagggttttggctatcttgcgggcgtcggatatttcgaacttgaaatcctgctgttggtgctctccttcggctatgagagcgtgtatatattcggtgtcagtaagcgttttcatgcttgcaaaagtagataaaaaacgcgtaagagcccctttttgcggcgattttaccgaatatttcaaaaaaaatatcgtttttctgcatttatttcaagaaagaatgtatttttgccagacattattaacgaagtaatttaaaaaggattatgaaagaattagttgaaaaagtagctgcattgtatgcagacttctcaaaagatgcaaacgctcagttggaaaacggtaacaaggcagcaggaactcgcgctcgtaaggcttctttggaaatcgaaaaagctatgaaggaattccgcaaagcatctttggaagcttctaagaagtaagaaaaaaagcatatttgatgctgcgaaagactgccactactggcggtcttttttgtttttgaaaagtattattgctacttttgacgcaggtattatggatgaaaacgttctcaataaactgaagatactggcagagtcggcaaagtatgacgtctcttgctcctccagtggtacggtgcgctccggcaaggcaggcatgctggggaacactgtgggtggctggggcatctgccatagttttgccgaggacggccgttgtatctccctgctcaaagtgatgcttaccaattattgcatctacgactgcgcctactgcatcaaccgccgcagcaacgacctgccgcgtgccacgctgtcggtggccgagcttgtagacctcaccatggagttctatcgccgcaactatatcgaagggcttttcctgagcagtggggtggtgcgtaatcccgattacacgatggaacgcctggtgcgcgttgccaaggacctccgcactatccatcgtttcaacggatatatccatctgaagagcattcccggtgccagccgcgaactggtgaatgaggcagggctttatgccgaccgtctcagcgtcaatgtcgagataccgaaggaggagaacctgaaactgcttgccccggagaaagaccataagagtgtatatgcgcctatgcgctacatccagcagggagtccttgaaagttcggaagaacgcaagaaacaccgccacgctcctcgtttcgctcctgcaggacaaagcacacagatgatagtaggcgctaccgccgagacggacaaggatattctgtatctttcgtcggccctctataagggacctacgatgcggcgtgtctactattcgggctatatttccgtcaatacctacgataagcgcctgccggcattgaaacagccccctttggtgcgcgaaaaccgcctttaccaagccgactggctgatgcgcttctatcagttcaaggtggaggaaatagtggatgatgcctacccagaccttgatttggaggttgaccccaagctgtcctgggctttgcgccatcccgagcagtttccaatcgatgtgaacaaggtggattatgagatgttgctccgcgtgccgggcatcggcgtgaagtcggcacggctgatagtggcttcccgacgtttctccaagataggtttctaccagttgaagaagataggggtggtgatgaagaaggcgcagtatttcattacctgctgcgagttgccgatgcgcacggtcaatgagctgactccgcaaggggtacgcagtctgctgttgcccaaaccgaacaagaaaaaagtggatgagaggcagttgatgcttgattttggcgaatgaatatctttttatacgataagacttttgagggattgctgacttctgtttttgaagcctattcccgccgcattttccccgatgcactgttgttggagggagagcctctaccattgttctacgatgaaatatttacagtgataaccgatgaggagaagtccggtcgcgtctggcgcggattgcagaagaagctgtcgtctgcggcacttgcctgcctcgcccaatgctggctggcagaggaaccggaaactcccatgctgctgttccgctatatccgcaaggcgatagatgctcctcgctccattgaaacgaactttgccgaccctgatgtgctggagttctcccgtatgtggaagcgggtggattgggagcgtatacgcctgcttcagtttgtccgcttccagaaggctgcggacggtactttctttgctgccatcgagcccgaaaagaatgcccttcctttggtgacggggcatttcaaggaccgttttgccgaccagcgttggttgatttatgacatcaggcgagcctatgggtactattacgacttgaaggaggtgcgccaggtgacttttggtgaggacagtcgcgaaggacatcttgtcaccggcatgctcgacgaaagtctgatggacggagacgaacagcttttccagtctctctggaaaacctatttcaaggcaatctgcatcaaggaacgcctcaatccccggaagcacaagcaggacatgcccgtgcgctattggaaatatctgacggaaaaacagcagtgattccctttattcgattttctccactgtcacttcgggaaattcctgcatcagttgcagcaaatatccctcatcatagcttttcttggatttgatgaccatggtcacttgatagttggtgtactctccctgcacttgccggtccaggttgtaggacaccaccagatagtctttggagttgaatcgccgggacacttgcggcagtatctctttgctggaagtggaaaaggttatcacggaacttttcatgccaatgcttttgaaaataaggctcaacagttcgagccctgccagagtcagcagggtggcggcaatgctgatggtgtacattcctgcacctactgccaatccgatgcctgcagtagcccatattcctgcggctgttgtcagtcccctgactatctgtttctggaaaatgatggtacccgcaccgatgaatccgataccgctgactacttgtgcggcaacacggctggggtccagcgtcacactactttccttgatgatttcctgaaaaccatattgggatacaatcatgatgagcgcgcttcccaatgataccaggaaatgggtgcggtagcctgcttctttggcacggtattcccggtccagtccgataatggcacccaatattccggctaccagcaacctgagcacaaaatcaaagtttaacatcatcatcgtatcctctctttcttttttattaattgatgacccaattcttattgtggggcactgttttcttggggttgtaatgcattccggcttgtgtcggtatttttagtatgtatgtacgtccgcttttattcatcagcgaggtatcccgcagccacggattggcatctttcagttgggcataggtgatgcctttatctttggcaaactgtgccaggttgccgatgcccgttgtgacggtcacttccgtgtaggggatgggcggataaagatgttcccgtttcaacagaaagccgtactgctgtggattgctgatgactgctttggctgccagcaggcggaacatgtagcgcgaagtctcttctaccagccataagtcgacagcctggtccaccatttgcttctgcagctgtgtggagatgcgtccttgcccggcattgtaggcggcggctacgcacagccagttcccgtatttctgataagcatctttcaggtacttgcaggctgctttggtctctttctcgatatggtatcgttcgtcgatgttgctgttcacctccagtccgaattcgcgtccggtggcaggcatgaactgccataggccggcggcacccgcaggcgatttggcaagcgggttcaggttgctttctatcacagcgaggtacttgaagtcatcgggaaggccgttggcttttagtataggctctatgacggggaagtagcggttggcacgcttcaccatgagcatggtggtggagtgcatgtaggtgaaggacatcagttcgcggtccatacgttcgcggtggtcgtagcgaagcaggtcaatagcttgtccggcaaaagtgatcttgtccggtacgctgggggaggtcacgcagtagggaacttcggatttcacggaatcgcgttcgggattcagcgtactgctgcctgcgaggaaggggaggctggaacctgcgcacagtgcaatggcagcggtaagcacgatatattttgaatttttcttcatgtctgtatgtctatttctgtttggagacgtgaagatacgaaatcaattcgttataggcaacctttcccatagccatcgtggaatcatacgccaaaaaaataccagtacccggtagcgtccgtcaatgacaactacccgtctcttttctcttaaagccttgattatgtgctgtgctacacggtctgctttcatcagcatcgggtatttcccgcttttcaataaatcggtggcaacaaatcccggacggatgtcggtgaagtgtatatcaagatgctgcatccgggcaagttgtgccagcgcttcgatataggtattctggaagcgtttggtggcagagtaggccggtgcaacgcccagtcctttagtgcctgcaatggaactgatgacagcaatatgtccggagcctttttccttgaaatagttgaaggcggcagtcaccatgcgggtaaatccctctacattggtacgtgccgtgttcagttcgatgtccggttgtaagtcccggttttgatgtcccacgccggaactgaggaaaaacaggtctatgcctcccagcttttttatcaggttatggaggtgtagagtcgctgtctcttccgtaacgtccagctgttccgtgattatccggtcgggtgcggtggcttgtagggcatgcaatgcttcctctcttctgccggcaatacctatatgccagccttgttgtacaagtatcctggctacttcttgtccgatgcctgaagtggcaccgatgatgatggctttctgcatgatgataggggattatccgatgacggttgctacaattcttcttcctccgccccggttgcggaactcgcagagatagatgccttgccagatacctatgttcagacgcccattggtgatggggatggtgaggctggttccgctgagggttgccttggcatgggcgggcatatcgtcatcgccttcgcatgtatgttggtaataaggttcccgttcttttacgaggcggttgaagatggcttccatatctgtctgtacgtcagggtctgcattctcgttgatggtgaggcctgcgcttgtatgcttgatgaacagatgcaggattccggcagacggaagcggtggaaggttgcgtataatctcctctgtcaccaggtgaaagccacgccggcgaggggttagggtaaattctttctgtgcggtcataaatcattgtttttcgtttgttgtcaggatggtcttgtccggcagggcagttccacggtgaatgtgcttcccactcccattgtcgaatctacggtaatcactccattcattttctcaacgatggatttgcagatggagagtcctaatccggcaccttgggcaaaagagtccaccttttcaaaccgttcgaatatcattcccagtttgtcggggggaataccgcatccagtatcggaaacactgattcttattccgtctgtgtccgtttcgtagtacacttcgatatgtccctgcacggtgtttttcagtgcattcgatatgaagttgttcagtatctgtttgatgcgcatcgggtcgtgctctatctggctgggggttaccggatacctggcaaagagtttcactcctgccggaacgttccgttcgtactcggtaatactttccttgatgagttctgccggattgaaccattcggaatggagctctatgtgtccggcctctattttggaaaggtccagaacgtcgttgattagtttgagcaacagttggttgttgtggtttatcaaagagatgtactgttccctttcctgctcgttttccacatagtgcagcaggctggagaaaccgataatcgtatttagcggcgtgcggatttcatggctcatattggcaaggaaagcggatttcagccggtctgcctcttcggccttttccttggcttgtatcagcattgcctccgtctgctttaattgggtgatgtcgtaattgatgcagataatctctatgatgttctgttcaggcatgtagcgttctacaatgatgttgacgtgggtccacatgaaagaaccgtcttctttaagaacacgtacttcccggctgagcttgtgtgccagtcctctctttacgttctgtaggaagtcaagcatgatagtacggtcgtcagggtgaagatgattgtaggttccgatgatttcggacaacggtgtttctgttttctcacccaagttcttgtaccagctgcgttgggcatagccttgctcattaagaaggtcataattggcatatcccactttggcatagtcacctataagctcaaagtggctctcgaactcttgtattttgttgtaagcgacggtcgtttccgttttgtctgcgttgattagcagatagttggttaggttgtgattatcgtcgtaaaggcttgtgactttggttacaaggtctatggtgcccgtcttcttctgtgtcttgtagtaattgcctattttagagaagtcataccggaaagtgaagtctgcattttcatgttttcttaacttgcttttcatctcttccgggaaaatcggattctcgaaaatattaattccaagtagatcttctttctgtttgagatggaacatttcctgctctttgtcattcatatctatcaatattccctctcggttatagagctcaattcctaccggaagatatttataaatattatggaggagacggttacgctcttgtaaggcttgggatgccgatgacatgtcgggaccgtcttgtgtttcggcaatgccgtagactttgacattaccgttttcatcggttctctgcaggcatatcttgcttcttatccacgttggatcctctactgtgttgagcagatatacagtctcttgtgtctgccggatattgtcgaaggaatgtgtggtagtatgccgttgttcctctttcaggatacgtttgttgaaatctttaaagctgatggttccatcctcatccagtcccagcaaccgggagatatattcggagcaaatgtagctttcggtctttaaatcagcttcccaccatcccatattggcattggtcatcattgctgacagtaagtcataatcaaatttagaattcataccggaatctttaatagtgatgtttttgttctgtcacaacaattaagatattgacaaagatacattatttccaaattaatctgtgatgaacggaaataaaaataagggttatatgtgtttttgggaaatgggaaaaaggtacccgagtttttgtacttgccggaataagacgtatatttgttgcaatttttacattctaacaagaaaatgccatgaagcgtattggactctttgtaatagtttttttctgcatatcactcttactccatgcaagcggcccgcgtgtcttgtttatcggagattctatcacggacggtaactggggaaatgcctgcgggatgcccaaaccgactgcggagcgaagcctttgggatatgaaccatatttacggtagcggctatatgtatttgtgtgcaagtcattatcaaggagattttccggaaaaggaatatgctttttttaaccgtggcatcagtggaaacactctccgggatttggagaaacgctgggaagaggatgccattggaatgaaaccggatgtgctttccgtcttggtggggacaaacgatgtacattactatctgcagggtgacaaaaaagagccttttgattttgaaggatgggagaagtgttaccgttccttgcttgaccgttctttgcaggccaatccggaattgaagatagtgctgggcactccttttgttgccaatgtcggcaatatgcgtaagagtgaggactttgcagaacgtgatagtctggtgcgtcgctgtgccgccatcgtagagaggatagcgaaggactatcagacggtatttcttccttataatgcgatgttcgatgaaattctcggcactgctccggcttctcaagacacctattggatttgggacggtatccaccccactcctgcagggcataaacgaatggcggatatgtggataaagcgtgtgaatttataatttatcaataaaatagagagtaatggaaaaagtgattatcaactcgtacgaggattttgaaaagctggtaggccagcaaatcggtgtttcggaatatgtagagctccctcaggagcgtatcaatctgtttgctgatgcgacattggaccatcagtggatacacgtcgatacggaacgcgccaaagtggaaagtccttttaagagcactattgcacatgggtatctcaccttgtccatgttgccatatctgtggaaccagattattgaagtgaacaacctgaagatgatgattaattatggtatggacaagatgaagttcggtcaggcggtattgtccggacagagcatccgactggttgcccatttgcaatctctgtcgaatctgcgcggtgtggcaaaggcggaaataaagtttgccatcgaaatacaaggtgaaaagaagaaggcactggaaggggtggctatatttttgtattatttcaattgattatgcgtaagatggtatgcccccaatgcaaggtgggggcattttttgtgatgaacggacaaggtgagcgcctgccggtctacatctctgacaaaggtgagattgtacctaaggacggcacctcctcgttggagggatacgaccaggatacggtttattgtttgtgctgttcctggcgcgggactccgaaacgtttggtgaaatactgatggacatactcctgccacaaatggcggagtgccgccacgggatggtacaacagcatccgtggtccggcataccgcatgacttcacgcatccgttctttcatttcgggcttgtagcagtgaatgctgcattgcctgcaggtggatttattctcaccgaaaggacagcgtgaaagacgaatgcgggcatatcccagcaattcctcgcatcggggacacaattgcttgttaccttcctttttccggcagtagaggcggaccatccgttctactgtctgtttttcctgctcgatacgggatggcatgtttattgtttggactgccagcgtttcaaggtcgggaagaattctttcataccggcaatggcttcctctttagtgaaattcattccggaatccttgttgaattcgtcggtgaactgtgcacaatgttctatcatttcgtccatagtgcagtcttgtgcaaaattgccgtgctggtagcaataggtgcaatattcctcgttgaggctaccgtcggcattggttccgagtacttctgcagatgacaagggcattccgcagctttggcaaagtttagcttccataatgtgtggagttaagtgatatgcaaatatagaatattattttggttgaagcgtccttttcagataaatcatgtctttcagttgcttgcctccttcaaatatggggtggtcgtaattatcgataaagaaatcgggtacccggtgtgagtatgcaaatccgcagctttcatagaaggggatggttagcggactgtctccagtgccgacaagcatagtatggcaccggtctttataatgttcaagaacgaatgctatcagttgtcttccatatccctggcgctggtattccggatagacagctatgctctttatttcgtagattcctttatcctcgcaggtgattacacaagacgctttgactgtatcattatcggataggatgaacatctctccccgttccagataacggtcaatcatggactcttgttcgtcggcaagcagcagcaggtcaagatattgctttttgttgccggatatgggatgtattcttatcatatttctgaatttctggtgtgaagttagtcattttctattgaattacaatggatatctctttttaactgttgaatggttgagagttgccggtgaacaaaatctgccatacgccgttcttctcataacatgataatctgatgaagttatgagtaagttgaaattctcttttctggttttgatgctgatggtatcagtctcggcttctgccgattgggcacctgctgatgtacaggctgcactgaagaaaatgtatcctacggcagatgatgttgcctggtcgcatgatgagtcttattatgtggcagatttcctgatgaacggttttgatacgaaagtctggtttgacgggcaggcgcaatgggtaatgcaacagacggactgggagacaatggacgaagtgccccctgccgtttacaatgcttttgccgccagtgaatattccggagggatggtgcagaatgtcacttgggtacagtttcccaaatggcagtccatcgtggcggtagaggtagggatggcaaatctccagacgaaatatcagatattgtttaccccgacgggcgaaatcatccgtgcccgtaatgtcacctatacatacaatccgctcggcgcagccactttcttgtaacgtctgttcgcatacctgctgaatttatcatatctttgccttcccaaaccagacttttatggacaaagacacttttcagcaggaggtttataatgtagtggccgcaatccctccggggcgggtggtgacgtacggacagatagcctatcttgtcggaagacctcaatgttcgcgcatggtgggacatgctatgcacgatgtgcccgacggcatgtgtctgccctgccatcgggtagtgaacagccagggcaggctggcaccgtgctgggcggaacagcgggctttgctggaggcagagggcgtgacgttcagaaagaatgggtgtgtggacatgaaaaaatgccagtgggaattcatgaaagagcaaatacaataagattatgaaatttataggtgcacatgtatcggccagtgggggagtggaagcggctcccgtcaatgccagtgagataggggcaaatgcttttgccttgtttaccaagaaccagcgtcagtgggtggcaaggccgctgacggaggagagtatcagggtgtttaaggaaaattgtgggaagcttggcttcgattcccgctatatcctgcctcacgacagttatctgataaatttagggcatcccgaagaagaagggttacagaaaagccgtgccgcttttctggatgagatgcagcgctgcgaacaattagggctgaagttactgaattttcatccgggcagccatctgaataagatttccgtggaagagtgtctggacaaggtcgctgaatccattaatcttatattgggcaagacgcacgatgtggtggctgtcatagagaacacagccgggcagggtagcaatgtgggaaatgagttctggcagctgggacatatcattgaccgggtggatgacaagtctcgcgttggagtttgccttgatacctgccacacgtatacagcaggctatgatatagtgaatgagtatgacaaggtgtttgaggagtttgacacagcggtaggtttcggctatctgcgtggtatacacctgaatgactccaagaaagcactcggctccagagtagaccgtcacgacagcatcggcaaggggctgataggtatggatttcttccggcgctttatgcaagatgtgcgttttgacggtatacctattattttggagacgcccgatgaatcgctttgggcagaggagataaaactgttgagaagctttgtctcctctgattgagagactatgccctgaatacacattctatacggttaccgtccgggtcgaggacgacactttcaaaatatccgtcgccggaggtacggggctctcctgcgatggtatatcccgctgtacgtagccgttctgtctgtcggaggacagcttcctggctgtcgaaggcaaaggcaaagtgggtcagtcccagtctgttttcctcaataggggtattctgtatgtccgtacggctcatcagttccaaatccgttccttcatcgaagtgaaggaaataagattcgaatccttttttggggttgatgtacttttcattgctgctcccgttgaagtaacgtgtgtagaactctttcatctcttccagttggaaggtccagatggcgatgtgatgtatcttcataagtttgctaaattataatctgtgttcaatctgagtaatctgtggtggggttggtaattgcaggtgcagaatagggaaaggctttcccgtcgggtcggtttcgtcccggccggccacttggaatcccatatgttggtaaaatcggcaagcttgtccgttctgctcgtttacatccactttgtggatgtgtttttggtggacggcgtactccatgagccgttttccgtatcccttaccttgttggtcgggacggacaaacaacatctcgatgagttcatcgctcagtcccataaaggcggcaatttcttctttttcgttgcggatgatgtaaagctctacggcaagaaagtactgctctcttatcagtggtttgtaaaactgtatatccttttctgccaggaagtggtgtgtgctgcggacagaggcttcccagacggtcaacagttcgtcataatcttgtggggtaggtcggagtatcatcatttattgcattactttgctggttattaatcagtaggcagtcagaattcagcttctttggtaatccttacggtttctcccgttatagggtgggtaaattctaagtattcggcatgcagataaagccggtctgctttctccccgtaaagttcatcaccgatgatggggcagtgcaagccaagcgggtgtgctgcatgtatacgtagctgatgggttcttcccgtgcgcggatagaaagcgatacgggtccgtttcccgtccagacgttccagaacttgataatcggtgatggcgggctttccgtgttcggtgtgtaccatttgccgtgggcggtcaagtggattcaggcaaagcgggaggtcgaccgtacctttgtcctttgggacaataccctcgagcaatgcgacataacgtttcctgaccaggcggttcttgaactgggcctgcaggttctggtgtacacgcttggtcttggcaatgagcattaaaccggaagtggccatgtcgagacgatgcaccgtcaggggaccgtcagcttcgggatattgctcacgcatcaggctatagacggagactgcatcttccttgccgggaacagacagtattcctgccggtttgttgatgaccgaaagccatgggtcctcataaacaatctccagattcttggagggtacctgcattcttttcaacatggggttttcttctacttgtagaccttgcagcatgtgttgcagtataggttcgcactttcctttgcaagccggataatagtggccgtgatggcgtatctctgtcttgggggaatcaccccaccagaattcggccatggcaataggtttccatccgtgcagataagcttgttgcagcagtttgggggccgcacattcacccgcaccggcaggaggtgtcttgtgcacggtctgcccgaatatctcacagagattcttgacttctccccggtaattcagcatcccgaactgttcgaatagcttttgctgcaatgctgcagagcgggttttacgttcagacttcaatgctgaaatccgtctttcccagtcttctgtctgcgtttgcagtgtggtaatccttgctttccatgaacgttccaggcgtttatattctgccttttggaactggctttcccgtatcagttcggcttcttcctgcgcattgagttctttttcttttctgcgctgttctctggctgttttggcttctttcaactgtgctttggctgttgccagtatgttttctgctgactgaatggtccgggcaagctctgctgataaggcggcatatgctttgtcattttccagttgccggatgttgcggttgatggaagagatgttctcttcttctatcttgaaaaagccttgtggctgtagcaagttatatacgggaggaacaaaaaagggatgtaggttctttccggccaatatgcctgagaatgcagctaaatatccggtttctccatgctcggtttgtacaatcagtaccccgaacattttgccttggcgcagttcgtccttccatgcagtttgtcgggtaagatagctttgtacttctttggctgccaatatacataatgggtgcggagtatagcagaaaggataggtgaacctttccggaagcggaatgtcggttatggaagtagtaaaacggtgtaacatgatgttgcaaagatactatatttctctcataacagaccgtttgtactgcaaatctttatttcgttgtatataggttgtatcgcttatgaagaaaaaaacatctttgggaaagttttacttattctccgtttatacaaatatgtatatatgtgtgaattaactttgtttttgataaattggcaactctgttatccttaaaaaatgactattaatctgtctcggatattttcttcttccatagacttctttttgtatactttagatgttatgccgtcgtatgaatacggatgaagagcttttgccttagtgatacttgtaaaataaattaagttattgccttttttgttttattggggaatggttgttttttaaacttcctagatatataaaagaaacttatttctctttaaaaagttgtatattagcaccttaaagtttttcaaaagattatatgggcaaaaacaaagagaacttaaacatattcttgcttcattttttagaacggttgaatagcaatgaacccaatgaaaggaaagttattgaatcgttgaccgatttctgcaactactatgactttacgaaagggtttatctatcagactgacggattccgttatttcttattgaaagaaacgattggaaatgaaggtgggactatgaaaccccgtttcgatatgggagagttgaaaaaggagcatgtcgatgccatgaaagctcgggataaacctttctatggaaacagaaatgcggatgcttcatgggatgatattgacattcttgatttctacggtgaggattctttgttaatcaggcattttgaagatactgggggtaaaatcatcggattcataggttttgcaggcagggaggaagagacctatctcacggaagaggagttgcaaatcattcatctcttgctgggctcgttctctaaggaaattgcggtcagggaatataaggaaagggaagtgagggccagcaatacattaggcagtatcatgaataatatgggcgttgatatttacgtcaactctttcgattcccacgatatgttgtatgccaataggtctatggtggaaccatatggcggtatcgagcatttctgggggaaaaaatgctgggaggccctctactcggacaagacgggggagtgtgagttctgcccaaagaggcatttgatagatgaaaacggacaccccaccaaagtctattcgtgggattatcaacggccatttgacaagtgttggtttcgcgtgttcagtgcagcctttgcttgggtggacgggcagatggcgcatgtcattaccagtgtggatatcgaccatcagaaaaagatagaggaggaattgcgggtcgccaaggataaggcagaacatctggaccgcttgaagtctgctttcctggccaatatgagtcatgaaatccgtactccgctcaattccattgtcggttttgcaagcatcattgccgaactggacgatagggaagaacgccaggaataccttgccatcatgcaggagaatacggaactgctcttgcaactgatatccgacattctggatttggcaaagatagaagcgggaacacttgattataatatggggtatgtggatgtcagtgacttctgtaaggacgtgatgcgcaactatgatataaaggaagacaaggctgtaccggttctgttggctctcgacttgcccgattaccgtatctataccgacaagaaacgtctgatgcaggtggtcaccaattttataaacaacgctttgaagttcaccagtgaagggcagatccttttggaatatcatccggtggaaggtaccggtcagatagagttttctgtgacggacaccggtatgggtattgctccggatgccgtggttactgtgttcgaccgctttgtaaagcttaatacctttgcgaagggcacgggtttaggcttgtccatctgtaaaagtatcattgagcatcttggcgggactatcggtgctgagtcggaattgggagtcggcagccgtttttggttcaggcatccgtgtgccgaatgattttatttgcctatatttgtgcgaacttcaatatttatggataaaaaactctgtaccgatgaaaaacaagacatggacgtgcctggttgttgtgtcagcagcattgctgatggcgggttgcggcagcaggacaaagaaacaaacaaatgaagatgtaagtatggatagtgtcggtgtaacatgcagtggcgtaaagaccttgcaactggagggagtgcaggccacttggattcaggataatgctggtgagcatttgatgccgagaacgattttcccggatgcaagcgatgaattgatggaaagtttgtcgcttcaaggcggtattccttcttccatgagcaccttcctggtagatacgaatggtatccgtatcctttttgatacgggaatgggagctcccggcagtcgtctgttgcccggattacaatctttgggtatctctccggcagatattggatatctgtatcttacccatttccatggcgaccatatcggtggaatgatgaagggagacagtgtagtcttcccgaatgccgaagtgtacgcatcaaaagtggaatatgatgcctggatggcaatgcctgccgaaaggaaggcgcaggtcgtaaagacgatggatgcctataaggaacggctgcatctgtttgagtttggcgataccttgccgggcaatgtggttgccatggaggcagtcggtcatactcccggtcatacggttttccagagtggcaagttactggtgattggtgacctcatccatggtgcggcccttcagttggagcatccggaatactgcgcttcctatgatatggataaggaagctgccgtgaaagcacgcaagtatttcctccaatatgccaaggacaaccaattgacgatggcaggtatgcatcttcctgctccggccttcaaatagaatgggagagtgtcaaaagtatatgagtactttcattatgctatatttaggcgcggatagttctgagcccctcgttattcctttttacttttagaagcggcagtcttgttcgatgtatgtcatatattcgtcgtaactgatgtgcctgcctcccattgttttgaggtgaggggtttcgaactggcaatctatcatgacgcctccatgttccctgaagaattgggccagatggatgagggccagcttcgaggcgctgggaacgagtgagaacatgctctctccaaagaaacaacgtcccagggtcactccgtacagcccacctaccaattgctcttcttcccatacttccacgctggcggcgaatccttgttcgtgcaggtgcgtataggcttccatcatcttcgttccgagccaggcgccttcttgttctatccgcaattctccgcaggtttgtatgatgtcttggaaagcttcgttgaaggtgatttcgtactttcctttgttgatgagcgtacgcatggagtgggagatatggatttcgtccggaaagatgacgaaacggtccatcgggcaccaccattgtatcagttcttcccgaaatgcgtaccaggggaagatgccgttggagtacgccaggatgaggcggtcaatggataggtcaccgcccacagcgagcaacccgtcggggtcgccgtagtgagggtcggggaaagcaagtttatccgtcagttgaaagaccatatcgttattcggttgcgggttgtagtttcaatgctccgttttccacttgcacgcggacttttcctcctgccttcaatgtaccgaacagaatttcgcgcatcagcaagggtttcaagtgggcggctatcacgcggtccatctcccgggcgccgtattcgggaataaaaccccgttggagcagccattcgtgtgcttcctggctcaataccatttccacctggcgggaagacagcttgctgcctagttctccgagtttcttgtcgaggataagtgatgccatcgggcggtccatgtcatggaagaccaccgtggcagagaggcggttgatgaattcgggcttaaaggttttcttgacttgtttcagcatggcttctccggcggtgacctgactgttgaagccgatggacgcttggcgggcatattgtgctccggcattggaggtcatgatgaggaccacgtgtcggcagtcggctttccgtcctttgttgtcagtcagtacggcataatccattacttgcagcaggatgttgaatacgtcgggatgtgctttttctatctcatcgagcagtagcacgcagtttggggtcttgcgtatggcgtcggtcagcaggccgccgtcctcgtaacccacgtagccggcaggcgagccaatcagtttggctacggtatgcttttcggtatattcgctcatgtcaaaacgttgcagggcgatgcccagctcggcggcgagcactttggcaacttcggtctttcctactccggtggggcctacaaagagcaggcttgctagcggtttgttttcgtccagcagtcctgctttggacatttgcacagcttccactacctgacggacggcttcttcctgcccgtagatgcgggagctgatgcgctcgtgcaggctttccaaggcgactgtgtcgtcctctttcatggcgagggcattgactttgcaggtacgtgccagtatgtcggttatcagtgccttgtccacggtctgttctccggagtctgtgggatgtatttcccggtaagctcctgcttcgtccaccaggtcgatggctttgtcgggcaggaaacggtcgctgatgtagcgggcgcttgcctttacggcgtaggggatgacgtcgggctcgtaggtgacgccgtggtaggtttcgtatttctctttcaggccttctacgatatgtatggcttcttcaatgctcggttccagtatgtctatctgctggaagcggcgtaccagtcccttgctgcgtgcgaagtagcggttgtactcgtcgtaggtggtagagccgatgaaacgtattgccccggtttccagatagggtttcagcatgttggaggcatccatagagccttcgcccgtgcgtccggcgcctatcaggttgtgtatctcgtcgatgtagacgatggcgtttccctcacggccgatgccttccatgatacttttcagccgcttctcgaaatcgccgcgatattgtgtgcctgccagtagactgcccaagtccagctcatagatgcggaagccggcaagccgttcggggacgttgcccgcttcgatacgggcggcaagcccataggcaagggctgttttgcctacaccgggttcgcccacatgcaatgggttgttcttttctttgcggcagagcacttgtatggttcgctccaactccatctccctgccgataagcgggttgtggtctgccagatggtcgttgaggcaggtcacgtagttacgccacggttctgttttctcttgttcatcgggagatggcgtaccgcctgcttcttctgccagctccgcttcttcgtagtgggtaatgagcagactgaggaattcgggcaggttgccgccgactgcttccttcaggaaatggcatgcccaggaatcttccagttgcagcaagccttgtatcagatggggaacacccagttcttcggcgctggaatactctgtcaccgtataggcatgttgcaggagtgagctgagctggacggaaagtcccaactcgtattccacattgtcggggacagtgtccacttcttccgtcagatagttttccagtgagatgctgagctccacataattgtagaaggtatcttgcagggtgtggataaagggttcctgctctataatggcgctcagcagatgttcgggcatgatgaactcgtgccggtaagactcggcctttctttgtgcggaagcgaatgcttggtttacgaatatcgtattttttatatccatattgtttctttcttcttattcttcttcctccggggtgacggtgagccggagggggaaaccttcattgcgtgccatgcgggtggctttctgtactttggagtgggcgatgtcgtatgagtagatgcccactaccgcggagttgctcttgtgcacctgcagcatcagtgtttccgcttctaccgatgatttgtaaaagacggtggtgagtacttttaccacaaactccatggtggtgaagtcatcattgtagatggtgactttaaagcgtcggggttcccgtagttctatgcgttctttttctttgaaagaagattgctgttgttccatttctttgaaaaactactgttaagacattgttctaccgttgtgtgggcaacgaaaactcctgccagtcatattcgtctccgtactcgtcggctatggctatgcgtatggtgacgttacccgtctttatccgttctccggcactgatgttggcggtgtatttcacaccgttgtgcggagttatttgctctatcatgaccgacggtgatatgtaaatgcgcttcatgcccgtggtttccgccaccaccggcactacgttgtaggctgttttgtttccttcgttcatgatttcaaaaatcactttacagttttcgcccgaattgatgacgtggttgcggctgtcgtcaatgaaacgtatattccgtatcctcaagtggtcgatggccgatgcttgcggctgtcttccggattgcgggggatagggctgtgtcctttctatccggtagctgtactcctcctgctttttgggggctgtggctgcattggcaatggcagctcccgcaatggttcctatgatggtgccgatggcggaaccccggtatcctcctcgccagcctccgttactgtcacctatcagcccgccgatggcaccgcctacattacttccgatggcagctcctgcgagcactgcgttagggtcgcctgcagccatctggcttgtgccgcatccgctgaggatgatggttgctgccaggattcctataaaagactttttcatgttcatatcctataattattatgttgggcagattgttttataaaagggctattcccagtaaatcatctttttggtcatgcctccgtcaatggttatgttttcgccattgatgaagtcgttttcgtcttgacataggaatacgcacatacgggcaatatcttccggtttgccaacccgtccggagggatgttgtgaatggtcttctgcccgtaattgttcataatcgtgtgtctgaatccagcccggagagatggagttgaccgtgatgtgccactctgcaagcgataaagccaacgcatgcgtcaatgaatagatacctcctttggaagctgcatatccttcactgcctggttcactcatcagatagcgggtagaacagagattaatgattcttccgtaggtattcgtgctgttttgacttttgcggtgtactgccaacgcatgtgaagtaatgaacaccggacgtaaattcacagacaatattttatcgaaagtctccacactcgtttctgtgatgggagagaattcactgatgccggcattgtttataatgatgtcaatatccccccattccttgaaaatattttgcaggcaaagttccaatgcttctttgctgtttaggtcgacggggtggaattgtgctccggtggcttgggcggtttgttgtccttccagttcattcttgtcacaaaaggctacttggtaattaagcttgcagaaggcttctacaatggctttgccaatacctcctgcacctccggtaacgaacactttctttccgccttttttgaggggaagtgtcggcttatgtagcgtttgtgccttaccggattttttcgctttctcccaagctgctttgcgtgcccggtattgctcgtactgattttcaagataattatcggccatatatgtttccggttttattgtttaactgtctttctccgaataagttcacttccttgcattgggagatgatatagagatgatgcccccaagggatggagaaaaatttctcttcacctaatttggaaacaacttgttgccaaatagtatatggctcattataaaatagataccactgctttatactgcgtatgtttctatatgagaaccctttcatatcaggaaattctgccatcagctcacgactcaactcttcgagaaatccgcttccccaagtcatttctttctgccgttctataatttctgcccccagttgccagtaaaggtgaagcagttcgctgttcacgcgtacagccgctttaatctgtgcactacgaatgtcttgttttaggtggtttacccaatccttgaacggttgatttatagatagtgctgttttcatatttttattttcttcatcgtcatattcgatgtttctatttcacaaagttaagaaaaagaatttatttcaactgtaatcctttccgtcttttctacctctccacttttaccacacaatataccatctccccctctctttcctttacctcatcccgtgttgctgcaatatcctcccgaacacgttcacccgttttgcagagaataggtatcgcactatgtcgctgtatttcctcctatattttcgcaggcgataattattccccttgtagggcttcaaaagggaatccgtctgtttccctaaggagaacggtttgtttcaatatggagaacagtttgtttcattagtaggaaacagttcgttccgttaaagaaaacagtttgttttattgagtgcgaacagtttgtttcatagtatgtgaacactttgtttcttactgttgtaacaaagtgttcaccgttgtgaactaaagtgttatctatattttcagtgataaaatgacatgaaaagggggctgaagattacctttctaccatttgtattcctcgctgtaagagtcgaaagccggttctcccggaatgttgtattggtggaaagttctgcggatatagttctggtcttcgggggaaaggtaagattcttcccggtagaagcggtagtattttccgcggccgaaatgggctatcaactggcttttcagaggttggagattcttgtagggaacttcatcgagcaagtggctgattccccatgcgacatgtatcttttgtgtcgattgaaaataggcgcattggctgctatcctctggaatacacagtggattgatgatgcggatggacgggtactcgggggtatcgcgaagggcggctaagcgatgcaggcagttgtcggctttcgggcattggttgttgaaacagcgtgagtagttggcaggtgctaaaggtttctcggaagaatgtttcatgtttatatatactttgatgaagcgacaaagatagcactaactttttgatatagccttctgttctcttgtttgaaatgccccctcattgaaaaaacagcagccggaaccactgaattcagtaattccggctgtaccgttctttcttataagtatggatggactatttcacctggatgatgtcataattcaagtcactcactgcttcctgcaggctgtcgttgacaaggcgcagggttgtgtcgttcactactacgaagtacaccggagtgtccccgtcgttcggggtcagcttgatggctgttttcttcttgttgtcgacgtctttctggataacttctttctttcctttggaagtaaagctcttgttctttccggggccttcggcatccagataagttgttaccagcgtgtagccgctttctccgtcgggacctacactgtctacgctcaatacatactggatgcccggaccgtcggcggcgggaaggattccttcgtatacggctacggcagacgagtcattgccggtaacagccattacactttcgtccatggcgacggtgtcattgttctgagttccttttgattggcaggataccaatgcagcggcaagggctgcaatcatcattacttttttcattgctttaatggtttaagttaattataaagacgcaatagcgtttgttattcatcttcttctttcttgatgacgagcagcttgtccacccgtccgcggtccatatccaccacttcgaagtccaggtttttgtagttgaacaagtctccggctttcggcacccgtcctatcaagaacatggcaagaccgctcaaggtggtgaagtcttcttctttcaggtcatcatagttcataatgcccatcgcctccataaagtcatccagattcatggaagcttccaccagcatggaaccgtcttgacgaacaacgatttcctcttcttccgtttcattctcttcgaggatgtctccgaagatactttccgtcaaatcgtgcagggtgatgataccttctgtatttccatactcgtctacaacaactccgaacttgtttttgttcttcttaaacagctctaaaactttctttgcatacaaactttccggaataaacaaagcagggcgtgcaatactacgtaagttgaagggttgttcgccgcccatcatcaagatgatgtcctttacggaaaccacaccgataatctcgtcctttccccgctccaccaggagatatttgctgaagtgttcttcgtggatgatacgcagcacctcttccggtgtgtctgtgggatggagcacgacgatgtcgcggcgataggtcatcaggtcattcgctcttttgtccgagaagcggaacacgtcacgcagcatttccgtttcgtctttgtcgatgacgccttgttccgagctttggtgcagaatcatcttcagttcgtcttgtgtcatttggcgttcttcgccgctgttcagtccgatgagtttgttcatcagtttggtggaagcgctcagcaggcatacaaacggataggagatcttggtcagcacaatcatgaaggggctgagcatggtggcccatcgttccgggttgttcaaggcgatggacttgggcaccagttcgcctatgatgagcgacagataggtgatgatggctactacggtaatcatggcgagagtcttggcataggcggctactcccggaatgagggcgaacagcggttctacgtcatcagcgatggtggcaccaccataggcaccggatacgataccgataagagtaataccgatttggatggtggagaggaatttttcgggttcttccagttgtttcaatactcctttggctcttttgttcccttttccgacaagagtttcaaggcgtgctttacttgaggagactaaagcgatttcatacatggcaaaaatgccgttcagaataagtaaaagtagaatgataataaactccatagtggattttgaatagtttgtgaggcaaagataatgatttttcagtatttattgttaatattgccatccgttagaaaaaataaacaataaatagatgaaaaaaagaattattgccttggggcttttgtggtgtctgtctgccgtaatgttgcaggcggcacgtgtagacacggtgttggtgagaagtgcagccatgaataaggatgtaaaagttgtgtatgtattgcctgataaggctatcggcaagcaggcttgtccggtggtttatctgttgcacggttatggcggcaatgcgcggagctgggtgcaactgaagccggaattgccgcagatggcggatgagaaaggaatcatatttgtatgtccggacggcaagaacagttggtattgggacagtccggagaatcctgcctaccgttatgagacttttgtcacctcggaactggtgaagtatacagacgggaactatgctaccattcccgatagaaaggcacgtgccatcagtggattgagtatgggtggccacggtgctttgtggagtgctatccgccataaggatgtgttcggtgcggcgggcagtatgagtggaggagtggatatacggccgttcccccagaattgggaaatgaacaagcagttgggagagtttgctgccaacaaggcatcttgggatgcgcatacggtggtcaaccagctggataagattgtaaatggagacttggcgctaatcatcgactgcggtgaggccgatttctttcttgaagtgaacaaggacttgcacaaccggctgctggcaaggaagatagaccatgacttcatcacccgtcccggtggacataccggaacgtattggaacaactccatagactatcacgtccttttcttcgacaagttctttaagaagtaagtaacttattattcgatggtatagttcacggtgcgtgtgtagtcctgctcgtagccgttccttatatgcctgacgactgcatggcaggaagtgacgataccccggttatctaacgtataagtataggtggtggtctcttcactttctccgttgctgtccgggatgagttgggtaatcagatagtttgcaggttctcccaatatcttcccgtatatggcaaccgcatgcatggaaagcggatacatgtccgtaatgaataggcttggtatttcggagatatttgcaatttcattgtctgatggtgtggtagccgtactgttgtgctcaaaagtgtcaaccttttgctgtatgcgcaatgcccggaagttgctgtagtctattgtaatgaatgagtattcttttccgtcgtccagcttttctgtgatgttttccagatagtatttgtcttcggtgttgatgaggtaggagaaggtgtaagtacgggtatttcctgccatatcctgactggtacaagtggtggcataacctttgtcattcagcgtgtaggttgatactgtacctgcttcgtcggttatcacggcttgatggtccttgtattcgacagtagtggtattctctatctcgaagagttcgtctcctgctgtaaagctctgtttgccggtgtagccggtcagcctgcctgcactgttgtaaaggtaggtgtgggtggcagtaaccggttgcgcatcgctctctatcacttctttgagttcgattttggagaaaggagtggtggggtaggttgacggctccgattctggcgtatcactgccattgttatcatcgctgcaagctgccagtccgccgagcaacagcaggctgaacatgattcccgaaaatcgggtgatgattgtaactcttctgtttagtttcatcctatttgtctttttatttgatgcgtacggcatggcttgcccgacgttcaatggagtttgcgagagtggtcactcttaaagaacgggtatcttcttgtgcgggcggttgtatgcttccgtcgatggcgccgagtgcagtgctcaataaggcttcgttggtatctccaaagggcaggaaacgtgacatgtcgctcatctcattcactacatatcccgagtaggccggttggaatccggattcataatcagatttcccttccgaattgtatatcttgcagacgatgggattcatcgttatcatcagttcggggctggagaaattcctggaacctacattcttgcctacggtagtaccgccgattatgacaacatccatatacgggtcgaggcagttaatcaccatttcggaggcggaggcagtctggctgctggtaagtacgtagagagtattcaggtttaggtttgctccgtttccgatgagtccggaattcagggtgaacggtactatctgcggattgaagcggttgttgaattccaggtaccccaactcttgtcccaaggcggaggaaggtgcaagcatggtacacagcaattctgcgcaactcagtaatccaccgttgttgtagcgcaagtcaaggatgaattcgttgacttgctgtgatgcgaaatattggaatgcgctgcgcaggtcgttgtcatattcattactgttgtccgtggggccggaactgaagtggttgtagaccagataacctattttcttgctgcctgatgtatatacattcttatagtgcaccgggttgtcgttgacgggacgcgccgatgctatctgtctgggtttgtcgtaagcaacgatggcatttttctccacgtcgtaataacctactgtaagttccatggcactacttccatacagtttcttataattctgttcagtaataaagttcccgtccatcttcataatccagtcaccccgttttagcccgatttccgaggccgggcttccgtcggcaacgtaaagaatctgtgcaacaatggcattctcttctccttctacttctatctggttggtagtgaactggaatccgtagctgtaatccgtataggggatgctgcgggtagtggtgatgctgaccagactgtcgatggtggagaatttgtcttcttcggatttgagcgaggcaaagaaagtgaaaggggcttgaaaatagttcaagtcgttggtatgggggatagcgtctacccaatagtaccacacacgcatggtatcgtcaatccagcggtctgtctgggtctgtccggcatactctttccagcggtccaccccgcaggaagtcagataaatgggaagaatcagggttcccaatatgagtatcagtatatttcttgctttcatgggggcaaagatagtgcaaattgagtgcagaactttcatgcttgcatgaaaaagttttgccgaaatgcagtctatcttatctaaagatagaaaatagcttgcttatctaccacaattgtggtataaaattccctaatctgtgtcattgtctgccccggcttatcgctctatctttgcaacatccgaatgagaaacggtttattcacctaaaatacaaacgacaatggaaacaaagaaattgcactttgagactctacaacttcacgttggacaagaacaacccgacccggcaactgatgcccgcgccgtacctatctatcagacaacttcgtatgtattccgtaattcggcccatgcggcagcccgctttggcttgcaggacccggggaatatttacgggcggttgacgaattccacccaggatgtgttcgagaaacgtgtggcggctctggaaggcggtgttgccggattggccgtagcctcgggtgcggcagccatcacttatgcctttgagaatatcacccgtgcaggcgaccatatcgtggcagctaagaccatctacggtggaacgtataatctgctggcccacacattgcctgcctacggggttaccactacttttgtggacccgggcaatctggacaatttcgagaaagcgattcaggagaataccaaggcagtattcattgaaacgctgggaaatccgaattgcaacatcattgacattgatgccgttgctgaaatagcacaccgtcaccggattcctctgattatagataacaccttcggtactccttacttgattcgtcccatagagcatggggtagatattgtagtccattcggcaacgaagttcatcggagggcatggtacgtccttgggtggtgttattgtagatagcggcaagttcgactgggtggcctcggggaagtttccccaactgacggaaccggacccgagttatcatggagtacgtttcgtcgacgctgccggtcctgctgcctatgccatccgtatccgtgccgtattgttgcgtgataccggtgccacaatcagtcctttcaatgctttcattctgttgcaaggattggagacgttgtcgcttcgcgtggaacgtcatgtggagaatgccttgaaagtggttgaattcttgaagaagcatcccaaagtggttgccgtgaaccacccgtccctgcccgagcatcctgaccacgcgctttacgggaaatactttccgaatggaggcggttctatctttacgtttgaggtgcggggcggtgtgaaggaagcgcagacgtttattgacagtttacagatattctcgttgcttgccaatgtggctgatgtgaaatccctggttatccatcctgccaccactacccattcccaattgagtgcacgggaattggaagaacaaggcatcaaaccgggcacggtccgcctctccatcgggacagaacatatcgatgatttgctggacgacttgtcccaggcatttgacagaatttaaaagaataacagtatacgatagaatgaatattgctgtattattgtcgggaggtgtagacagctccgtggtggtacatctcctttgcgaacaaggttaccgtccttctctattttatatcaaaatagggagggacgatgccgattatatggactgctctgcggaagaggatatggagatggcttctgccattgcccggcgttatggattatcgttggaagtagtggacctgcaccgggagtattgggaccaggtggcggcttatgccattgataaaataagacgtggcttgactcccaatccggatgtgatgtgcaacaagctgataaagttcgggtgctttgagcaacgtgtggggaaggatttcgatatcacggcaaccgggcactacgccactacggtgttgagggatggaaagacatggctcggtaccgctgccgattccgtgaaagaccagaccgactttctggcacagatagattatctgcaagtttccaaactgatgtttccattgggcagactgatgaagaatgaggttcgtgacatagccctgcgtgccggattgcccagcgccagacgtcgtgacagtcagggcatctgctttctgggaaagattgattataatgattttgtgcgccgtttccttggcgaaagggaaggggatattgtggagttggaaacgggtagaaagttaggcaagcatcggggctattggtttcataccatcggccagcgtaaaggattggggttgggtggaggaccgtggtttgttgtccgcaaggatgtggaggagaatgtgatttacgtgtcccgcggatgtgatacggcattgcaatacggctatgaattccgtatgtacgattttcatttcattacggataatccctggaagggagcgcaggaagaggtggaggtgactttcaagatacgccatacgccggagtttgtcaaaggcaggttgcaaaaggaggcggagggttaccgcattgtttcggaagaaaagctgcaaggcattgctccgggccagttcggagtggtgtatgatgctgatgcccggctgtgtgtcgggagcggggagatttatatataatattccaccaagtctacgatgcctgccttcatggcatatttggtggcttcgtgcgcattgtttacacccagtttccggaagatattcttccggtggctgtttaccgtatggaagctgaggtttcgttcggcagctatttctttggttgttttccccagggctatctcttttaggatgctccgttcggcagtagtcagtaaatcatctttgatggtaggatgagtgggggaggaggaaccgttgcctgcgagcagcaggttactgacgtgattacagatgaatcgctccttgcgtgaggcgcattgtagtgcggtcagtatctcttctttggaattatccttcagcgctacgccgaatgccatgctgctgaacaatacctggcgcaggaacggtaggctcaattcgtcggaaaagagtagccaatcggcttccttgaagcgttcgtgaagtaccattagctcttcggctcccgaaaaatcaaaaagggtatagtccagaatgacaacggcggtgggatgcaggcgtagttgctgtatcagttctgccttgttgtcggcttccagcagcagggaggtgtctttctgtctgcccaataggaacatcatgcctgctttggtgatatcttgattgtctgcaatgataaattctctcatgacattggtatataaaaaactccgctacaaatgtacactttttagtgtgatttgtggcggagtgggaatatatatatatttatataagggttttaccaggaacgtcccttgaatatgttggattgttccagcggaaccaggttcccgctcaaagtcatggtgttggagttgaagttcgggctgatggttacggttgcgttgttcccgccatcggtcagcgtaaggaatatctgggcggaaatgccgataccctggatgctgaagttacaattcacgttgccccgtttgtcggtagtcatttggatgtccgatacggttccgtctactgttacaccgccaatgccgttaggacctgggtatacggtgttgaaggctacctgcacggtgccacgtccttggttgaccaatacgaagttggtgttggagtttacaaatgcggtctgtccgttgcggaacatcacttggtctgcctccattacgaactggtgagctttcaaggccgccattgcgtcatcgtacgaaatggcatcctgtgcttgttcttcagctttcaggcgtgcacgttctgcgtctctttgggctttacggtctgcgcgcttttcagctctactctcttgtgcatacatggtcgttgttgccatgcttaccaatactactgctgctaatgcaataaactttttcataatcgaatctttttttgtttaggtttaaataaattgttcgttataagtttattgcaagaacaatgcctatccaggattgttcaccggttttttaattattttatatccgatagcagcaataaagatactcattaccggactgataaggttgaagaagcaatagggaaggtaggtcagtgtgggtacactcaaaatggtggcttgcgtcatgccgcaggtgttccatgggataagcggggaggtgacggtaacggcatcttccgtggtacggctaagtagccggctttcgtagcctttctttgcgtaaacgttgctgaacatgtttccggtgaggataatgctgatgtactggtctgccgtggcaaggttcaggaacaatccggaacatacggtggatgctaccatgctggctgtattcttcatgaagcggacgaatagggaagtgatgcttcctagcatgccgcttgccgtcatggctccaccgaaacacatggcgcagatgatgagccagatggtattcatcattcctgccatacctcgtgtggcaatcagttctgtcaacatgtcactgtcagtttgtagactggtactgccatagaatgtcatcattatccctttgaacatattcccacctttcgctatctcattcagtagtcccggttggaagatgaaggcgaatatccctgccagcagagtggagagaaagagtgtgatgacggaaggcactctccgggcaatcagtattcccgtaatcacgggaacagccagtaaccagggagtaatgttgaatttggcgtccaatgctgccgtaaattccgcgatctgttgtgtattgttcgtttcgtgtgtgagtcccattactgtaaagatgacaagggtgatgaggagagaggggacggtggtgatcatcatatagcggatatggctgaataacggtgtttccgttacggatgaggcaaggactgtggtatccgataacggtgaaattttgtctccgaaataggctcccgaaatgatggcaccggctatccatccctcttcaaaaccttgtgccttacctatgcccaaaagggcgataccgatggtggcgatagtggtccatgaacttcccgtcattactgataccaatgcacaaataatgcaggtagaagtaaggaaaaaattcggatggataatctgcatgccataatatataagggtaggtaccaccccacttatcatccatgtgccgctcaaagcaccgataatcaatagaataatgatagctgtggcaacacctgaaatgttgttggtgatggcaagttcataatctttccaagggatgcggtagaaagccatgccgataaagacacacataccagtggtggcaagcagggaaatctggcttcctccactcaaggcgtcacttccgaaagtatggatggtggcgaacagcattcctacgagaaaagcgatgggaaatagagaaacgagtggagagggtattttctttgctgaattcatagggttgtttttgactatgcttggttgacgaatctattatcaatctgtcgtttatagtttgatgcgacaaaggtataacaattctgttcaatatcttccttatcctttgcatgacaaataaaaattatcaaatctttgcgtttgcttggaaaaatgatagtatccttgttatttcttgctgtaaagggtgatggacaacgatattattgccaaaataacgccggtgccgaccacgccactccatccccaagtctgccaactgcttcctgcaaggaaggtacccaaagagccgccgatgaagtaagtggtcatgaaaatcgtatttacccgattggaggcagacgggtagatgtcgaaaatactggtctggttgctgagttggatacattgcatgcctatgtctataagaatgacaccggtaatgatacctgcatagttgtttccgcagaaaaagagcgagcctcatgcaagcagaatcattccgcaaccgataaagttgaaattgcgtatgcctaccttttttacatattttcctacaaaagatgcggttaaggctccggcaatgccgcagagccctagtatgccgatgacatcgctggatgcatggaacggggcttctcccattttgaatgcaaggcaggaccacatggcaaggaatgagccaaaggccagtcctgcacgtatcgagtagattcgtagagaggggtattctcttactaatgagaaaagagacttcatcagcccggaatatttgccttggaaagtcggttgtatgtccggtagtacctttaatacaacgatagcgcatagtaacatcattccagcggcgatgaagtacatttcacgccagccaagcacttcacccacaaatccgctgacaacacgtgatgcaagtattccagtcagtaatcctgagatgacgacacctacattccgtcccttgttttcggggcgtgagaattgcgaggcaatcggtacaaatatttggggtatcatggagcagatgccggtaatgagtgatgctgcccagatgatgtagatgttcggtgccatggcaatggctagaagggaaaatatgagtaggaagaaattcgttaggatgatattcttgcgtcgatagaggtctcctaatgggacgatgaacaataatcccagcgcatatccgatttgtgtaatcatggcaatgaggttcgttttgaattcagaaacttccaattcatgccgcatgatattaagcaggggttgattgtaatacaagttggctacggacacgccagctacgatagcaagtgtccagagtatatgtgccggtaatcctccgttttctttcagttcttgtttcatgctgcaaagataatgtctttctgtttcatgcgcaagatatgtgagtatgataagaatatgtgtgaagtggtatcatctttttagcctttccgtttgttatactattattttgtttgagaataattgattggagctatcttggataagcggaatgttgtattgatatttaaagatacgttgggcatgggaaatgaatggtttagagagttgctgggtatgaaatacaggtggacgaaatgcaggctcttctagcaaacgagggttggtaaggtgaattcgatgactcaaggaacctaccgttcccccattagaccgcctcctgatgacatacttgggattatcctgctattgactgaaaactcgggtatatattagtatgaatcattattacttaaacttataatagtatgaaacatttatcgataataataatagtagtgtcattatgcgttttcctgctatccatcggcgtatatcataaggttccctggtctgttctgccaatagtggctagtggaatctgtatattatgttggcttttgttccatttactctgtatcagtgaagaaagagatttactgaaagagggaaatcagtatttcattgatacctttcaaaacatacgtaatcccatttctttgattaagacaccgttaggggcagtttacgaaggagactgtccggaagacataaagaaggaactggctgttgcacttcatcatataggcgggctggagcagcacttgatagcgttgatggagttgaaacgactatttggcaattctggtagcctggtagttgcagaacatgaaatcggcgcatttatgaggaagaaagtgtcttttttacagtctcatgtggccgggttacagatgaagctggatttggttccggattttgactatgcaagcgcttggtttgatccgggaaagatatctccggttatcgaccggtttgtattgagtgccatcgagtgttctctgccggaaacgcatctctcgatgcaggtttcgttgaagggagattactgggcaatcaggattaaggatacaggcaacaagcgatttctgaaatgttgcagatggtactcgtcgcggcttcctattctgcgacctctgcatggcaagcagtatggcatgggcggtgtgttttttgacaagttgatgaatatatgtgacgggaaaatactgactttggaaaaggaggctctgcttcgatttcccataagatgttcgtgtgcggtttcggggggggatacatccttaaatattccggacacttttcaggtgaatgagtcggaaatagctttccatggtttctcgaagaaaaaaaatatggatagacctttagtgatacttgcggataatgacaagggattcaaggattatcttgagaaacgtttatcggaatgttttgtagtgaggagctttgatgacggtcaggaagcattggaggtaatatgtgaagagtatccggatttggtgatttgtgatatcatgttgaaaggtatgagcggtgaggaactttcttctaaactgaagacgtcgagggacacctcctttattccggtgatattgatgggggcgcacattgatgtgaaacggcgggaaaagcgttgttcttctcaggctgatctctttgtatgtaagccctttaatctggaggaccttaaagtggaaatatccatattgataaataatagccgttttcttcggaagacatttcttcagaaagtttttggagaagattttttaacgaaacctatggagcgggctcagcaggatgccaatctggcatttttgaatgaagtgaagctttacattatggagaatatggataaagaggatttgacagtagatgatattgcctccaggatgtgcatgagccggacaaccttttataataagtggaagttgttgacgggagaagcacccaaatatttgatttcgagaatcaggatggagaaggcacgggaacttttggaaagcggaaaattttctgtgactatggttgctgaaatggtgggtatgcgaaatctgaaaaacttcagaggcaggtataaggagtattttggaaaaacaccgaaggagtttatgaaaaaagtatgatatttatctgaagaaaactttcatagaaaggctgtcacatattagataatggacagcctttgttttgaaatgggagataggagaactgaacatcctaagctatctataaaggaaaatctctcatcgttttcgttttggggataactgggtatatatgattagctttacttgccgatgcaaaaatgttcgaaaatattcccaagtaccatatcgttcgtaacttcccctgcaatatcgcttagatggaaaatgcattcgcggatatcttgtgaaacaaaatctccggatagattttctgctaatccttgttggacccggtggatggcttccaaggcatgggtcaaagcctcgtagtggcgtatattcgtgacaatgacatcgttttgggtaaccgtgggcaggttagcggcagagattagcatttgctgaagcttgtcgaggttggtacgtcctttggcagagatggagatgcattgcacattagtagcggccacggtgaaactggagttggggatggttgaggcatcttgcaccagatcggtcttgttgaatacgagaatgagccgtttcccttcgcaacggggaagtatctgggtagttagttgtggtatccgtgagacggcattcgtggcatcaactatccagagcacgatttccgcctgctccaatttctggaaggttcgctcaattcctaggttctcgatggtgtcgttcgtttcgcgtatgcctgccgtatcaataaatcggaaagttatcccaccaagattgactgtgtcttctatcacatcgcgggttgtcccgtgtatgtcgcttacaatggctcgttcctcgtttagtagtgcattcaacagggtggatttaccagcgttcgtttcgccgatgatggctacgggcacgccgttcttgatggcattgcctacactgaaggattgtactaaacgggaaattacctgctctatgccgtctgctaggagacatagctcggagcggtcggcaaattccagttcttcgtggtcgctgaagtccagctccagttctatgagtgatgtgaagtgcagcaattggtcgcgtagtgaggccagctctttactgaacccaccgcgcatttggctcatggcgaggcggtgagtggcggcagaggtggaggcgatgaggtcggccacggcttcggcctggcttaggtccattttgccgcccaagaaggcccgttgcgtgtactcaccgggagcggccaggcggcaaccattaccgatgagcagttgcaacaccttctgaagaatatagctcgaaccgtggcacatgatttccgtgctatcctcgcccgtgtacgagtggggggcacggaataagcttacaagtacttcgtctatgatgttttcttcttcatggatatgaccgaaggtcagtgtgtatggcttggcatccttcagcttcttccccttccgggcaggggtaaatatgcgggatgttatctctatggcatccggtccggagacacggatgcatcctatggctcccccttgggcggtggctatggcacaaatggtatcttggttcattttatccagcttatttttattcagcaaaaataatggtttctttacaaaaaagagagatggtgattcaacttatgggcttttatcgtaactttgtgcaaatcgataatggatagatgcttataaagcctaatccgcctctgtgcccattgtgggtatagcaggcattgctacactatacagaccagcaacgggcacgtcaggcaggatgtgatgaagtcattactaaaccctactcctaggattggctgaaggaaagggaggagcatttcttgaaggatacttagatacggtcgagtactgttttgataagagtatctatcgtattcttgtatcccgtgttagcttcttttatcaggcggttggcaatgaccatgcataccgtcatggccttgtgccccatcagacggctcaagcctgccagggcagaactttccatctcgaagttggtaatacggtagccgttgtattcaaatttttcaatcttctcattctgatgtgggtcggcaagcggcacgcgtaactcgcgtccttgaggtccgaagaagcccccggcggcaatcgttacgccacgtaccatgtcgttttgtgcgatgcggtctatcagttcagtgcttgcatcaatgacgtagggggcaggggcacacatgttgccggaccatcccatatggttgaggaaggcacgctccatgggcaggtcgcacacggagttgcgtccggcatagaagttgagcagcccatcgaaaccaatggacttttcagaacatacgaatgtgcctaccggagtgtagggttgcaagccgccgcaggtgccgatacgtaccagctcaaggctacgcagacggggcttttcttcgcgcgtctcgaaatcgatgtttgccagggcatccagttcgttcatcacgatatcgatgttgtcacatccgataccggtggaaaccaccgtaatacgtttctcctggtaagtaccggtgatagtcttgaactcgcggctttccacttcacattccttgttctcgaaatgggaggcaaccagtgccacccgtccggggtcgcctaccaagatgactttgtctgccagccattcgggctttacgtgaagatgaaatacagaaccgtcttcattgatgatcagttcggaagaggcgaaatatttcttcatatgcttgaggctttaatcttttgtttataaatagaaacgccgggaaccgattcttgttcaccggttccggcgtttcgtcagttactttccgggttatttactcaacggctggctggtattgcccgtcgtcggtttggcaatgttttcgcgcatggaagtgtcggcttctatattcttcatccggtaatagtccatgatacccagattgccgttgcggaatgcttcggccatggccttgggtacttccgcttctgcctcgataactttggcacgggcttcctgggcttttgccttcatttcctgctctgtggctacggccatggcgcggcgttcctctgccttggcttgagcaatgttcttgtcggcattggcttggtctatctgcagggcggcaccgatattcttacctatgtcaatatcagcaatgtcaatggacagaatttcgaatgctgttccggcatccaaccccttgcgcaataccagtttggagatagaatccggattctccaatacagacttatgattctctgacgaaccgatggaagacacaataccctcgcctacacgggccagaatcgtgtcttctccggcacctcccaccaattggcggatattggcgcgcaccgttacacgggccttggcaatcagctggataccgtctttggcaacagctgtcacgggaggagtgtcaattactttggggttaacggacatctgtacggcttcgaatacgtcacggccggcaaggtcgatggcggttgccatctggaacggcagctcgatattggctttagaggcggataccagtgcgtgtaccacccgctctacgtgacctccggcaaggtagtgcgcttccagttcgtcgcgcgtgatgttttgcaatcctgctttatgagcttcaatcatgccgggcacaatgatataaggaggaacattacggatacgcatcaggaaaagttgtaccagcgagatgtttactcccgatactttggcagacagccacaagaagaacggtacataatggaagaaaagtaccaggaaaataatgcctcctataatgaggaaggcggttaaatacattgtgcttggatccatgagattaaatattaattgttagttataaataggttgattcctgaaatttcactgcttgagccgctccactaagaggactccgtcggcaatacggtctacgataatcggagtcttttcgttcaggaagccgtctgatgactttacttccacgatgtctccgttgatttcggcatagccgataagagccaggcgggtagtggttacgcctatatcacctaccttgactttttcctcggcactacggtctactttggaggtgatgttttttttcaatgcaattttgtcgagtgtcttggagcgcatgaaccataccaacgagccgatacaagccagggcagatatgataagcgtaatgacacctgccgtggtgcccatataggcaaaggcatagtagttggcaaagatgatgcaacctcctgccagaaaaccggcaacgctgatgcccggaattacgaataattccactaagaacaagattactgctcctataatcaatgaggcgataatgagtatatccatagttgtctttatttggtggcttgtttttccaggttgcgcacttgaatggcagtttgctccatctcagtggacaattgccgtacacgttgctccaggtcgaggatggcggcggacatcttgtccttttcctgcttgttggctcgggagtattccgaacgcatatcttccagtttctcctgcagttgtttgtagttctgctccagctgattgtatttgccatacgaggctttggcctgcggggagcggaaatcgtccagctggtagtaggtggagtggtcgtcaatgatgaattggaaatcatgcttcttggtggtccgcggctttgcgttggcagcagtccgaagcctttcttgggcggcctctaccgcatcggtgtccgtccatgtgtccttgatagagtgaagttgcgccaatgatatcatcttgtccgggtccatcccttcgtagttgtacacttgcttggatgagttgggaatgaatacatagatgcacactttgccttccggctggtagcggtcggaggcaaaccatcccaagtcgttgaattcgtcgatgacgtacatatagtcgttgtagggcgaattgaacggcatgcccacattttccggcatcagataggagtcggtattcgtattgtaacgggtgacgaaaatatcatatcctcccatcgagccagggccatccgaagcatagtagatagtgataccgtccgtaagtacatagggatagtctgcattcatggcctcgttgatgcttccgggcaacaagctgccatcactccatttgtccagcaacttgttgcgcgaaaggatactgagggtgctgtccggttgcatttcgctataatatagcttattgcccagctccgtttcgtataccgttccgccttccttaccggaatcattgaagtaggtgtcgtacatgaacagtttgcccgattcggggctgattttgtatgcatccaggaatttttccttgtctaccacaaagctgtcgatgaagcagacctcttccacgcctttcagcatgcgcaagttggatttgcttttttccaataattgttcggcctcttcggtggagcgttttctctttctcaggtcggaaatgtaggtctcataagtttcgatggcatcttcgaaccgatataaatcattgtatgcccgggccaaatagagttgcccgctggggacgcgtctcttgacggcgctttccaggtgtttcaaggcttctgcgggttcgccggtttccaggcaacatacaccgtaccataggttgtaatttccattgccagattgtgtcttgacgagttttttgaaggcgggcttggcttcttcgtattctcccttctcgtacaaggctttggcttctgccaggctttgtgcggaaattgttatgctcaaaaggccgaatagaaagaaaaggatatattttttattcatattgatacatgctgatttgttcagaaggtcaaaaatacaaatttatcgtgaataaagctggtttccgtaattctattttgttaattcttctttaaatcgttcttttgccttacttttgcaaccggaagagctataattcataacttataactcataactcgtatcaatggcacaatttactgaagaagaaaagatgttgcgccgcatagacaagcggtttagcaaaggtgtggtggaatatgggctgatagaggacggcgataagattctcatcgggctttcgggaggcaaggactctttggcgctggtggaattgttggcacggcgtgcccgtgtctataaaccccgtttttccgttgtcgccgtacatgtagtgatgaagaatataccttatcaaagcgatgtagactatctgagggagtacgtagagtcgtggggagtgccttttgttctctttgaaacggagtttgatgccacgaccgatacccgcaagtctccttgttttctttgctcttggaataggcggaaggcattgtttaccgtagccaaggagcagggatgcaataaaatcgcgttaggccatcacatggatgatattctggagaccttgctgatgaatatcacctatcagggagcgttcagctctatgcctcctcggctggtaatgaagaagtttgatatgacgattatccgtccgatgtgtctggtacatgaggcggatttgatggagttggcgcaagtgagggggtatcgtaagcaggtgaagaattgtccgtatgagtcacaatccagccgtagtgcaatgaaaggcattctgaaacagttggaggaaatgaatcctgaggcacgctatagtctatgggggagtatgacgaatgtgcaagaggaattgctgcctgcaatcattaatcactaatcactaatcattaatcactatatgaaagcattttataccattttgctattgattgtatctaatattttcatgacgtttgcctggtatggacatctgaagctacaagagacaaaagtcatctccaactggccgttgtatgccgtggtgctgttttcctgggtaatagctttggcagagtattcttgccaggttccggccaatcggataggctttttaggcaatggaggcccgttctcattgatgcaactcaaagtgattcaggaagtaatcactttgattatctttacggtgttcacaacggttcttttcaagggggaaacgctgcattggaatcattttgccgcttttgtatgtctggtactggcggtatattttgtgttttataaatgatgggttaatcgcatttgcacattatttcatatacttctccattccttttgttaagaacgtttgaagctttccttcttcatccgtataaatgaaacaggcgtcgatatccggatgtgcatccgccacgcgttctgcttctttcagccccatcaccatgaatgccgtggcataggcgtctgcactcatgcaatctttggcaatgacggtggctgacaagatgctgtgctgtaccggatagccggtacgcgggtcgatggtatgcgcatatttctttccgtctttatagtagtagttgcgataattgcccgatgtagccatgcctaaatccgtgacttgcagcactgcttgcagttcctggttcactgccagtgagtcgtctatcggcttgttcaaaccgatgcgccaaggtccattttgagggttttgcccgtgaacaaccacttctccgcctatatcgaccataaagttgcggataccctttttcttcagaagttgggctatgacatctactgcatatccttttgccacagcgctacacgagagcattatacgtgggtctgttttcaccactttcccttcatcggacaattttactttttcgtatcctgtcatttccagcaggctgtctatcatggcagagtcggggaagttacccttcttgaacccaaatccccaggcattggcaagaggggcaacggtgatatcgaaggcaccatcggtctcccgggagatttccatgctacgtcggaagacgttggtaaagaatgtgtcgggcacaatgtcctcgttgcggttgatgcgcgtaatggtcgccgtatcattgaaaggggacaaggaaccgtcgaaacgtttgagttccgcttctatctccgccttcagattctggtcacattgataagtcactttatatatcgtaccgaatatcagtccgttatccgtctgataaggagtgacttggttgtggcgggcaagtatccagatggtacccaataccagtagggcaatccataaaaaattccgttgtactttcttttccatatcctatctgagtttttactttttaattaaaagaagagatgctctatcaatatcttggtgccgatgatgacgaggataatccctccccaaagttcggcgcgcagtctgcgggctatgccacatccgaaacggatgccgaacatcaggccgaccatcgacaaggcgaatgatacaaaaccgataatgccgatgggggaaagaatagccgagaattgcttgataccgaggaatgcaaacgaaacacctaccgccaatgcatcgatgctggttgccacggccagagcgagcaccaccttcaggctggtagggtcatactcgtgcttgcaatcttcgtccttgaaggattccattatcatgcgtccgcccaggaaggcaaggataccgaatgcaatccaatggtcaatactttctatcaggtggctgaaaaaactggcgcctatccatcccagcagaggcatcaaagcctggaaaaagccgaagctgatggccatcaccagcatagggcgcagccgggcgcgtttcaatataattccgctggctatagaaacggcgaaacaatccatcgcaagtcctacggccagtagccaaatctctaaccctgtcataagtcgcttaaagaggtagtttataagttatcgtataggttactcccatcgtgttggagccatatttcccgaaaccgggcacataccacgggtcaccgtattcatcggccgaggcagacaatttgaacttgaagcgtagtgaccagcccatgtacaatgccttccagacgtgcgcccggataccgacacaaaattccgcccattgcatggagcctttcattcctttatggttatagggcaggctgcctccccatatctcgtcgtccagattcggattgcctacgatgccaccgtatatcgggtcgtccagtcccaaggcgtctacatcgtacttgaagctgcttacaccgtaacgcaagcctacgagtagcatgtgtccgtgctgcttcttgtatagcgtgttatagtccattcctatgcggaagtagggggcgttgcttttgtagtgtatgcctttgtcactccaggtgtccgtggagccatatcccagttcggcaatagggaagaagcggttcttgaggtttacatccacggccacttcggaactcaggaaatctcctccaaatacggaacttccgattccccacaagtccaagccgacggacatgccgttgtataacggatagtgcacttcttctttcgcgtccttcttctccttcttgggaggtgctccctggggggggacggtaggattcccgttctgcgcccgtagggggaggaacatcagcaggcagagtgccagactaatagaataacttaagattttcctttccatagatgcctgcttcattgtctttgatgtatatcgagtccagagagatgcgggtgcacgttacgtctgtgatggcctgcttcatctgatagccgcaatccatcgataggaaatagggggtgttggtgtggcgtatcaccatcgtgtcactcttggtccggctatacttgaatatcagcttggtggaatcctccgtatagcgcagtggcagggagatgtcgtgtaccttcttctggttgttgatgatgatggagtcggtgccgtatgctgtgacggtgagcgagtcgagcgtgtcgttctccacgtattgggtttcggggtctactctataaagaatgcaattcaccatggggcgtgccgtcatggagcaatctgcctcctccgagcaggagatagctatgcttattatcgggcaaaggatagctccgagtatgacaagtctgactaattttttcatcgttaaatggttttctctatttgatatttgtttcgttccggggcattacgtgaaatcagctctccgaggaatcctgccacgaacagttgtgtgccgataatcatggaggtcaacgagaggtagaagtagggagagtccgtcacaaggcggtagggcatgccatggtgcatgtagtacaacttgctgacacccactatgaccacggctatgaagccgaagatgaacatcagcgaacccagcaatccgaaaaagtgcatgggcttgatgccgaaccgggaaaggaaccaaagggaaagcaagtccagatacccgtttacaaaacggttcagcccgaacttggtctttccgtatttgcgtgcctgatggtgcaccactttctcgccgattttcttgaagccggcgttcttggccaggtaagggatgtagcggtgcatttcgccgtatacttctatattcttgaccacctctttgcgatacgccttcagtccgcaattaaagtcgtgcaggtttttgatgcccgatactttgcgggcggtggcattgaacaatttggtggggagggtcttcgacaacgggtcgtaacgtttctgcttccagcccgatacgaggtcatagccgtcttgggtaatcatgcggtagagttcgggtatttcgtcggggctgtcctgcaggtcggcgtccatggttatcacgacgtcgccttgtgcttgttcgaaaccacagaacaatgccggcgacttcccgtagttgcggcggaacttaatgccccgtaccttgtccggagcttgtgcctgcaattgttcgattacctgccaggaacggtcggtacttccgtcgttcacgaaaatcacttcgtatgaaaaaccgttggcattcatcacccgctcaatccatgcgaacagttcggggagtgattcttcttcattatatagtggtacgacaactgaaatatccattgatgtatgatttttctattttacaattgaaataacatttctttttgctgttccgtcactctgccggagcgtcgtctttcttgcgtctcatcacgaacaaggcggtggggaaagccagtatcgaaccccaaaatacattggacgatatcatctgtagcgtaatgtcgatagggctgagtagtcgggctgtctccagagcttcctgataggtggcgatgtacgaatccattcccggcatgttgctttgggcaagcgtgtctaccatcgtttcgcacgtgtttatcacatatccgtggtctatgaacctgaagtagatgtagtgtgccacggcggcaagcagcgcggcaaacatatacatgaaaacggtgaatacccatgcatgcaggaagctgatgccgcctccgcatacctgattacgatacatccgtgcataataatatcccataaaaggtacgcatagcgtgagtcccatgaaaaggaaaagtaaaaaaggaaccgacagccccacaggaaagagtatgaacttcaatatccagaaacctcccatataggtaccgaacagcattgcgtatcgttgcatgtaacctctattttctgccatctttcttagaaataatatgcaaaggtacaaatatagttggattcaagggcaagccgatgtgtagattttaaataaattagaggattctttgcggggcaaaaagaaaaaagcaggtaacactttcgtatcatctgcttttctttcgagcctcttgtcggattcgaaccaacgaccccgagattacaaatcacgtgctctggccaactgagctaaagaggcgggtgggtaagcttgctatatcgcgccgctacaaccaactacctttgctgcgatcaagccctggaggattcgaagggagctggccgtataggacttacccgtttttgttttgcggttgcaaaggtagacattttttttgaaatctgcaatagcttgtggcgatttttttatttgtttttttagattctctgttctattcctcttcatggccttcttatatagacactttggaggggaggtacggattctttccggcattacgatggacaaatattccttttactagaaagtattcgtccgacatatgtaaccttatcgtccgacggctgttgaattatcgtccgacagctgtcggacgataattcaacagccgtcggacgaatacttcttagtataccggaatctaaagtatagttatgcaaaagattgccatttgagaagaaaataataatcggggacaaaaaaacagataggctattgtgtgctaccttgaaaataagcattatttttgtgcaactaactatatagtcattatacgcatgaacaaacacatattgtcattctacctttttttctgcctttttctttttccccctttggtcgaagcaattgccggctggaatagctttatcgtcaattttgataaaagtgtttatggtaaggggacccagacttggcagatagcaccctatgatgacaagtgggtatatttcgccaacaagaacggtatggtgcaatttgatggcaatgtctggaatgtgtttccattgaacaatgcttccgatgtgcgttccgttctggcttctgccacccaaaaaagaatttatgtggggggcatcaatgaattcggctattatgaaccggatacggacggttctttggcctatcattgcatgtccgatactttggagagttccgttcgttttcttggaaatgtgtggggcatccatgagacagacaatatcttgtatttccaaggggacgggtgcgtggtgaagtacctgaacggcaaatataccgccattgaaatgaatgccaagatagactgttccaatatggtcaatggtattctttacatcggtacggacagaggcgtatggcttttggttggaaacacttttttccctcttcagggtgccgatgcgttggcttccaagcgtattcgtggcattataccttataagaaaggtgttctggtggtgactgcatacaacggactttactattgtgacgggcgtacgatggaaccgtttgtcaccggtgccgaagagtttatgcgtgagaatgaagtcttttgcgtagccaaaaaggatgataagattgccttgggaaccattcataaaggattggtactggtggattgcagcaccatgcaactgaaatatttcaatgagaacaacggcttgcgtaacaatacggtgctttctgtctccttcgatacgaccggaaacctctgggccggtctggatagcggcattgactacgtctgtctgagttctccttttacgaatctctattcctatccttattcctacggcacgggatatacggcggcggtagaaggcggttatctttatttaggtaccaatcggggtttgtattacacctcgtatccggtacagatgaacggcgatttgccggatatccgtccgatgccccaatccagcggacaggtctggaacctttgccgtataggtgatgaactcttctgtctgcacgaccgtggtattttccttatcaatggtacttccgtaaaacgtgtgacggatattgccggcgcctggtgttgccaacttgtggcaggacgtacggaccttatgtatgtcggggtatataacggtatttatttggttgggaaaaagaatggagaatggcaggtggttggcaagattgagggtgtgaacgattcttgccgtctttttgagcaggaaagtgataaggtgatttgggtgtataatacagaccacgttacccgtgtggatttggataatgatttgacaaaagctgtccgtataaaggaatatagcgcgaaggatggtttcccggtaggacgtgatatgtatatagcgaagatagaagaccgggtgtattttgccactccccggggaatctataagcataatcctcataaagatgtcatggagccttgtccggatatgaacaaccttttgaatggcaccacggcctattcgcatattttggagtatcacgataagttgataagtttgagccctcacgaaatctgtattgccaatctgggtacctataagcggggggcgaatacaagcattaatcccatccagcaatcgctgattgaactggtacccggttttgaaacgattattcctctttcagattcgctgatggtggttcctaatgaaggaggtttcgctttgttcagtatcccggccgtaagggagcgtcaggatcgtagccattccttatatataaggaacatgtatctgtcctatcccaaggattcattggtatataccgcaaactttttaggagagaagccggttccggtgatagcttattccatgaattccgttcgttttgactatgccctttctctctttgcggtaggagatgatgtccgttttcaatatcgtctgaataaggggagctggtccgattttacaacggtacgcaccaaggagtatagtaatctgtcggaaggtgaatatacgtttgaagttaaggcggtctttcctgacggtacgacatcatcggatacaattgctttccgtatacttccgccgtggtatcgtagtgctgctgcatacgtttgttatatcatcttggctttgcttgccttatggtatgtctatcgttgggatgatgtccgtgtgaaacggaagaaacagcaggcggtaatcgagaaagataaagagttgcacgatatggaaagggagtacgaagaggagaaagcccgtcaggaaaagcagattatgcagctggagaaagaaaaattggaatacgatttgcaacataagagtcaggaaatggccaatctgatgataaactttgtccgtaagaatgaaatgctgactgaaatcaagtcagagatacttaaagtatccgccttgctgaagggtgagggggctcgggaaggaaaacagcaactcatacttattaataataaaatagacggtaatatacagagtgatgaggttttgaagcgtattgaagaccagttcgatttgatacataacaattttatgaaacgtcttcatgccaagcatcctgaactttcccacaacgaacgcatgatgtgcgcttatctaaagatgaatctttccacgaaagaaatagcacctctgctgaacatttcggttcgtggagttgaaacaatccgttatcgtcttcgtaagaagttcgctttagagagagaggatagtttgacggattatttaagcaataaactgtagcctttagatattaacttcctttaaaagaaggaagagtatgaaagggaggaatgttaaatttctcccttttgtgttatataacatgttgtgacgtaatacttaaaagtatatattaattattgattattagtaagttatttgctgatgacgtattgataacgtatttgaatttcagatttgacgtatttaagaatgattgttttttatttgttttattgcattttactctatgtttgcactgttcgattgagaacaaaaccgagaaacgttaatcttaatttagtaaaacttatgaaaaagttattatcagttttatttctgttaagctttaccttggcttctgtatatgcccaaaatatacaggtaaaaggtacagtggtaagcggttcggataatgaaccgttgcctggagtaaatgtggtagttaaaggaactaccaatggtggaattactgatttggacggtaattttacattgtcggttcctgccgacgcaacactttctattacctatattggttttaagtcgcaagaagtagcggtaaatggaaaaaattccttgaaaatagttcttcaggaagattcagaaacgctggacgaagtagtagtggtggggtatggtgttcagaaaaaaagtgtggtaacagcatctattgccaaagttagtagtgaggatttggaaaacaaatctccggtgcgtatggataatgcattgaaaggtttggctgcaggtgtggatgtaacttcagcttctggtcagccgggtgattctcctcgtgtacgtgtacgtggtattggtactatcaacaatagtgatccgctctacattgtagacggtatgcctattgggggtggtcttgattttgtaaatcctaatgatatcgagtctatcgaagtgttgaaagatgctgcttctggtgctatctatggtgcgcgtgctgctaatggcgttattctagtaactaccaaaaaaggtaagatgggtaaggcacaaattaattacaatttttcttatggctggcagagtgcatggaagagacgtgatgtgactagtgcgacagactatgctatccttcagaatgaagccaatgtgaatggtggtcaggctccaatttatgcagatccttataatttgattgatgctaatggaaattctatcaaaggatttggcactgattggcaagatcttgttttctatgacaatgctccggtagtgaatcatgatgtgacagttagtggtgcatcggaaaaagtaaattattatttgtctttggggtattattcacaagatggtattgttggtggtaatcacggacattctaattatgaccgtttgactattcgttccaatactcaatataatctaattgatgcatctaaagaacgcggtttccttaataaattggatttaggtgtaaatttggcttatatgcgtacgcattcaacaggtgttggtactaactctgaattcggttcaattttgggatcggctctttatctgtctcctattttgacccctacattgactggtgatgcagctgaaaagatgattgaaacttataaagattttgatttgcctcgtgatgcaaatggtgatccttatacagtacctggctatggaggagcttatcaggaaatgaataatccgctggctatgatgacattgactcctacaaagaattggtcgcataagtttgttccaaagttttctattgatcttcaattgtgggataatttgaagtatcacttcaattatagtgctgatatgggattttggggtaatgaaggggctactaagagcaagtattatctctcagctaataataaggcaacacatactaatgcatcttcattcaaggcacagaatgtgacatggcagattgaaaacacattaacttatgacaaaactatcggcaaacatacatttggtgttgtattaggacagtctgctcttaaatataagggagatcaacttggtggtaaccgttggaatctggtgaatcctaataaaccttctattgattatgctacagggaatgttgaatatacaaaggatgcagatggtaatattactggtgctacagttcagtatggcgtttatggaggtccttatacagaacatagaatgtcgtctatgtttgctcgtttgagttataactataatgaacgctatatgattcaggctacaatccgtcgtgatggttcaagtcgttttggtattaataataaatatggtacgttcccttcagtatctgtgggatggaatgtgacaaatgaagagtttatggctgatacgcgagaatggttgtctaacttaaaggttcgtgccagttggggtaagaatggtaatgataacatagccgaatttggttatacttcattgacggccatgggtaacaatgtccttttgggtaaagatgccatcaaatggaacggttctaaagcacaacgtttggcaaatcctgatttgaaatgggaagagagtgagcaaactgacttaggtattgatttgggattctttaataatgctttaacattcagtgctgactattacataaagaaaaccaatggcatgattattacgatgcctatcccgagttatgtaggtgaaactaaacctcttggtaacgtaggtgatatggaaaatagtggttttgagtttgaacttggctataaatggaatattgctgatgctaaatttgcagtaaagggaaatgctacttatcttaaaaatgaattgaagaatttgggaaatgatactggctatatggatttagatggtattcaaggattctctggtggtggtacacgcggttctaacggacaacctttcccctatttctatggttacaagactgacggtgttttccagaatatggatgaagttcgtgcttatgtcaataaagatggtaaaatgattatgccggatgcggttcctggtgatacacgttttgtggatgtaaatggtgatggtagcatctcggcagatgaccgtactaacattggtaatggtactccggattggacttatggtttgaatcttaatgctgattggaaaggctttgattttaatattttcttccaaggtgtagctggtgctgatgtgtttgatggcacttatcgtacagatgttgcttctggtaactatccttcttggatgttgggacgttggactggtgaaggtacttctaataagtatcctcgtctggctgtcggtaatgcaacgaactggatggtatctgatctttatgtttgtgatggttcatatcttcgtcttaagaatattactttgggatatacattgcctaagactcttactcgcaaacttactattgaacgtctgcgtgtgtatgtgcaagctgaaaatcttgtgacttggaccaaatattggggatttgatcctgaaatttcttcaggtgcaacttctcttggtgttgaccgtggtatttatccgcaggctcgcacatatacagtaggtgtaaatgtttctttctaatctaaaaataagaactatatgaaaacaaataaaatattagcaataggcttacttgctgccgctacagtgttgactaccggttgcagtgacagttttcttgaggtggaaaatccgacaggtgaaccattggaagattattatactacggatgagcatattcaggaagctctgattgccgcctatgaccctctccattggccagattggggattgggacagtacaatgccttgaatattgacggtgaaattatgggcgataatttttgggtaggtggtgcaaccaagaccgatatgcagaattggcatatgttgtttaattatgaggctaatgaaaataatacacttggctctctttggacagtggactattctggtatcaaacgttgtaatgacttactgaaatatcttgattggggtactgatgttactgaggccaatcgtaaactctatgagatgcaagcccgtttactacgtgttttctattataatatgttgtggcattattttggtaatgtacctttctatttggagaatctttccgaacctccttatacggctccgcaatatactgccgatcaggtttatgctgagttgatcgcagaacttgaagctgtaattgactctaaggtgttacctttgaaatattataaaacaatcaaagaaggtaaagaagttgacgacgaaggtcagttgggacgtgtcactcaagctatggcttatatggtatatgctgaaatggtaatgtatcagaatgatgaaagtcgtttctcaaaagctttaggttatatgaaggagcttattgatagtcctagctttagattgaatcctagttttgccaacatctgggaaacggaaggtgaatggtgtgacgaatctatctgggaaattaattatgagcaaactaataacgaacgtggctggggaagtccgttagctgttggtggtacagtgcttcctactctgatttctcctaactctttcccaggtgatgatggttggtcaaagggtaatgatggctggggatttatgcccatgcgtcttgaaacttatcaaatgtttagtaaacaagacaaacgtcgtgatgcaacttgctgggtgattgccgaagatgtagaatatacgaaacgttatcaagatactcatatttggttacaaaaatatcgtccgtatgataagaacttcaagcagtcttccggtgaccagaatttgaactataataacaattatcgttattatcgttatgctgagacattactaaatgctgcagaactttctcttcgtacaggtggaagtggtacaggtgaggctaagacatggttgaacgaagttcgcacccgtgccggtttggctggacttgcaaacgttacggttgacgatgtacttacagaacgtcgtttggaatttgtaggtgaaggcaagcgttattttgatttggtacgtgctgaaggaatcagtggagcatcagccagcaataaggctactactgcactggtccccgatgaatatggttaccgtactaattcttggactgccaagaagaaatacattcctattgcacaaggagagttggattccgatccggctttggttcagaatgcttataaatagtttaccataactccattaataaataattgatatgaaaaatatatttaaatatatggcaggcgtgttggttgctggttttgcaatgacttcatgttcgcctgaagattttacgggagccaatggcaatatcccacaagcatcggattatactgataactttaaagttactgtagatcagacaaccaattatgcaaactttgaatttacttctgctcctggagtgtctcctatttggataattgacggcgcttatcaagcctcatatggtttttccaaatattatcgtaaaaaaggttcatatacagtagaatgtaaagtaaagaacgcaaatggcattagtgatggttcgataaccaaaacctttgaaatagagaagactattatgaacggttttggtggttttgtggaagatagtgaatttaacatgtttaagggagtaactttcaatgtggcatctttctactatgctccaggatgggggcagattgcagatccaaaatatacttatcagaatggtgcatttgttgtttccttaccggaagctactaccgatcagtggcaagctcagatgcatgtggaattggataaggtaattgctttgtcagtggataaaacctatgatttttcggtgataatcacttctactaccaaacatccgggcgtgacggttaaagtacagcagaaaggtgatgacaatacgtttatcaatatgcagcgtgtggctttagatgctaatgagcctaagtgtatatggttcagtaacgtacccggtgtgaatattaccgatttgaagtttgcacttgattttggtggtaatgaagctaatacggatattactttggaaagctttgtcttgaaagaccatgctaataatgacggtacggaaattcctgaagtacaagagcctgaaccttcttgggtgaaggtggatagtgaagacaatctttggaacggggcaacctttaccaatactttcttctatgcaaacccggattggagtgctagacctaatccagatttagtggtggatggaaatgcttatacactcactttccctgatgctactgaagcacaatggcagaaccagttctcgtttgttacagatttgtcagccgatacagaaactgcctatgatttctgtgtcactctaaatcctagtactgatttgaagggggtaacagtaaaactggttcagactgatgaacctgatgtcaaacatgatgataacttcttctttgcagaacagacggatttgttgggtaatgaagataataaattttgggttgcaaataaaaaggcgcctaaagatatgcatgctatatctttagtcttggattttggtggaaatcctgctgacacaaaagtgactattaaagatattattttccagactcatagagattgatggctagtattagatagaatattggtctgctaaaagcagtgaataataaaaagggggaaggatgtgggttatcttggcaattgctggagtttcatcctttccctttttctctacttatgttgtaaaatatatatatatatgaaatactattgtctattatctattcttttgttttcgttgattgcttgtggcagtagcgatgacaaggaaccgcaatccgaggatgttaccattaaatgttctcctgaaaagatagaggctgttgcacaagctagccaatatgtggtgaatgtggtttgttctggtaaagagtggacagcttttgcctctgatgattgcagttcatgggtcaaagtaaatgtaatgggttcttcttctagccaaggcacagcgacagttatagtcagtgctcatacgggtactacttctcgtactggtacggtggtggttaaatctggtgctactcgtgtatctattcctcttacgcaagcggctcctttatcagtgtcacagactgagttgtattctaattctataggagaatcttttgtcttatctgttattgcttctggcgaatggaatgtgaaatccaatgatagttggattagcgcagaaaaaaatagtggggaaattgttgtgaccactttagctaatgatgcaaagatttcccgtacgggtacagttgaggttgtggctggtgcagagaaagtaacggtaacagttattcaagaatcggctgaagatctggatatcaatactcctgaggggtatcggttggtttggcatgatgaatttaatgagggcacatctcttggcaatgattggacacacgaggttcaaggagcagggtgggtaaataatgaacttcaaaattacgtcaatggttctgctgacggaaagcgtgtgacagaacttgtggacggtaagttgaatattaattgtttcaaaggctccgatggtaaaatttactctggtcgtgtgtatgctaaagtgaatactggttgggaatatggctattttgaagcacgtatcatgttgcctgaaggcaaggggacgtggccggctttttggatgatgccagttggtaatgactggaatactaacccatggcccatgtgtggtgaaatagacattatggaggaagtgggagtcgtacccaacgaagtctcttcgtctatccatacgcaagattataatcatactataggtacgcagaaaacacatgccatgactatagaacaggcagaaggagaatttcatctctatgctttagagtggacagaagatgccatcactacatacgtggatggcaaggtacagttggctgttaccaagcaacaattgggagctggtcataatcaatggcctttccattatgctttctatcccattctgaatctggcttggggcggtgattggggtggaatgaacggtgtggatgagtctgctcttcctgtaacgatgaaggtggactatgtacgcgtgtttcagaaaaaatagagccttcatatttaaataaaatttaaatatgaaggctgaatgttttttatttataacataaataccttatgctttaggacaattgataatgaaaaaagaaaaaatatttatttttatctgtttagttttgttgtctgcctgttctccttcttctttagacggcattgtaatagagaaagcggcagacggttataaactttccattgacggaagagaaacctatattaaaggcgtaggcggcacatatcggttggacattgccgcccagagtggtgccaatgccttcagaacctggggaggtaatgtggaggagataaagaaaaacctggcattggcttcggagcacaacatgtacgtaatgcagggaataggcatgaccaaagactctatacgctattacgatgatgaatataagaacaagatgcgcgaagaagtccgcttgttggcagaaacgttcaagaatgatacgagtttgctggcttggggtattggcaatgaaattgagttgggaaatgctaatatagctgccgcatggaattttgtggaagaactggcacagctgattaagtcgatagacaagcgtcatctggtttcgacagtgatttcctacaatccgtcggcattggactctgtggcaaagtatgctccgtctctcgattatgtgggcatcaatgtatatggtccgatgggagaggtgcaggctgttgttgaccggtcggactacaagggtgcatttatgattaccgagtggggaccgaccggttggtgggaaacagcgtcaaccgagtggaaggcacccatagagcagaccagtgaagaaaaacggcaggtatacgaagagcgttatacgcaatatatttctgccaatccccgttgcttgggctcttttgtattcttgtggggacaaaaagaagaacgtacgcctacctggttcagtatgtttgtagaagacacggtggatatgctgcctctgaaaggagaaaagactcctatggtagaggctatgcaaagagtgtggactggtaaggaactggatgaaacggctccggtaattctgggtatgatgactgtcaatgggaagagtgctattgataatgtccgcatcaaggcaggtgcttcattgaaagcagaggttgcggccatagacaaggaaaatgattctctgacttatgtttgggaagtgcttaaagaagctacagtgctgggctttggaggttcttatgaaccgcgtccggaaagagtcggtgaggtggctatgtcagataaaaatgtgtatgagactgcaattaaagttcccggagaatatcgtttgtacgtatatgtacttgataatacgggctttgtctccacagcaaatattccatttcaagtaatagattaaagatgaaaacaatgaaaatgctctctgcttgtttgttgctgcttccttttatatcttgtactcaagtgcaggatataaaaaatgatgcagtcatcgagcagaaaatagaaacgctgttgtccagtatgacattggaggaaaaaattgggcagatgaaccagatttcttcttatggcaacatagaggatatgagcggattgataaagaaaggtgaagtcgggtctatcttgaatgaagtagatccggtgcgtgtcaatgccttgcagcgtgtggcaatggaggagtcccgcttgggcatccccttgctgatggcgcgtgatgtgatccacggtttcaagaccatattccctattcccttgggacaagcggcatctttcaacccgcaggtggctaaggatggtgcacgggtagcggctgtggaggcttctgctgtgggtatccgctggacatttgcaccgatgatagatgtggctcgcgatccccgttgggggcgtatggccgaaggatgtggcgaagatacttatttgacttcggtgatgggtgttgctatggtcgaaggtttccagggagattcgctgaacagtccgacttccatagccgcatgtcctaaacattttgtaggttatggtgctgccgagggcgggcgtgattataattccactttcattccggagcgtcgtttgagggatgtataccttcctccttttgaagctgtggccaaggcaggggcagccactttcatgacttcgttcaatgacaatgacggagcaccgtctaccggaaacacttttattttgaaagatgtgcttcgtggtgaatggggatttgatggaatagtagtgtcagactgggcttcggtagccgaaatgatggcacatggctttgctgccgattctaaagaggcagcaatgaaggcggtgaatgctggtgtggatatggagatggtcagctatacgtttgtcaaggaattgccggaattgataaaagaaggtaaggtcaagaagtctgctatagacgatgccgtgcggaatattctgcgtatcaaattccggttgggactgtttgataatccttatgtggatgagaaacggatagaggaactttatgctccttctcatctggaggctgccaagcaagctgctgtggaatcggccatcttgttgaagaacgaaaaggagacattgcctttgcaatcttcggtaaagacggttgctgtggtaggtccgatggcaaatgcaccttatgaccaattgggtacctggatatttgatggtgacaagacaaaaaccgtgacaccgttgaaggctatcaaggaactggtgggggacaaagtgcaggtgatatacgagccgggtctgacttatagccgtgacaagaatatggcaggtgttgccaaagccgctgctgccgctgcacgtgctgatgttattttggcgtttgtaggcgaagaggctattctttcaggagaggcgcattgcctggccgacctgaacctgcaaggtgcgcaaagcgaactgattgccgctttggcgaaaacaggaaaaccggtggttactgtcgtaatggcagggcgtccgttgaccataggaaaggaagtcgaactctcgtcagctgtactttattcgttccatcccggaaccatgggaggaccggcattggccgacttgctgtggggtaaggctgtgccaagtggcaagactccggtgactttcccgaagatggtaggacagataccggtttattatgctcataacagttccggacgtccggctacgcggaatgaggttttgctgaatgacattccgttggaagcggggcagacttcgttgggatgtacttctttctatatggatgcaggtttcgatccgctgtatccgtttggctacggtctgtcgtatacgacgttcaaatatgataatgtgaaactctcgtctgccaatctgaagaaggaagatgtgctgactgtgactttcgaccttgagaataccggaaagtatgaaggtaccgaggtagcccagctttacgtgcaggacaagtttgcttcggtgacccgtccggtgaaagagctgaaacgttttgctcgcgtcacattgaagccgggtgagaagaaaaatgtatcgtttgaacttccgataagtgaacttgctttctggaatatagatatggtgaagacggtggaagccggagactttgctctttgggtggcaccggatagccaaagtggagaagaagttttctttaaggtagtagattgattgttgatttaaggttaaaaagagaaggggcggaccgtgatggttcgccccttctgctttcttctttataagccccgccttccggcaaataactcatcacttattacttataactttcttatatccatacaccgcattgcttcccagttcttcttcgatgcgaagcagttggttgtactttgccatacggtctgagcggctcagcgaaccagtcttgatttgtccgctgttggtagctacggctatgtctgcgatagtcgcatcttccgtttcaccggaacgatgggaagttacggtagtatatccgtggcggtgtgccatttcgatggcattcagtgtttcggtcagcgaacctatctggtttactttaatcaatatggagttggcacagcctttttcgatgcccattgcaaggaagtccacattggtgacgaacaaatcgtctcctaccaactggcaacggttgccgatacggtcggtcagttttttccagccgtcccagtcgttctcgctcatgccgtcttcgatagagtcgatgggatacttgttgattaactcttccagatagtcaatctgttcgtcggcagtacgtttcttgcctttttcatcttcgaatttggtataatcgtagatgccatcatggtagaactcggaagaagcgcagtccatggcaatcattacatctttgcccggttcgtatccggcagccttgatggcggcaatgatggagttcaaggcatcttctgtaccctccagattaggagcaaaacctccttcatcgcctactgctgtgctgaggccacggtctttcaggactttcttcagtgcgtggaacacttcggcacccatacgcaaaccttcgcggaaggaagtggcacctacggggcgtatcatgaattcctggaaagcaatgggagcgtcactatgcgaaccgccgttgatgatgttcatcatcggtacaggcatcacataggtatttgtaccaccgatatatcggtagagtgggatgtcaaggtaagcggcggcagccttggctacagcaagagatacgccgaggatggcattggcacccagattggctttcgttttggttccgtccagtgcaagcatggcatggtcgatacccatctggttgagggcggacataccgatgagcttgggagcaatgatattattgatattgtccacggctttcaggacacctttgcctccgtaacgttttttgtcaccgtcacgcagttccaatgcttcgtgttctcccgtggatgctcctgacgggacagatgcacggcctatgaagccggattccaaggttacgtctacttctacagttgggttacctcttgaatcgaggatttcacgtccgataatcttctctattttcatattcagtcaattttaattataaactatcttactaacaaatgaaaacaaggaattgtttttcgtttttaatcctttattgtaatgcctaaaagagcagtcaactccatggcttgggaagtattgacgatggctccccgtatgtcgggcaggttgaggcgtatacctcctatgtgcgagtcgctcaagtcgattcctcttagaggggtgtgtgaaaactcggattctaccagctcacagttttcaaaggcgatggaggcaagtttgcagttgttgacgtcgctgttgcgcaagtcacaagaggtgaagcgggcttgattgattttactcatggaaagattgaggtatctggcattgcagtccttcattgtcagatggttcaatattgtttccggcagattggttcccaccagtttgcaggatatgaattccactctgaacagagaactttcggcaaatgagatgttggaaaggtcgcaatgttcaaaacgtacatcagtgaaatggcaggatttcagtttgcaggcgctgaattggatatgactgaaagtacagttggtgatgcttttgtaggaatactccatgtgttcctctgtccgtttaccgaagtgaaggtctctgacagtttcttccgtattcagccattcttccaatgatttggaactttcactttgtccctctaaggtaggagggatgatgcgtacgggaggcatgacaaaaggcttgctgggtttcataggggtgtttgggttatatacagcgtccgaaggcgccgccggcgaaggctgccaggactcctaatgtgatacttaataaggtatataaagcaaacattccgtagaattcttgctttatcagaatcagtccgtcattgctgaaagtggagaaggtggtgaatcctccgcacagaccggtagtcagcaacagccgtacctcagtagaaaggttgaaacgggcggataaggtatagaatagcccgatgaggaaacttccgaggatattgactgtgaatgtagcccatgggaaagagtaggggactatgcgctcgtggagcatcatctgcacgcagtagcgcagtacgctgccggtaccgccgccaaggaatatagctatcagtaatctagtcataggttttctggggttggttttggctgcaaaggtagtgaagacaaaggaatttcagtaaatcatagtccgaaatttcataaagcgattctgtactgggggaagtagttattggtgggatgtatataattttgatatttgatatgagtgattgccaatcttggttccggatagttcgtgatggggcagaagcgatttactaaatcttggaggaagatttagtaaatcgttgccggagatttagtaaaatgtccgggagattttagtaaacgagtagaaggggctttggaaggatgactggtttgtctgtatttttggatacggtaataacttgtgaaacttgagccactcttgaaattgaggtcttaaccgttcaaatgccatattgtagagacctctctagaaccttgtcttgataatcagcgatttattttcattggctgtagagattgtacccattccttctcattctcttcctgcctttctttcttcacttgtagagaagggttgtttttaatttgttgttttttagagttttaacgaaattggttgtagatgtcatttccttgtattcccgtcattcacaccctaactttgcaacatcgaattcaagagaatgaaagtttatcgttgaggcctcacgatggatctccacttcttgaaagagaggaaaaggcttcggcctatttattacattattatattaactttctaaaacattaaaaattatgggacttcagtatgtagtggcaaagagaatctttggttttgacaaggacaaaaatgtaaagtatgtagctaaatccgtaggagcgggtgaattggattttgataagttgtgtgccaaagtgagccgtattcttggtattcacagaaagacggtggacttagtggctgcaggactggtggacatcatgtcggaagaaatagacgatggaaagactgttcgtttaggtgatttcggattgttccgcccttcttttgtagggaagagtgctgatacggaggctggcgtttcggccagtaacattgtccgtaaacgtattctgttttttccggggaaagcttttagtcaaatgttgggcaatatgagcgtcaccaagatggtggttcccgatacggactatacggatggaagtagcaatggtggaggggataactccaatccttcgggaggcaatgacggggaccaaggtgaaaatcctttgggataattccagtgcacgattaaagttgtaaaaatatggagggcgaagttttcgtagcgatacttctccttctattttgtttgtaggcaggatattgttcaagggaagttggttttcatgcaaacgtttgccgacaaatcatcatcattttagtttaattgcgtcagagtgtatttctttcctgcctatatttgcatctggaacataattttataaatatagcatgagaaacatgaaagcaatctgtacaaaattagcctgcttcctgctcgttttgttggtgagcggcgtagcaatggcagagagtattacctctcccaacggacaacttcaattgaatttttcggtaaatgcgcaaggcgaacccgtttacgaactttcttacaaaggaaagccggtgattaacccttccaaattaggactcgaactgaagaacgaccccggtctgatgaatggcttcacgatggtggatgcaaagacttccactttcgacgagacttgggaaccggtatggggtgaagtaaagcaaatccgtaaccactacaatgagctggctgtgacgctcaaccaaaaggcgcaggataggaacatcattatccgcttccgtttgttcgacgatggtatgggcttccgctatgaattccctttacagaagaacctgaactatttcgtgattaaagaggagcgtactcagtttgccatgactggcgaccacactgccttctggattccgggcgactacgatacgcaggaatatgactacacagaatccaaactttctgaaatccgcgggctgatgaaaggggccattacgcctaactcttcgcaaaccccgttttcgcccaccggtgttcagacttctttgcagatgaagactgctgatggtttgtacatcaacttgcacgaagctgctttggtggattactcttgcatgcacttgaatctggatgataagaattttgtttttgaatcttggcttactcccgatgcagtaggcgataaaggttatctgcaagctccctgcacgtcaccgtggcgtacggttatcgtaagcgacgatgctcgtgacatccttgcctctaaaatcacgctgaacttgaacgaaccttgtgcttacgaggacgtttcctggattaagcccgtgaaatacgtaggtgtatggtgggaaatgattgcaggtaagagcacctgggcatatacagacgaccttccctccatcaaactgggtgaagtggactactccaaaatgaagcccaacggccgtcacggtgccactaacgaaaatgtaaaaaagtacatcgacttcgcagccgagcacggtctggaccaagtattggtggaaggctggaatgaaggctgggaagactggtttggcaaatccaaggattatgtattcgattttgtgaccccttatcccgatttcgacgtgaagatgctgaatgaatatgccaagagcaaaggcgtgaagctgatgatgcatcatgagacatccggttcggtgcgcaactacgaacgtcacatggacaaggcctatcagtttatggtggataatggctacaatgccgtgaagagcggatatgtaggtaatatgattccccgtggtgaacatcattatgggcaatggctgaacaaccactacctctatgccgtgaagaaggcagccgactacaaaatttgcgtgaatgcgcacgaagctgtacgccctaccggtttgtgccgtacttatcctaacttgattggcaacgaatctgcacgaggaactgaatatgaggcattcggcggtagcaaaccgttccataccacattgcttccattcaaccgcttgattggcggtccgatggattatacaccgggtatcttcgataccaaacttgactttatgggcgatttgccccacggacaagtgcagactacacttgctaagcaactcgctctgtatgtaactttatacagcccgttgcagatggctgccgacttggttgagaactacgaaaagcacatggatgctttccaattcatcaaggatgtggcagtagactgggacgacagcaagtacattgaagcagaaccgggtgattacattaccgtggcccgtaaggcaaaaggaaccggcaactggtttgttggaggtattacagacgagaatgcacgtacagccaactttacgctcgacttccttgaaccgggcaagcaatacgtagccactctctatgccgacggtaaagatgctgattacaaggagaatcctacttcttatcagataaagaagggtatcgtaaccagcaagaccaaaatgtccgtgaaggaagcgcgtagcggtggttttgcattgagcttgattgaagcaactccggctgacaagaaagctgtgaagaagtggagataatttagggtagaaagagtttttattaggcattagtgaggccccgcagaagtccaatctttgcggggcttttttttgtgttagggtaagctcattcttataccgtaaaaatagcatcaagacccgagtttttggtaagtccgttctttggggaaacctttatttttgcactcagataacagattgcataatcattaaaaatcagagatatgaatacggataagaaaatcagtcgtcgggaggctttaaagcgtatgggatttgccgtgatgagcagtgctatcgcatcttccggcctactctcgttggcatcctgcgaaacaaaaaggagtaagcgtatcatcttttattttaccggaacgggtaacagtctttacatcgcccgtcagttggctggagagaacgcagaattgttgagtatccctcagatggtgaaacgggggaagtatgaatttgaggcagatgaaatcggcatcgtttatcccatctacggtcatatgcctccctatatggtacggcagttcattcggaaagcaaaactgaaggcagaatacaagtttgctgtcctcacctatggtgcaaggaagtgcgatgcggtagagatttgggaccgtatatcccgtaaagccgacaatgcgtttgactatatcaacactatcatcatggtggataactggctacccaacttcgacatgaacgagcaactcaagatagacaagcacatccccgagaacttgcagaagataacggcagatatcaacagtcggcagcattggcacgaaccggtgacggaggaggaacggcaacagcaccaaggttttatgcagcggagtggactcgaccccgaggtgggcttcctgatgaaaagcgagaagttctttaccgtgaccgatgtttgtattgactgtggcatttgtacctacgtttgtccgcgcggcaactatgagctgacgtcgagaggagtgaagacgtccggtgactgcgagttctgttttgcctgcatacagaattgtccgcagaaggctattcagttcataaagcaggaagatggctcttttcctgacggaacggagaagaaccccaatgcccgctatcgtaatgagcatatttcgctaatagatctgaaacgggcaaacaatcaaaaactataatcattaacctctgtattttgtcggatttacacccagatgttgttgtacgtaacggctaaaataagcaggagaggaaaaaccgaacatatcggaaatacggacgaacgttagtgatttgtcgcgcagcaaacgcgagatgtcgagtgtggtataacggtttatccagtagtttgctgtataaccgcttactttcttggaaacttccgaaagatatttggaggtgacacataggcagtcggcataataggtcacttcacgatgctcgcggaaagttccgttctccagcatgttgaggaaacggctcatgatggaagcattttgtacagagatattgtcctcgccatatagatgggagtggaaatcgaagaagtcgagtatcaacatctgtgtggaggcgataagcatatcgcgatggaaatgatggtctgtattccggagtctgtattccacttgttcaaaatcccggagacatagctcttgctgttcggtagtcagggacatgataggattgagaaatagggaaagttgccctttcatgccgtagttgttctgtggtgtactcagcaccacaaagcccgatgcgatatagatgacctttacgcgaaaatcttctgaaggttgaattttctctaccagttttcctttgcggacaatcatcaggtcgccggcacgtagctcgcgctcctctccattgtacttcaatcggcagattcctgacagacagagggcgtgtgcaagatagccactgtatgcgtccgtccccagaccttgaagagtatcggctattataatatttgcggtttctcccattatacagttgtttggtttcgatcacaaaagtatatgtttccaataatataacttctattgtgggcaagaaatatattgccttttttattcatttcaaatctgcccgaatttcgcaaattcttcatacctttgcatccgttaattttagaaaccaataacaaaacagaacttatgggaggttttttcggaacagtcgccaaggcaacaagctgtgtggcagatttgttttacggcacagattataattcacatttagggacaaaacgtggtgggttggctacatacgatgcagaaacggagcagtttacccgttccattcacaatctggaaagcacttatttccgcacgaagtttgaggatgaactggataagttcaaaggaaattccggaataggaatcatcagtgacacagaccctcaaccccttatccttaactcccacctcggtcgctttgccattgtaacggtagccaaaatagtaaatctgcaagaactggaaacaaaactgttggcccaaaacatgcacttcgccgaactcagttcgggcaaaaccaatcagacggaacttatcgccctccttattatacaaggaaagacatttgtcgaaggaattgaaaatgtgtataagcatatcaaaggttcctgctccatgctgttattgacggaagacggcatcattgccgctcgcgaccgctggggacgtactccgattgtgattggcaagaaagacggagcgtatgccgccacaagtgagtcgagcagctttccgaatcttggttatgagatagaccgttatttgggacccggagagattgttcgcctgcgtgccgatggtgtggaacagatgcgcaagcctgatgagggaatgcagatttgttccttcctatgggtatattacggtttccccacttcctgctacgaaggtaagaatgtggaggaagtgcgttttgcctccggtttcaagatggcacagacagataagtcagaggtggattgtgcctgcggtattcctgattcgggtgtaggtatggcgcttgggtatgccgaaggtaaaggagttccttatcatcgtgccatttccaaatatactccgacttggcctcgtagttttactcccagcaagcaggaattgcgttcgctggtggcaaagatgaagctgattcccaatcgtgccatgctcgagggtaagcgtctgctgttctgtgatgactctattgtccgggggacccagttgcacgacaatgtgaaggtgctgtatgagtatggtgccaaggaggtgcatatccggattgcttgtcctccattgatatatagctgcccgtttgtaggattcacggcttccaaaagcgacatggaactgattacccgtcgtgtcatcaaggaactggagggtgacgagaataagaatctcgataagtatgccactaccggctcacccgaatacgaaaagatggtggacgttatccgcgagcgtttcggactttcatccttgaagttcaatacgttggaaactctggttgaggctatcggattgcctaagtgtaagatatgtacgcattgttttgatggtagcagccatttttgattgacattttgtccttaagaaataaaaaagaggcgtgaattgcttggcagttcacgcccctttttttatctttacagcacaaaatagtggttaatgattagtgattaatgattaatgccattcggataatgcttttcgccaattactaatcactgaccattaatcactaaccattaatcactaatcattattcatcatgactttagtagaacgttttttaaagtacgtaagcttcgatactcagtccagtgaagagactgagattactccgagtactccggggcaaatggtgtttgcccggtatctgaaagaagaattggaaactttgggtctggaagaaatcacgttggacgaaaatggttatctgttcgccactcttcctgccaatacagacaagccgttgcccgtcatcggctttattgcccacatggatacaagccccgatatgagtggcaagaatgtttctccgcgtatcgtgcagaattatgacggtaaggacattgttctttgcgccgaagagaatgtggttctttctcctgcccagttccccgaactgctcgaccatcaaggggaagatttgattgtgaccgacggcaagaccttgcttggtgccgatgataaagccggtattgccgaaattgtatcggcggtggtatatctgaaggagcaccccgaaatcaagcacggtaaaatccgtatcggctttaatccggatgaggaaatcggtctgggcgcccataagttcaatgtagcgcagttcggttgcgaatgggcctataccatggatggcggagaagtgggtgaacttgaattcgagaacttcaatgcggcctctgccaagataagcttcaagggacggaatgtgcatccgggctatgccaagaataagatgattaactctatccgcgttgccaaccgtttcatgtccatgcttccggctgacgaggctccggagcataccgaaggttacgaaggtttctatcatctgataggtattaccggcgaggtggagcagacaacagtctcttacattatccgtgaccacgaccgcacccgcttcgaagagcgcaagaaggagatggaacgtcttgtggcaaaaatcaatgaagaatacggtccgggtaccgctactctggaacttcgcgaccaatactataatatgcgcgagcagattgaaccggtgatgcatatcatcgacaccgcttttgccgccatgaaggcggtaggtgtagagcctcgtgtaaaagccattcgcggaggtacggacggcgcccagctctctttcaagggcctgccttgtcccaatatctttgccggtggcttgaacttccacggccgctatgagttcgtgcctatccagaacatggagaaagccatgaacgtcatcgtcaagattgccgagctcgtagcaagcaaatagataattcataactcataactctaatagttccatgaaaaccactccgtttaccgaaaaacacatctcgctgggtgccaagatgcacgagtttgcgggatataatatgcctatcgagtattccggcatcattgacgagcatcttacagtatgtcagggtgtcggtgtattcgacgtctcacacatgggagaattttgggtgaaaggtccccatgctttggactttctgcagaaagtgacttccaataacatagctgccctcacaccggggaaagtacagtatacctgcttcccaaatgaaaatggaggcattgtggacgaccttctggtctatcattatgagccggagaaatacctgcttgtcgtgaatgcgtcgaacattgagaaagactggaactggtgtgtgtctcataacacggaaggcgctgaattggaaaatgcttccgagcacatggcacagcttgctgtgcaaggaccgaaggctattcaggctttgcagaagctgacttccattaatctttccgaccttccttactatacttttacccacggtgagtttgccggagaaaaggatgtcattatctccaataccggatataccggcgcgggtggttttgaactttacttctatccggaggctgccatgaagatttgggatgccgtgttcgaggcaggcgcggagttcggcattaagccagttggtctgggtgcgcgcgatacgcttcgtctggaaatgggattctgtttgtatggcaatgatttggatgacaccacttcgcccattgaagcgggtttaggatggattaccaagtttgtggagggaaagaacttcaccaatcgcccgatgctggaaaaacagaaagcggaaggcactacccgtaagttggtgggatttgagatgatagaccgcggtatcccccgtcatggttacgagctgtatagtacagacggtattgccatcggtgtggttacctccggaactatgtcgcctacccgtaagattggtatcggaatggggtatatcagacccgaatacagcaaggtcggtacggaaatctgcattgacatgcggggacgtaagctgaaagctgtggttgtgaagccgccgttccgcaaacagtagtttgaataaatggctgagaatgaagaatttggctgcgcaatgatgccgcatgacaaattcttcattcttcattcttagttattcctttctctatattctgcttatcctgtccagcatttggtttgcccaacctatctctttattggtccattccttttcggttccttctatgccctggccttcgtaggccgaaagcaaggtgatatattctttcagtatatcagcggcttgggcttgtttgttcatgcgcatcaataatagtattttttgtttatatatgtccagattggggcttgttcctgccatctcctgggctttatcaagcatggcgaggcagcggttgttcacttcttccgtattagacagtgccatttccgcttttaccaggatgatgtagtcattgtccgtggctagtctgttgtcaatgttcttgcgtatcagccgggcagtttccttatagcgcttgttggcgtagttcatacttgcgttgaaagaaacgacatcgctggtggtccgtaggtaggggcgggcactcaggctatgggattcaccggccttttctatacgcttttgcaggttgccgatgctgccgtagcgaggaatgtccttgttgcgttggtgcaggttgtaataccctataattttaccgagggccgatgcgattccgtcgggattatagcccttgaatgccagaagttggcgcgcaaggcggtctgaagagatttcctgggaagttttgtatttcatccccaaccggtccgttgccggaatgctcaaaagggaagcgatggctccgatatctgccaccagactgacggcataagcatcttcattatcgtcccagtaggccacatcgagggctgcgctggcggtagtggcaaagacatctgcccaaaaagctgcacgcttggcacgccgctcggcacgataaatgttgtttacctgatggtcgaggacgaaatgtcccagctcacatgcgatgacggcggccagttcgtcttcggaatcaagagtgcagaggaggcctgtactgataaccatggagccgttgggaagcatgaaggcatctggttcggacgactggatgatacgtatgttcaggctttctccacgattgctgtcaatggtggtggcattcagtttggagaatattccttgtacgtacgaggttatgtagtcgtcctgataggctatctcgttcagtttatcgagatagtccaggcattcttcgtcgatttcctggcgcagtttgtgcttgtaaccgcggtcgttgaaatattcgtaaagatgattcttcaggtatatttgctgccagaattcccggtccgtttccggagcggatatggcaatgatacccatctcatccgaaggaatggtttcttgtatgccattcacttcgacggcatagtaaatgttatcgctgttttcaccgggattgttcattttgacaacccggcggataatgaccggggtaccggcgggagattgctggtactcttttgtcaattctcctttgatggcgatgtttccgcttaagtccttgtgcttgggtttggcaaaccctgccgttgtgacaaggattgttaggatgaatagggtggcgagtcgtttcatgattatggtatgttttcggtttcgatgatacaaaaataggaaagtgtttttcccctttcttgttttttcccctattctgtgataggagattccctatttatcgctcagtgggaggcggaaacaaaaaagggaacctttcagtgaaagattcccttttttcagtttgcttgaaactgattatttcttacggttaccgtaacggctcatgaacttatcaacacgaccggcagtgtcaaccagcttagacttacctgtgtagaacgggtgagaggtgctggagatttccagctttaccagcggataagtttcaccttcgaattcgatagtctctttcgtgttgcaagtggaacgagacaagaatacatcaccatttgacatatctttaaatactaccggacggtaattttcaggatgaataccttttttcattttgatattttcttttaaaaatttatattctgttactattttggtaataaatagtgtaatggtcttcttttcagagcgcaaagatagtgcaagttggagactctacaaaataaattcagatttatttttatttagtaggtttatcgcattttatttctgatttttgcaggacttaatcttgtgaatttatgaggaaactacttgtcttatgctctttctggctgtgcgtggcaacgctgggggcacaaaatgcggaacggaaactgtatagtgttgcgttctacaatcttgagaacttgtttgatacgattcatgatgcaggtaagaatgactatgagttcctgcccgacggcagttaccaatggacggcaaagaagtatgagtccaagctgcagaacctttccaaagtgttgggttccctttcgcgtgatttagtgccggaaggtccggcattcatcggtgtggcagaggcggagaacagccgggtgctggaagacctcgtgaagcagccggccatttccaattatgagttcgtgcattatgaaggaccggacagacggggcatcgactgtgccttgctgtacgacccgaagcagttcagcgttacccactcaaagttggtgctttctactccttttgagggggatacggtgcacttgacgcgcggcttcctgattgtggacggacaactggcgggagagcgtgtctgcgtgatagtgaaccactggccctcccgtggggcaaagtcaccggtgcgtgtgcatgcagccaggcaggtaaaggccttgaaggactctctgatgcgtagcgacaagaagctgaaactcatcgtgatgggggatatgaatgacgacccgatggatgaaagcatggaggtgctgggtgcacgcaaatatccgaagcaggtgaagaaaggcgaattctacaatccctggtgggagacactggaagacaagggagtggggacattgctctatcggggcaagtggaacttgtttgaccagattgtcatttcgaaaccgttgctgaaggctaagaaagggttgcgctatgatcacaatgaagttttcatccgcgattatctgattcagcaggatggcaaatacaaaggttcccccttgcgtacgcatgggggcaggacttggctgaacggttacagtgaccatttgccgaccatcatctatctgaaaaattagtattacataataatgtgtaaacagatgccggagagcaaacatgttctccggcttttttgttgatagaagtatagatggcaaaagtatggctggcagagataaatgcaaagagtttgtaatatagagattacaataatctgttaaatgaagccaatagctttaaaatagaatggatttggtaggatgagccggatattttattcccgtcaagttctttactttaaaggataatgattacttttgcgtagaattttaattcactaacaataaaatttaaacaaaatggttaattacaaagatttaggactggtaaacacaagagagatgtttgctaaggctatcaaaggtggatatgctattccggcattcaacttcaacaatatggaacagatgcaggctatcatcaaggctgcagttgaaacaaagtctccggttattcttcaggtatctaagggtgcccgtcagtatgccaacgctacgctgttgcgttacatggctcagggtgctgttgagtacgctaaggaattgggttgcaaacatcctgaaattgttcttcacctcgaccatggagatacattcgaaacttgcaagagctgtatcgactccggtttctcttcagtaatgattgacggttcacaccttccgtacgaagaaaacgttgcactgactaagaaggtagttgattatgctcatcagttcgacgtaactgtagaaggcgaactcggtgtattggccggtgtagaagatgaagtttctgcagaacaccatacatatactaatcctgaagaagttattgacttcgctacccgtacaggttgcgattcactggctatctcaatcggtacttctcacggtgcatacaagttcaaacccgaacaatgccacgttgaccctgctaccggtcgtctggttcctcctcctctggaatttgccgttctggatgctgtaatggagaaactcccgggattccccatcgttcttcacggttcttcttcagttcctcaggaagaagttgatactatcaacaagtatggtggcaaattggaagctgctatcggtattcccgaagaacagttgcgtaaggctgccaagtctgctgtttgcaaaatcaacatcgactctgactcacgtctggctatgacagctgctatccgcaagacatttgctgaaaaaccggcagaattcgacccgcgtaagtatctgggcccggctcgtgataatatggaaaaactgtacaagcataaaatcatcaacgtgcttggttcagagaacaaattggctcaactggactaatcgaaagataatccgaatatagcgtcagcccttgcaatattgatgttgcaagggctgacttgttgtatataggccggtgttgtgggatggttaagttcgccgcttatttcagaagcggatgtttcaacgtgtacaacagtctgtttcctttaacaaaacagtctgtttcccttaactgaacagtttgtttcaataaagagaacactttgttccaatatgcaaaaacacttcgttccaatacgtaagaacactttgtttctacatatccgaacactttgtttctctatactggaacaaagtgttcaccgttatgaactaacagattagctatatttgagaccggtgaaaagcatatccccgtgacacctattccatactaaaaatcccttgcagatggctggcaggcgaggtgtctgcaagctatctgcaagggagatttgcaagaatgagctctctgtgtggagtgcgcgttataattctatcactaatgattctctggggcccatcttcagctcttcaccgaaggtgatggccttgccgctaagaatatcttttccctgcttgctgtcttttaggatttccttgtagaatttcaaaggaacggtggtctctgcatctgtaccgttcagcatcacgaatatcgtcttgccttcgtactggcgtgcgtaggcataaacaccattctgtaccatgaactgcaccatgctgcctttggcaatcacatcgtttcctttgcgccagtttaggatggtcttgtagaagtcgtagcactcgttctgtattttggtacgtccggctggggtcagtgcgtttgttgcgtcaccggtccatccgccggggaagtccttgcggacatagccgtcgctcttgctcttcacgccattcatcatgacttccgttccgtagtagagttgcggaatgcggcgggtggtaagcagcagggtagaggcttgcttcagcatcggaaggttgttgccttcgcccaggaagcggtcggtgtcgtggttttcgatgaatgccagtacggaagcggggttggggtagaggaagtcgtatacgaagttattgtatatgcggtccagtcccttgaaccaagtttcggtctgttcattcttggcggtgtttatcttgtcgaagaagctgaagtccataacggtcttgaggttactgttcttgggggctgatagcttggaatccttctgccaccaggcggtgtaggcgggttcggtaacccaggtctcgcccacggtgttgtagttgggatattcttcgttgagctctttcatccagttgctcatggcatcatagtcggcatacgggtaagtgtccatgcggatgccgtcgatgttggcgaattcaatccaccagaaactgttctgtaccaggtagcggtaaacgtgaggattcttctggttgaggtcgggcatggaaggtacaaaccagccgtcgttcatctggtcggcatcgtactgggaagtataagggtctacgtgcggggtcagtttgaaggaggtctgcacgaagttgttttcgtggtcggggttgttgaaccaatctttggagggcatgtccttaatccatacatgctctacgccgcagtggttgaaaatcatgtccattacgattttgatgccgcgtgcatgggctttttcaatcagttgcttgtattcttcgttggtaccgaagcgcgggtctaccttgtagtagtctgtggtggcatagccgtgataggaaccgccggtcatgttgttttccagtaccggagtaaaccagagggctgtgacgccgaggtcggagaagtagtccaggtgttgttcgatgccggcaaggtcaccgccgtggcgtgcattggggtcattgcggtctatcttgtactcggccatgcccgcaatctggtcattgtccggattgccattggcaaagcggtcgggcatcagcaggtacagtgcgtcggaggcgtcgaaacctttatgttcgcaacctttcttgttgcgtgccttcagttcatattcctttacgagtttcttttttccttcagtgaaggtgaggttgaatttgccgggttttacatccttgtccagtttcagatagaccaggaggtagttgttgctttccagcttgacggtgctgctcaatgagacgccgggataattgacggatactgccgcgttgccgatgccttcgccatagaccatcagctggagttccgggttctgcatgccggtgtaccaaaacggagggtcgattttgttcacattcatagctgcatacgtactgagggagagtaagagtgttcccaagattaagaatacttttttcatgatagtaactttacggttaatttttgcgctaatttaaaacaaataacggagaaagttaatctttctccgttactgtaccttattatattatgcaaacgttttcattggggctatttgatgggggttacgctggcggtatcgacctttcccttgaagaagtcctctttcttgcgcttttctctgatgtccttcagccagttttcggcggcattgtatcggttgtcttctccgatgatgggaactccgtccgcatctacttcctgcactttgtccttgctgtttttcggacgggttttcaggtaggccgttaggtatctctctgctttggacgcatctttcagatagtaataatagataaaggctgcgtcgtagagcagtttgtgtttctgccggtcgtatttttcgtattgcgtcagaagggtattcgcctggtcggtgtattgaaatgccatcttgtagcagtccgcaagccccacatataggcgggacatgacactgtcgctgggcatggcgaggcttacggcagtttccagataagtcactccatcctctttccatgatgtcttggagcaggcgcgtcccagataatagagaacgttgatgttggtattgtcatctttaagagccctttccagcaggtcgtgtgctgggtagaagtcttcgagggcataatagctgattccggcgtagaagcaggtttggaaggagctgtctttttcctgtaacagttgttcatatctttctattgctttggggtaatctttgttcaggcaataggcttgggcattgatgcggttcacaaggacgttggtggagtctatggaacggtatttctccgttatgtttatggcgtcttcatactggtggcctgctacatagatgttgccgagtttggcagcagacaggtaatcattgggatatcttttctgtatgtccaggtaggcatctatcacatgcatgatttctgtgttgtcatagacttgccccatactttcggctctaaggtgtagtacataggcggaactgtccctttctgccagcaggttgctttcctttagagactcacggtatctcttcatgttcatcagcagactgatatactggatgcgtgcgtatttattgtccggatttatgtggagcgcattttggtagtaatccagtgcctcgctatatttggcaagtgatttgcagcattcggcagcttcaatgtatgcccggggattgagagaatcctgagctacgacttcctgaaatacgctcagagcttcaaggttattgcccagccctttcagcgctttccctttttggtagagtagggggacggtcggggtttcttgatcgatcagcatcaaggctgtttcataatcgtagttggccatcgcctcttgaatgggatttgtggtctgtgccgccagaagcgaacagcatgcactgaaacataaggagataaaaagctttcgcatacagtatatcatttatatgaggttaaactgactgcaagttactaaaaagaatgtatttacgaaataatcgtaatctgttttagatagattaacgaaaaagcccctccaaaaatgaaggggctctaaaatagttcagaattcaagccggataacggaatgaataaatgtattacattaagaatcccagcaggatacctgctgctacagcggaaccgattacaccggcaacgttcgggcccatggcatgcatcagcagatagttggtaggatcgtattccagacctactacttgggagatacgtgcagagtcgggtacggcagatacaccggcattaccgatcaacggattaatcttgttgcccttcttcaggaagaggttgaaaatcttcacgaagatgacgccggatgctgtggcaatgacaaatgataaggcgcccagaccgaatatcttgattgaatcaagggttaagaactcggatgcttgcgtagaagcacctactgtcaaaccaagcagaatagtaatggtatcaatcagcggaccactggctgtgtttgccagacgacgtgtaactccactttctttcagtaaattaccgaagaacagcatacccagcaaaggcagaccggatggtacaaggaatgtggtcagtaacaaaccgataatcgggaacattactttttccgtatgtgaaaccacacggggaggtttcatacggataagacgttcatttttactggtcagccaacgcataataggcggctgtatcaccggtactaatgccatatatgaataggctgataccgcaatggcacccattaagttaggagccagtttggaagagaggaagatggcagtcggaccatcggcaccaccaatgataccgattgcaccagcctgcatcgggtcaaatcctatggcaagggcaatcatataagcaccgaatataccgaattgggctgctgcaccaaccaacattaatttggggttcgagatcaaagcggagaaatcagtcatggcaccgatacccaggaatatgagtggcgggtaccaaccggaggttactccctggtacagaatattaagtacagaaccttcttcatagataccgactttcaatccggcttccatattgaaaggtatattaccaatcagcataccgaaaccgataggaattaatagcatcggctcaaattccttggctacagccaagtatatgaaaaacaaacctaccagaagcattaccacatgtcctaccgttgcattggcaaaacctgtataagtccagaagtcggcaaggttgtttcctaaaaatgtgataaattctcccatattattcaataattacgaggtcagtaccttcgagaacagagtcccctttgtttacattgatggctgtaatcttaccgtctttatcagcattgatattgttttccatcttcatggcttccaaaatgatgataacttgtcccttctttactgtatcgccgacatttactttgatatcgaggattacaccgggaagcggagattttacacctgacttgccggtagaagcagcggccggttttactaccggagtagcaggagcagcaggagcggatgtggctgccggacgtgctaccggtttaacaactaccttcggtgctttttccatttcaactttgtagggagtaccgttcacttctacatgagcgatgttgtcttcaatatctccaatggcaactttatatacgttaccgttaattttatatttatattctttcatcgttttattttattatgggtgacttactttttgtgaggagtctcacgcaacgtataaatctttgaactccacggtgagtaactgcgttttacacgggtaatggtaagtatcgtgtcttccacatcgtgtacatcgctttggaattcgtgcatggccattgaaatggcagcaaaaacttctcccggagcctgccccagttgtttctcttttgcttcttgtttatcagtaatacctttagctttcatggcattgcgtttgctgaggttaactgatattttacctataatcttgaaggagatgtagagtaatatcagcccgcagaatacaacgctcatggcagaaatagccataccgatacctacgctgtcatgctcttcgaatttttccattttggcattgctgtcgatagtcttgttgttggtactcggagtgacatatttatcttcgcttccaccctttacttcccattggtcggctgcatcactgacacgggcataggattggttggcttttaaagtaccggcaggcactatgacttgatcaagcaatttcttgccggaatcatacaacccaatccagttggcatttgtggcatccagtttgaagttcgtatgaaatgtaccgcgtcttggttctccatcagcccagaaaagtgcatgctgacgtggttttatgagtgtcagaacgtcacctttgggaatgaaataactggcagtatcacccggctggctgctgaatttcagatagcaacctgcaaggtcggcgctgccgtatgatctgttgaatatttcaatccatgcgctgtgcacaccgtagtcatcctgatagttgctctcgttgttgaccagcacttcattcagcagcagtttgttgttcgatttctgttctttgcaagaagagcaaaagcccaacaccagcatcaatgaaaggaatattccgatttttgttttattcataatcgttcttgttttagtgtgaaaagcttgattacaagggaatattaccatgcttcttagccgggttagtcaatttcttggtttgcaactgttgcagggcacgaatgatgcggaaacgtgtgttacgcggttcgataacatcatcaatgtagccatatttagctgcattataaggattggcaaacaacttggtgtattcagcctctttttcagccaggaattgagccggattttcctgctctttggcttcgcgggcatataatacttctacagcacctgcaccacccattacagcgatttcagcagtaggccaagcataattcatgtcgccacgcagctgcttacagctcatcacgatgtgcgaaccaccgtaggatttacgcagtgtgatggtaaccttgggtacagtagcttcaccgtatgcatacagcagtttggcaccgtgcaggatgacgccgttgtactcctggccggttcccggaaggaatcccggtacgtctaccaatgatacgataggaatattgaaggcgtcgcagaaacggacgaagcgtgcgcccttgcgggatgcgttgctgtcgagcacacctgccagatacttcggctggttggcaacaatacctacggactgtccgttgaaacgtgcgaaaccaataatgatattctttgaataatctttttggatttcgaggaactcaccattatctatgatagcaccaattacctcgtacatatcgtacggcttgttcgggttatcaggaatgatgtcgttcagggaatcttccagacggtcgatagggtctgtacagtctacatagggagcttcttccaggttgttctggggaatgtagctcaacagtttgcggataagagccaaaccttcttcttctgtctgtgcagtaaaatgagtaacaccagatttggtggagtgaacgctcgcaccacccaggttttcctggcttacgtcttctccggttacagtctttactaccttcggaccggtaaggaacatgtaggatgtaccttccatcatcaaagtaaagtctgtcaaggcaggagagtaaacggcgccaccggcacaaggaccgaaaataccggaaatctgcggaatgacacccgaagcaagtatgttacgttggaagatttcagcgtagccagccaaggcattaataccttcctgaatacgtgcaccgcccgagtcgttgataccgatacacggagcacccattttcatggcttggtccataatcttacagattttcagagacatggtttcggacagtgaaccggcagaaactgtgaagtcctgtgcgaagatataaaccagacggccttcgattgtaccgcaaccggttactacaccgtcaccggggtagtgtttcttttccatgccgaagttggtgcatctatgttctacgaacatgtccatttcttcgaaactgccttcgtcgagaagcatggctatgcgctcgcgagctgtatatttacccttctcgtgttgctttgcaatcgctttttcaccaccaccgagacgtgctgcagcgcggcggtctataagctctttaatcttttcaagttgattactcatgaatttatattctttaagtgtttatacaatttatgatttgatgattttacagtcttgcttattccggtttctcgcaaagctcggtcaggacaccgagagttgacttcggatgcaggaatgcaatgttcagaccttctgcacctttgcggggagctttgtctataaggcggatacctttttcttcgacttcggcaagcgcaccggccactccgtcttcaacggcgaatgcgagatgatgcatgccaccgttaccgttgttcttttcgatgaacttggcaattgtgctttcgggagaagtaggttccaacaattcgatctttacatcgcccactttcaggaaagcggttctaactttctgatcttccacggtttcgatgttgtagcatttcaaacctaaaacgttttcgtagtacggaagggcttcttcaatgctcttaacggcaatgcccagatgctcaatgtgtgaaatcttcataactatataaattaatgttagtattgtatcctttttaataaaggtataaagcagcacaaagaaagagaattcttccttaataaagaaatttttcatcaattaattaatggttaattgaactttagaaggattttttcagactttagatagagaccggttgttttcttgatatcgtccgctaacggacatccccactgtccgaaaatgaacacttacccctctatgaaacctttccggccacttggcacactctttgcttttctgtttgcgacaattttaaagattgaacatgaaaaagaatattttacttgcagtttgttttttgatgccgttggcaaccatggcgcagaatgatactttgggacatgaacgcaatattacgctgtcggaggccattgtactggcccgtacgcagtctgtggatgctgctgtggcattgaatgaattgaaaaccgcgtattgggaataccgtacattccgtgcggacttgttgccggaagtgaatttcaccggtacactacccaactataacaagtcctacagtacctaccagaattccgacggctcctatagctttgttcgcaacaatacactggggctgtccggacagctttcggtagaccagaacatttggtttacggggggtaagctgtcactgacttcttcgctggattatctcaaacaactgggttccggaggagcgaagcagttcatgtcagtccccgtgagtctggagttgacgcaaccggtcttcggagtgaataccttgaagtggaaccgccgtatagagcccgtacgctatgccgaggcaaaggccgagttcatttcagctacggaagaggtgacgatgaaaaccatcacttatttctttgagttgctgctggccaaagaatcgctcgctaccgccatgcagaacaagacgaatgccgaccgcctttatgaagtggccatagccaaacgtaaaatgggacagatatccgagaatgatttgttgcagcttaaactgaattcattgcagggcaaggccgacgtgactgaggcagagagcaacctgaatgcaaaaatgttccagctccgttctttcctcggggtgtccgagcaggaaagcctgaatccggtgttgcccgccactgttcccgatataaagatggagtatgaccgtgtgctgaacaaggcactggaacgcaactcctttgcacagaacattcgccgccgccagctcgaagctgattatgaagtggcaacggcacgcggaaacttgcgcagcatcgacctctttgccagtgtgggctatacggggcagaaccatgaattctcttcagcctaccgggacttgcttgataatcagattgtgcaggtaggcgtcaagattcctatccttgactggggcaagcgccgcggcaaggtaagggtggcaaagagcaaccgtgaagtggtcttgtccagaatccgtcaggaacagatggactttaaccaggacatctttttgctggtggctaacttcaacaaccaggcgcaacagctggacatagccgaagaggcggatgtcattgctgagaagcgttacaagaccagtgtagagacctttatgataggtaaaatcagcaccctggacctgaacgatgcacagaactctaaagacgaagcccgtcaaaagcatatttcagagctgtactactattggtattacttctatcagctccgcagcttgaccctttgggattttgaacgcgatacggaattggaagctgattttgaagaggtggtaagaggataagtcgacgggttgcaagtgataagttatgaattatttgccggtaaaagtaccgtatatgcgatattataggtgaataacttataacttatcattcataactctgcttttttacttatttttgcgggaaacaaactacaatttttatgatactgataatagacgacgatagtgctgtgcgctcttccctcagctttatgctgaagcgtgccggatatgaggtgaaaacggctccaagtcctcgcgaagctatggacatagttagggccgaagctcccgccttgattttgatggatatgaacttcactctttccactaccggagaagagggacttaccttattgaagcaggtaaaggtgttccgtcccgatgtgcccgttattttgatgacggcatggggaagtatccagcttgccgtgcagggtatgcaggccggcgcattcgatttcataaccaagccttggaacaatgctgctcttttgcagcgcatcgagacggcccttgagcttacggccgccccgaaagaggtgccggaagagcagactaccgcattgaatcgcagccatattataggtaagtccaaagggctgatggaagtgctgaacacagtggctcgcatagcccgtaccaatgcttcggtgctgattacgggcgaaagcggaacgggcaaggagctgattgccgaagccatccatatcaacagccaacgcgtgaagcagccctttgtcaaggtgaaccttggtggcatctcgcagagcttgttcgagagcgagatgttcggccataagaaaggggcgtttaccgatgccagcgccgaccgtatagggcgttttgaaatggcaaataaaggtactatcttcctcgacgagattggtgacctcgacccttcctgccaggtgaaactgctgcgcgtgcttcaagaccagacattcgaagtgctgggcgatagccgtccccgcaaagtcgatgtacgcgttgtgtccgccactaatgcagacctccgcaagatggtgtccgaacgtactttccgtgaagaccttttttaccgtatcaacctgattaccgtaaaactgccctccttgcgggagcgccgtgaagatattcctttgctggcacgtcactttgccgaccgtcaggcagaggtgaacggcttgccgcgtacggatttctcggccgacgctctgaatttcctttcccgcctgccttatccgggcaacattcgtgagttgaagaatctggtggagcgtaccattttggtcagcggcaagccggtgctggatgccacggatttcgatgcccaatatctgcgtcacgacgaaccggccaaagctgccgaaggtacttcttttgcaggtatgaccttggatgaaatagagcggcagactatcttgcaggcgttggaacagcataaagggaatctcagtcaagtggcagtgtcattaggcatcagccgcgctgcgctttacagacgtttggaaaaatataatattcaagtcccgtgcgcataaaattctttttcttcatacttgtcctttttctgctcggtctgggtggaatgctggtatatctgctgagtggaaagccttctttgtatctgtacgtgttggaggggctcatcgggtttatccttatctatctgatagtattctataataagatagtgaagccgatgaacaccataggcagcggtatggagttgttgcgcgagcaggatttcagtagccgtctcagccgggtagggcagtacgaagcagaccgcattgtgaatatctttaaccgaatgatggagcagctcaagaatgaacggttgcgcatgcgcgagcagaatcacttcttggatttgctgattcaggcatctccaatgggggttattatcctgacaatggacgatgaagtgtcgcaactgaatccgatggcggtaaagatgctcggtgtccgtatggaggaggcgatggcaaagcggctggaccagatggactccccgttggctgccgaactttcgtccattcccaaagacgagacggcagtggtccgtctcaatgacgcgaatatttataaatgcacccattcttcttttattgacagagggttcaaacatccttttttcttgatagagcgtatgacggaagaagtgatgcgtgccgagaaacgtgcctatgaaaaggtaatccgcatgatagctcatgaagtgaacaataccactgcgggcatcacttccacactcgatacagtggagcaggcactttctacagaagatgatatggaggacatctgcgacgtgatgcgcgtttgtacggagcgttgtttctcgatgagccgtttcattacccgttttgcagatgtggtaaagatacctgaacctaccctggtgcccgtccaactgaatgagttggtgtccatgtgcaagcgttttatggaaggaatgtgcaatgaccgcaatatagagctacgtctggaatgcgacccggaggtgggaatggtgcgtatggatgcttctctttttgagcaggtgcttgtgaatatcatcaagaatgctgccgaaagtatagagggggatgccggagaaaacggacagcaaggtgagataatagtaaggaccactgcccccgcttctgtcgaagtcgttgacaatggtccggggataagtaaagagaccgaagctaaactcttcagtcccttcttttccaccaagccgaacgggcagggaattggcctggtgtttatccgggaagttttgagccgtcatggttgcacgttctccctacgtacctacaacgatggattgacccgcttccgtatactatttaattgaaatttgaaagttttacctttcacctttcaatttctgcttttaaagaattcttttgcatattcgtccaatatccttttaatgccttggccgatggtcgcatagtctttctcgtccagattggcgagtgaggcgcgcacgctccattcggggccgtcaaaaccaccgccgttcagcagcaccagagaggtttctttggcaaggcggaagactacgttcagcgggctgtaggtgcgtttcagatattctacaaagtcgtccccatagaacttctttgcccaaaccagcatgtcgatttctgtataataacctacacgcaacgggtcttccgtcagcgtgaaaccggtattctcccaaagggcatgcaatcggcggcggataatctcctgcatcttttgcttgtatttgttttccttgtccagcagggcaaaggcggcgaaaaggcccatctgcatctgttgtggcaatgacagtccggcggtatggttcagtgccacctggcgactgtcggcaaccatacggtcgataaacttcagtttttcaggttccagagtgagggtggagtagcggcggtgcagaatctcccgtttctctttcggcagtttggctatcagcttgtcgaacagattgaattcgtgcagggcgatgaccgcattgcgccatccggtggcaccgaagtatttggagaatgaatagacgcaaagcgtattgtagggaatttctgccatgaacgaacggaagtgcggactgaatgtaccgtatacgtcgtctgtaataatcatcagattagggttgtcatttctgacgatactcacgatgcgcgccattgtatccggactgagtgtgtagctgggcggattactgggattggtgacaaagagggccttgattttagggcttttcaagcggtctatgtcttcgtcgctgtactgccagaggtgcatcccttcgttattcatgcggttggcatgtattttggtcactcgaaactggtagcggctgagttgtgggatttcaatatagggggtaaaggcaggaaccatgaggacgatgccgtcccctttgttcagcaggaagttttcctgcagggagtcgaagatgtagcacatggcggctgttccaccttcggtggcaaacaggtcataggcaccccggggaggacggttgtcgcacatctcttgcgaaaggtagtcttgcacaaggatttccgtaaaatgaaggatgcggtcgggcacgggatactggtcgcctacaatgctttcggcccattcgtgtacaaggctgtcggggtcggcggcatgctgcatcagcaggtagttgtaggtttgttccagcaatttggcgcccggtacgttattgttctttttcaggaaggcttcgaagcgagaggcaatgccttttttttcggggatgcctgcaattccctcgggcaaatccatgatgcggcggcactcttccaggccgaagcttcccaacaggaagaaggcttcgcgtggagcggttgcaatccagttggggttgccgcgccctgcgttcagcatggtacgggcggttttcttcagactctcgtctgccatgtctatcaggcggttcttcagttcgaaaggactgatagattccattttcttttctaaaagttttgtatccataagctcaagtttaggttcgttatttattgttttcagtcattcggcgaataatctctgttcatgcggtatactatttctttccttgcttgaaattaatcgtccgatatatgtttccttttcgtccgacagttgttgaatcatcgtccgacaactgttgaattatcgtccgacagctgtcggacgaatagctattagtgaatgggtatatagtcgcttgcatttccggcaataattctttgaatgctccggattagtaagcattggtacagaatcgtcttatattagcaaaacgatgactacaccccatattattaataaggtattgcccacggcataggtcacggtgtatcccagagcaggtgtctcactctcaacggcatcctgcaccgcgcctaaagcggccgtagtggtacgtgcccccgcgcagacgcccaaagccagtgccggatggaacttgaaaacataccttgccagcagcaagccgataatcagcggcagggtggtggcggctgctcccaccaggaacaggctgatacctacgtcgtggaagccctgcacgaaactgggacctgccgaaatgcccactaccgcgatgaacatgttcagaccgacattgttcaacacccattgcgaaggttcgggaatgcgcccgaaggtggggtgcttactgcggagccagccgaagaacaagccggcaatcaatgcgccgccgcttgtgctcaagctgatggggatgccgccgatatggacggaaagtgctccgaacaaacctccgacaaggatacccaggcctacgaatatcatgtccgtctggttggtagggcggtctatataccccagacgtttggctgctgcttccacttcctgcctggtacctaccacttcgatgacgtcgccggcatctactaccgtttgtgccagcacgggaatggatattccggcgcgcttgatgctccggatactgacaccgtgcatgaacttttcccttcggataactgcaaccgtcttgccggcaaccgtcttgcgtgtgattgtaaccggtaacttttcggcaggaaaatccaggagctgggcatcttgtacttccggccctatccagctttcttcgcctatgatgtattcgcggcgtccgcttagcactacttcgtctcccggctctatctgtatgttcatgctgacttccaccacaactccggatttgcggaggcgttccacaaatagacgtttgtcgtgctgccggaagtagacttccaggtcaatcacccgctttccattcttgaaccattcgttttcgacccggtaggcacggaaagtgacggggcgtgccgccggcatgaatcccggttcgtcagccagagagctgcccatcttcgcctccagttccttgcaggcggctttcaccttttccagcccgcctagcatcttgggaccgatggatgataggacccatgccgagcctgccgtaccgaaaatgtaggtgacggcgtaggatacgggaatgatgttgacgtaactttgtcgttgggcctcgtccagtcccatattggccatggtgtcttctgccactccgatgacggcggagatggtttgcgaaccggccagcagtccggcagcttcaccggcattgtagcccatcatcagggccagcagccaggtcactaacagtacggatacacacatcagtacggcaaagcctacttggggtaatccgtcctttttcagtccgcggaagaactggggacccactttatagcccacggcaaaaaggaaaagcagaaaaaataccgactttatcggacccggtacggctatattcagttgccctaccagtacgcctacaagcagtacactggtcactgtgcccagcgtaaacttaccgatacgcagtttccccagccagaatcccaggaatatagtgaggaaaatggcaagttcggggcgttccctgagctggttgaaaatccattccataatcaagttgtttaggttatatattggttgttccgatgctttctggagcgtcgtttcgctatacaacggcttttaacgggaagtgttttgtacaaaaggagttttttagaacatttattccgtaaaaccgaactttaagaaaaagttttcttccgtacctttgccatccaaattaggtaaaacaaggtatgaagttgttttttagggtatttctgcttatccagctggttactcttccattgagagcacaatatatggtgcaaggcgttgtcaccgattcgttgacgaaggagccgttgccttatacgtcagtttatctgaaaggaactacggagggagggatgacggacaataacggccgtttttccttcaagacctatcgcccggaggccacgctggtcatttcggccgtgggatataatgaatatgtccggctgattcatcctgcaaagtcttctaagttcaatatagccctttcgccagccacttatgcactggatgaggtggtggtgaagccgaagcgtgaacggtataagaaaaaggataatcccgcagtggagtttgtacgcaagatgatagagcatcgggatgactactcgcccgacgaacgcgacttctggaaacgtgaccgctatgaaaagatgacttttgctatcaataacttcgacagcttgaagcaacagaagtggctttaccgtaagttcaagttcctgacggattatgtcgatacctctgccgttaccggcaggccggtattggccatctccaaccgtgagttgcttgccacagactattaccgcaagtctccgcatagccggaaacagtgggtcaccgcccgcaggcaggcaggagtggacgaaatgctttcgcagcagggtatggaacaggctatcagtgtcaccatgaccgatgtagacctttatgagaacaacatcaccttgttcaccaataagtttgtcagtccgctatcctcccttgggccgtctttctacaaatattatctgatggatacgcttaccgttgccggaaagccttgtgttgacttgacatttgtccctttcaactccgagtcgttcggttttacgggacatttatacgtcatgctggacagtacctattttgtaaagcgtgccgtcatgaactttcctcagaaaataaatctgaactttgtggactacatgaagattgaacagaattttgaccgcgcggaggacggtacgaggcagttgctcaatgagagtatcactacggagttcaagttggtggacaatagtgacggtatttatgccaagcgggatgtgtattacagaaattatcagtatgaaccggatgacaaggctctgcaggctttccgaaaaccggaaaaggtgattgaagagacatcggcttccggctattcggaagcatattgggatgccaaccgccaggtggaggtcagcaagaaagagacttcggtggacaagatgatggcccagttgcgcagctatcccgtttatttctggacggagaaagtgttgaaggtgctgttcacggggtatattcccgctccgaaggaaaaagaacctttgttctatatcggtatgatgaataccactatcagcggaaatacactggaaggggtgcgcttgcgtgccggcggtatgacgacggcatggctcaatccgcatttgttcggcaggggctatatggcatacggttttcgcgaccatcgtgtaaagggactcgccgaactggaatattcttttcataggaagaaggaatatgccaatgaatttcctatacattcgttgaagctccgttacttgtcagacgtcaatcaatatggacaacactatctttataccagtcaggataatgtttttcttgccttgaaacgtcagaaggatgaccgtatcggttatcagcggaaggcggaactgacctataccaatgagttccattccggcttttccgtgcagatgacgacgcgtctgcgtaaagatgaatcatcccatctgattcctttcgtcaagcaggacgaccataatacgtatgtaaaaagtatttcgaccagtgaactggaattgaagctgcgctatgctcccaacgagaaattcttccagacccaatggaaccgtttccccgtttcgctggatgctccggtcttttcgcttacacataccatggctgccaaaggggtactgggaggagactatacctatcactatacggaagcgggttttcaaaagcgtttctggttctcggcattcggttatacggacgttatcctgaaagccggaaaagtctggaataaggttcctttccctttgctcgtcattcccaacgcgaacttgtcctataccatacagcccgagtcctattcactgatgaatgccatggaattcatgaacgatgaatacgcttcctgggatgtgacctattacttgaacggctggctcttcaaccgtattcctttgttgaaaaagttgaaatggcgtgaagtgctttcctgtcgcggcttgtatgggaatttgagtgataagaataatccggcttttcagcaggatttgttccgttttcctgctggaagtaccaccatgggacatacgccatacgtagaggcaggtgtaggcattgaaaatattttcaaggtgttgcgtgtcgattatgtatggcgtctgacttaccgaaatttaccggatgtagacaaatccgggctcagaatcagtctacacatgacattttaacttaaatcttactaataggacattaaatcggataaaatgactaatcccaattgagtaaaataccctaaatttgagcaattttttaaactctaaataatacaatggcaatgaaagaaaacattaagccggcaaccggacgcttgggcgtgctggtagtcggagtaggtggtgcggttgcaaccaccatgattaccggtacattagctgctcgcaagggcttggcaaaagctataggctcaatcacacaaatggctgctatgcgcatgcaggatggcaaagaaaaacttatcaaagacatagtgcctttggctgatttgaatgatatcgttttcggcggttgggacattttcccggacaacgcctacgaagctgctatgtatgccgaggttttgaaagagaaagacttgaatttggtaaaagacgaactgcaagccatcaagccgatgcctgctgcattcgaccacaattttgcaaaacgtttgaacggtacgtatattaagaaggctgctactcgctgggaaatgacagagcagttgcgtgaggatatccgtaacttcaaggcagccaataactgcgagcgtattgctgtgctgtgggctgcaagtaccgaaatatatattccgctgtccaaagagcacgaatctctcgctgctttggagcaggcaatgaaggaaaacaatactgaagttatctctccgagtatgtgctatgcatatgctgccattgcagaaggcgctccgtttattatgggtgctcctaatctgtgtgtggatactccggctatgtgggaattctccaagaaaatgaatgtgcccatttccggtaaggacttcaagagtggccagactttgatgaagacggtgcttgctccgatgttcaagacccgtatgctgggtgtaagcggctggttctctacgaatattctgggtaaccgtgacggcgaggtactcgaccaaccggagaacttcaagacaaaagaggtcagcaagctgtctgttatcgacaatatcttcgaaccggagaaatatcctgacttgtacggtgatgtttatcataaggtacgcatcaactactatcctcctcgtaaggataacaaggaagcatgggacaacatcgatattttcggctggatgggctatccgatggaaatcaaggttaacttcctgtgccgtgactccattcttgctgctcccatcgcgctcgacttggttattttcagtgatttggcattgcgtgcaggcatgtgcggcatccagacgtggctgtctttcttctgcaagagcccgatgcacgatttcgagcatgagccggtacacgatttgttccagcaatggcgcatggtgaaagagactctccgcaacatggtgggtgaaacagcaccgagttatctggattaaaaaaacagtgataaggtgataaaaataaggtggtaaggtgatagagtgatagcactttaccactttatcactttatcacttttattactttattgcatttatcattttaccgtttttatcgcatttatcacctcattacttttttgatgaagaaaccctccctcctcccagttattatcggtacgggctttggctcgggcttttctccttttgcacccggcactgcgggagctttgctggctacgcttatctggttcgggttgtcttatctggtttcaagtgtctgccttttgtggctgacagtagcattgattttggtatttacacttgccggtatctgggctgctaaccgcctggaggcatcttggggcgaagacccttcgcgcgtggtggtcgatgaaatggtcggtgtgtggattgccttgcttgcggcgcccgccggacatgtatggtatgcattgggagcatttgtcttgttccgtttgtttgatatattcaagcccttgggcattcgccgtatggaaagtctgccgggtggaatcggggtaatgatggacgatattctgtccggagtctacggatttataattttgattgtggcaagatggataatcagttgaaatcaaatggcaaaggtgtgtcgtggcgccattctgtctggatcttcttcaaggcccagatttctgcgcaattcgcaagctttgtcgattttctggtgactatccttctggtaaaggcttttgctgttttttatctttatgccacattcacgggttccgtggtaggaggcattgtaaactgtgccattaattacggatgggtgttccatgccgaagactgtaagaaaacgcatgttgccgtgaaatatctctttgtctggggaggcagcattatactgaatacctggggcacttttgcactgaccgagtggcttacgggcatgacatgggtcaatgggctgttgggatattatatagacaatgtatttattctgtcaaagataatagtagcagtgctggtagcttttttttggaactaccatctgcaacgttttttcgtttatcgtaatcacaatataaaaggctttctgaaacattatttagagaacaaaaaagacgaatatgaattatagagattggttgcagcaggtgatatacaagattatcaatcctgtggtgcatggtatgattagaattggcattacgcctaactttattacgactacggggctggtactgaatatcgtggcggctgccttgtttgtgtatgccggggtgtacaagagtggtgaactggcctatgtgggctggggaggcggtattgtgctctttgccgggttgtttgacatgatggacggacgtgtggcgcgcgtgggtaaaatgagttctactttcggtgcgctctacgactccgtactcgaccgttacagcgagctcgtgacattgttcggcatcttctattacctgatgctgcaaggctatttgtggggctccatcattacattcattgcgctgataggttcgctgatggtgagttacgtgcgtgcccgtgccgaaggtttggggctggagtgtaaagtgggtttcatgcagcgccccgaacgcgttgtgctgactgccctcggtgccatgttctgcggtatctttggtgattgtactttattcgacccgatgctgatactaattgtgcctatggcagtgattgcaatattggcgaatttgacggcatttgcccgcttggcgcattgctataaactactgaaagacaaggaatgaaaaatagtttgtttccctctgtgagagaggcggtgctggtgattgtcatcacagcgtttttcctgattctgacagcggtctgtatcgggcttcgtccggaacatttcctgatggcgggtatattttgggtattgttctttgccggacagacaacccgtaagttggcagtggcgctgttgccgtttttcatattcggcatttcgtatgactggatgcgcgtatatcccaattaccaggtgaatcccattgatgtaaaaggactttatgaggcagaaaaatccctttttggcttgtctgtagacggtgctgtccttatcccttgtgagtattttgctttgaaccattgtcctgttgccgatttctttgccgggatattctatctctgttgggtaccggttcccattgcattcgggttgtggctctatctgaagggtgaccgtaaggtatatcttcgttttgcgatggtgttcctgctggttaatctcatcggttttgccggctattacatccatcccgctgctccgccctggtatgccatgaattatggtttcgagccgatactcgacactccgggcaatgtggccggcttaggacgttttgacgaattgctgggatgttccatcttcaactccatttacggaaggaatgccaatgtatttgcagcagtgccctcgctccatgccgcctatatggtggtggctttggcctacgcggttatggaccgcagcaaaaagtggttgatagcgttgtttgcggtgattatggtcggtatctggtggacggctgtctattcgggacaccattatctgattgatgtgatgctgggcatctcttgtgcattgctgggtatttttgtttttgagaaaggactgatgaagtggggagcgttcggacgcttctttgaaagatacagtcgatacattaaataaggtatacaatgaataattttgttttttatagtcctacagagtttgtctttggcaagaatactgaagtgcaagtcggtgcattggcgcgtaagtatggtgcacaaaaagtgatgatagtatatggaggcggttctgttgtacggagtggtctgctggatagggtgaagcaatccttgcaggaagccggtgtggcttattgcgaaatgggaggtgtccagcccaatcccattgacgggaaggtatacgaaggtattcagctttgccgtcgtgagcaggtggatatgatgcttcctgtgggaggtggttcggtcatagatacggcaaaggccattgctgccggagccctctatgatggtgacttttgggatttctttatcggtcgtgccaaggtggagaaagcgttgaaagtagccgtggtgctgactatcccggctgccggaagcgaaggttcgggcaatacggtaattaccaagacagagacactccaaaaactgggactctgtgcccccgagcatttgcgtcccgtattttccatcatgaatcctgaactgacctacacccttccggcttatcagacggcttgtggtattgccgacatgatggctcacatcatggagcgttatttcacgaatacaccggatgtggaaatcagcgaccggctttgtgaaggcaccttgacagctatcattaaagaagcttaccgggtgaaacagcaaccggacaactatgccgcgcgtgccaacattatgtggtgtggcactgtggcgcataacggaacttgtggggtagggcgtgaggaagactgggcatcccatgcactggaacatgaaatcagtgctatctatgatgtagcccacggtgccggcttggctgtaatcttccctgcctggatggcttttatggcagaacataatccggcaaagatagcccagtttgcccatcgtgtttttgatatacccaagtccgaagatttggaagagatggctttggcaggtactgcccgactgaaacactttttccgttacatgggcttgccggttagctttaaggagttgggtatcgagcatcccgatatagaccgtatgctcgtcagtctgcggcgcaataaaggcgaactgcttggcaactacgtgaagctgaccatgactgattgcagggaaatctatcgtttggctttataacgaaaggcatgtttggggagagctcccccaaagcaagagctaaaaaagacggcgaagataaatacccttcgccgtcttttttatttgatttcgatttcttccttcatgtctatctcttccccttgcaggtcgtagaatacatattccaggaatgctaatttctggtttggaataatcttgataccgaatccgtacttcatctgccacttccgtttcaaggagacgagtccctgattgacgtaggctgcgatgtacgggtggatgtgtaacgagaatttctttatcttcaatttgttgaccaggtagtcaatcttactctctaaggtgtccgtaaagaggatggacgatttgatggtgcctttaccgaagcaggtggggcaggtttccgtcgtatttacatccatagccgggcgtacacgctggcgtgtaatctgcatcagtccgaatttactgagcggcaggatgttgtgacgtgctctgtctttctgcatgttggcacacatacgttcgtaaagcttctgtcggttttcggcttcattcatgtcgatgaagtccaccacgatgataccacccatatcccttagtctgagctggcgtgccagttcgtcggctgcacccagattcacttccagtgcgttggcctcctgcccgttggcattcttggtgcggttaccgctgttcacgtctactacgtgaagcgcctcagtatgctcaataatcaggtaggcaccacttttgtatgaaatggtcttgccgaatgacgacttgatttgtttggtgataccaaaattgtcgtaaatggggagttgacctttgtacagcttcacaattcctgcccgttcaggggcgatgagggttacgtaatccttgatttcgtggtacacagcctcgttgttcacgtggatgttttcgaaggaaggattgaacaagtcgcgcaacagtcctacggcacggctggtttcttcgtaaatcagtgtcggaaatttggtggccttctgtacttttgtaatggcatcttcccaatgtttcagtaatactttaagctctccgtcgagctcggcaacacgttttccttcggccacggtgcggacgatgacgccgaagtttttcggcttgatactcatcaacagttgcttgaggcgtgcgcgctcttcgctcgatttaattttttgtgatacggaaaccttgtcattgaagggaatcagcacgaggtatcttccggcaaaggaaagttcggaagtcagtcgcggccctttggtagagataggttccttgacaatttgcaccactacttcttgtcccaccttgagtgtgttggaaaccgttccgtccttttcaaggtcgggaagtatggttgctttggtaatgggattcagcttcttcttgtcgcttaaagtttgctttacgtacttctctaacgagttaaattgaggacccaggtccagataatgaagaaaagcgtctttctcgtaacccacgtccacgaagcaggcattcaggccgggcatcaatttcttgacgcgtcccaaatacatgttgcccaccgaaaaggagatgtttcttccttcgctctggagttccaccagctgcttgtcttcaagcagtgcaatggatacctctttgggctgtacgtctacaacgagttcgcttgtcacaataattggcttttaaatgattcaatttactacttaaacaaagaacaaacccgcgagacattttgcttcacaagtttgttctttattttgtccttcagactaaaaattactttttgcttttatgtctgttctttcttagtctttttttacgcttgtgcgtagacattttatgtctttttttcttctttccgcttggcatagcttcaaaatttttatgggttaatactattgtttattatttcttcactgagagggtgaacgtttttgcaggcttaaatgccggaatgttatgttccggaatgattattgtagtgttcttggagatgttgcgagcagttttctgagctcttttcttcactacaaaactaccaaacccgcggaggtaaacattttcatctttggataaagatgcctttactgcgtccatgaatgcttcaacggttgtaagtacggttgtcttatcaattccggtgttctttgtaatttcgtttacaatatcagctttagtcatttttctttaaaaaaaatattattactatagttttcctaattttttggactgcaaatatatagcttttccgtggctctaaaaaatatatttcggacaattttctaaaaaagtcttggcattaagctttgttaggctgaaaatgaagtatttttgcagcatgaatatttttagcggaacattgttggactggtatgcggagaacaaacgcgaccttccgtggcgaaataccacggacccttatctgatatggatttctgaaatcatcttacaacagacaagagtggcgcaggggtatgagtattttctgcgtttcataaaacgcttcccggatgtggtgtcgctggctgctgcgtccgaggacgaagtgatgaaatattggcagggcctggggtactattcgcgtgcccgcaacctgcatgccgcagccaaaagcatgaaggggacatttccgaaaacctatgcagaggtacgtgctttgaagggagtgggggattatacggcagcggccatctgctcctttgcctatgacatgccttatgcggcggtcgacgggaatgtgtatcgggtgctttcccgctatttcggcattgatgttcccattgattctactgaagggaaaaagacttttaccgctttggcgggtgaggtgctcgataaatccaggccggcagattataaccaggcaattatggacttcggagccgtgcagtgtacgccgcagtcgcccaactgtctgttttgtcctttgtccggcagctgccgggcattgtctgaaggaaaagtgcagcaactgcccgtgaagcagcacagaaccaagaccaccaaccgctattttaattatatatatgtacgcatgggcgcgcataccttgatacataagaggacggaggacgatatctggaaaaatctctttgaattgcctctggttgaaacggaaaaagatttatccgaagaggaatttctggcatgtccgcagtttcatgcgctgtttgcagagggagaggtgcggatggtccgtacactgcttcggggggtgaaacatgtattgtcccacagagtgatttacaccaacttctacgaggttactctgcccgataattcgagctccttctcaagttaccaacgggttgcagtcgaagatttgggtcgttatgcggtgccccgccttatacatgctttcttggagaaatatgtataaaagttgtttgtattcttgcatggtgtgaatattctcgttaattttggcagcaaattaataaaatagaagcttatgtcagtaaataaagtgatattgataggaaatgtgggacaagaccctaaaataacctattatgaaggtggaaactgtgttgcccagctttctttggccactacggagaaaggatacactttgcagaatggtacgcagattccggaccgtaccgaatggcataacctgatattccgtggccgtttaggcgaaatcgttgagaaatatgtgcataaaggcgataagctttacgtggaaggtaagatacgtacccgttcttacgatgaccagggaggcatcaagcgttatgtgactgagatatttgtcgacaatatggagatgctgactccgagaacggcaactcccggtgctggcccttatgcgccgcaggcgggagccgccccccagccacaacaaccagtacaaccgcaggctgcccctgcacaagataacccgacggacgacttgccgttctaattgtttaactaaaaccaaaatctttggacccagacgcttatttatgccagttggcagatgtttttaacggtatatccgtacagactccttctatttcggccgttgtagccattgtgttggcaggtttgcttttgcttgtttccggttttgcatcagcttccgaaatagcctttttctctctttctccgtcagacctgaatgcaatagcggagagaaagcatccttcggatgagaaaatcagtaatctgctggacaacagcgaacgtttgttggcaacgattctgattacgaacaacttcgtgaatgtaaccataatcatgctctgcaacttcttctttatgaatgtgttccaatttcattctcccattgcagagttcctcattctgacagtagtccttacatttttgctgttgcttttcggtgaaatcatgcctaagatatattcggctcagaagacgctggctttctgccgttttgccgctcccggcatcacgttttgccgttccgtattctatccgatggcatctatgctggtacgttccacctctttcttgaacaagcatatggtccgcaagaaccataacatatcggtcgatgaactctcgcatgcgttggagctgaccgacaaggcagagctttcggaggagaataatattctggaaggtatcatccgctttggcggggaaacggccaaggaggtcatgacctctcgccttgatgtggtggacctggatatccgtacccctttcaaagatgtggtgaagtgcatcgtagagaatgtctactcccgtattcccatctatgcggatagccgtgacaatatcaagggggtgctttatatcaaggatttgcttccccatctgaacaaaggggataatttccgttggcagtcgcttatccggcccgcctattttgtgcccgaaaccaagatgattgatgatttgctgcgcgatttccaggcaaacaagattcatatagccattgtggtcgatgagttcggtggtacgtcgggcattgtcaccatggaggacattattgaggagattgtgggcgaaattcatgacgaatacgatgatgaagaacgtacatatgccgtactgaatgaccacacttgggtatttgaagccaagacccagctgactgatttctataaaataacgaagatagacgaggaaacgttcgatgaggtggcaggggatgccgatacgcttgccggacttctgctggaactgaagggggaatttcctgctctccatgaaaaggtgacctacggccgttatgagtttgaggtgttggagatggacaaccgccgtatcctgaaagtgaagttcacagtaaatgccccggcagaacccaactcttcttccctttaatttttaattattaatttttaaattgttccgtgcccctcttcttgcaacataccgctcttccctgtcgatggggaatttggaaaacggaggaatctccggaggaattgctggccatgcttcctcatcaggaagtataccgggaaggtatgcggcgcttcaccgcggcacaccgccgtttggagtggttggctgtccgcgtattgctttatactctgtcgggagaagagaaagagattgcctatcatcccagtgggaaaccttatctggcggatgactccgcctctctcagtatttcgcatacgaaaggttatgtggctgttgtcttgggattgccgggtcgggaagtgggtgttgacatcgagcagtatggtgagcgggtaaggaaggtggcacataaattcatgcgcgaagatgaacagccatccgtgtttcgcggaacagacacttggtcactgttgctgcactggtcggctaaggagaccatgttcaaatgcctgaatgcttccgaggttgattttcgcgggcacatgcgcattctgccttttgctgtaaatgaaagcggcgtattctccgccgaagaatatcgtacggtggagaaacgccggttcactattcattattatttgtttccggattttgtcttgacattgagtctgtaaatctcttacagcctttccagttgtaccgtgaagtgtctcatcaacggagcttcccaggtgatgcgcactccgcgggtaatactttcccgtttgtcatatacatttttcaaagcggctgccaccacatccatgtggttgttggtatacacgcggcgggggatggcaagccgaagcaagtccaggccgttgaagcggttttcgcgggtcaccgggtcgcggtctgccagcagatacccgatttcgcagccgcgtatgcctgcttccagatagagctcagcggtcagtgtttgtgccgggaattcttctttgggcacatgtgtcagcactttgggggcatccacaaatatggcatggccgcctgcgggacgttggtagggtatcccgtactcatccagtttcatggctagatagcccacctggtgaatgcgggtttccagattgtcaaattcagtattttcatccaggccgatggcaagggcgttcatgtcacgaccgttcatgcctccgtaagtaaggtagccttcgaactgcacgcagaagcctttggcaccttcataccagtctttccggcgggtggctatgaatccgcccatgttgacaataccgtcttttttggcactcatcgtcataccgtcggcaaggtcaaacatctcgcgggtaatttcctttatgctcttgttgcggtaaccttcttctctcattttgatgaagtaggcattttccgcaaagcgtgccgagtcaaagagaacgggcttgccgtacttgtcggcaatggcgcggacttcgcgcaggttctgcatggaaaccggctggccgcctgcagtgttgttggttatggtgacgatgacgaacggtatccgttcgctatgttcctgtaatgctttttccagttttttagggtctacattgcctttgaagggaatttccagctgtgtctgtttggcttcgtctatggtgcagtccagagccaatgcccggcgtccctcgatatgtcctttggtggtgtcgaaatgggagtttcccggcacaatgtcgccctcgtgcaccaagtaggagaagagtacattttcggcagcgcgtccctggtgggtggggataatgtattcaaatccggtgaggcgggtgatgacttccttcagtttgaagaatgaggtggctccggcatagctttcgtcacccagcatcatgcctgcccattggcggtcgctcatggctccggtgcccgagtcggtgatgaggtcgatataaacttgttccgatttgagttggaatacgttgtagtgggcctctttcagccattgttcgcgttcctggcgggtacttttgcggataggttccaccattttgattttccatgcttcggcaaatggtaattccatagactctgtatctttaataatttgacaataggttaacggataaaccgattattgcggtttaatgtgccgaatttagacaaaatctatgtaataaccaatttaaatatgactttttgtaatgtaaatgtccggacgaaatcacttcggccggacatcatcaaataaacttggcagagtttattaccttctttactttctctgaattaggtttgatgaatgaaatgatggacggtttgtccggctcattagactcaacgctttttcctcgaaagcaatgataaagtatgcatggcaggtcttctgacttgtttctgttgcaggcgccttcccggaagaatattccagtggcatagagtaattgtctgcaacgttgcacgaaacttacagcagcgggactgtccaggatttacacctgattcccttttaatcgctttcccagaagagggggagcgaaccaatgcatgacaaagatacggattctttttgagaaaacaattctatgagtgataaattttcttcccctctctctttctttttgccgacaaattggcaaggttttgccaccctcttggcaagactttgtcaccgcgttggcaaaactttgccataggcatggcaaaagtttgccaaaagcatggcaataggttggcaaaattactctctgattgatagtgacttaaggcgatttaagcaatccgtcatgtcggtaaggtgaaaagataccaatacaagccacacttgccacaagaaccttctccagaggtatgcaaagcattttgtttggtgtggtaaaacgggctgttatctctcttttgccagtgtgaatacaaactccagtcctccaccttggttgtttttggcagagatggtgcctccgtgaataaggactgcattcttcactatggcgagccccaagccggtgccgcccaacttgcgcgagcgtcctttgtctacacggtagaagcgttcgaacaaacggttcagatgttcgggagaaacgccgatgccggtatcggcaaaactgaaatagtagtaattctcgtcttcgcggaaacaactgatgttgatgtgtatgttggtgccggcataagcgatggcgttgtccatgagattgcggaagatggagtagagtagagagtagttgccccgcaactgtatcttcggttttagggaattgacaacggtgatttgcttctgttccagttccagggacacttcgttgacgatgtttgaaaccagcatgctgatgtccaccttttccatatcaatcatgttggcggcttcgtccatgcgggtcagtacggatatgtcgcgcagcaggcggctcaggcggttgctttgcgcgtagcagcgttccaggaagacctgcatcttttcgggtgcaatgttttcgttgttcacgatggtttccagataaccttgtatgctgcttacgggggttttcagctcgtgggcgatgttctgggtcaactgccgtttcagccgtacttgctcttcttcctgggtgatgtcgttgatggaaatttcaaagctgaggtcttggaagatgatgcactccacgatgaaggtgcgtccgttcttgttgatgtgtacggacatccttcgttcttcgttgtaggaggggcgcttctgcgccttgttgatgaaatccgttatcttctggaattcgcagatggagaatatctcttcggtagcctgcaggttggagtctgaaatcagattgccgtattgggtgaacagattgtttaccaatatctcctttttgtctctgttgaatacgcccagtccttcgcgggaggtttgcaaatgggtgataagcttttcgcgctcaatgtaaagcgcctctttggtttcgcgcaggcgcttgtatatctgtatgatatgctgcgaaatctctccaagctcattgtgcgggaaggcggcttgtatgtccatgtctatgggttcgttcttgtcggcccttttggcaaactcgcgcaggtggttgatggcgctgcccagtttggaggtgaatttgtagaagacggatatcagcagcagtgatacaatgaccgtgaaccagatgtagtgtgggtcggcagccagattgttcatcaggttgacgttgtaggggagggctgagcggatgatacagccttcgtaggcggtggcagaatagaaataggtcttgccggtggtttcggagatgcgccgcaggtcatagcccttgccgtctttcagcgctttctgtacttcggggcgtttgatgtggttgtccagttcatggctgtcgttctgggagctgtcgaacaatacgttgccatgaaggtctaccacagtgacgcgcaattccttgttcacatgcttggagatgtagctgtccagcatggaagtccataggctgtcggggaggtagcgaagctcctggtgcagtctgtcgttataatcttgcagctgcatgtccagcagctccactttgtattccttttcccgctgatactggtaggcgatgaagcaggcggcgaatacgaggaacagcgagatgaccgaaaggaaaagcttccggctgaaggacagaaagtgtctgtcgttattcggcttcgaaacaataaccatatcccaagcgtgttacgatacatttgccataaactccgattttcttgcgcagacgtgtgatgttcacgtcgatggtgcggtccagcacatatacttcgtcgctccagatgcggttcagtatatcctcgcgcgagaatacgcgtcctttattctgcaaaagcagcaataagatttcaaattcttttttggtgagcggtgcctcttcgccgtcaatgcagactttcttcttgatgatgtccagtaccagcgtcttgtagacaatctgttccggtgcatgttccgtttctccttgtcgggtgcgtctaagtacggctttgacacgtgccgccacttcgcgcagcgagaagggtttggatatgtagtcgtccgctcccaggttgaaaccggtcacggtgtcattttccgtatctttggcggtaatgaagatgatgggtatctgggctgtcttcttgtccttcttcagcatgctcgccattttgaagccggaaatttctcccatcatcacgtccagcagtagcaggctgtagctgccaatgtccattctcagagcttcttcagcggagtttgccgtatccacttcgtagccttcgttttcgaggttgaacttcagaatttcacataagtcttcttcatcgtccactactaaaatccggtaatcgttcattgctttgttgtttatgtatgacaaggataaaacaattctcttgtcacaaagttaaactttatttctttttatcggcaaaaatagtgcaaaccgaatgcagaattttcatgtttgcatgaaaacttgtgctgagatgcaggccatttctactttctgggtacaaaagtgaggctaatttgttacggaatgatgaaacaagtgttacatttgggttacattaaattctcgtttatctaaaagccctgtcacatataaaatattatctttgcttcgtaaatattgaattgtatgaaagaacttatgtatatcaggagtttctctaaaaggcgtttgccggttattgtgggaactctgcttttagtgataatcggctctgtctggctgaatacggctcctttccgttcgggctttgatatcgcggatgagctgggcggtaatatattcccttccagtatcctttcagtggctaccaccgatgctcaggtcatagtgccggtagactccatgtatgtaggtaatccgaagtcgtgcatcgctgtccgtgtccgttcgaggaatgcttatagccgggtgcgggtagaagttgcggagactccgttcttttcccgttcagtgtcggaatttgtgctggcaaaaccgcgtacggagtatattatctatcctgatatcatatggaattatgaggctctgaagaataacaaccaggcggaacccattagtgtggccgttatggtagagatgaacggtaaggatttggggcagagggtgcgtactttttccgttcgcagcattaatgaatgtctgttggggtatgtcacgaatggtacaaaattccatgataccggcatcttttttgcagcatatgtaaatgaggagaatcctatgattgacaaactgttgcgtgaagcgctggatacgcgtatcgtcaaccgttttttaggctatcagggaggtgccgaagtggtggacaggcaggtttatgccttgtggaatgtactgcagaagcgtaagtttcgttatagctcggtctccaatacgagcctttccagcaatgtggtcttttcacagcgtgtgcgcacgttcgatgacgccttggagtcctcgcaaatcaactgtgtggatggaagtgtgctttttgcttctctgctccgtgccatcaacatagaacctatattggtgcgcaccccggggcatatgtttgtaggatactacacggattccagtcataaagacatgaatttccttgaaacgaccatgattggtgatgtggatttggatgatttctttccggacgaacagttggattcgacgatggtgggaaagtcgcagaaccagatgtcgcgcatcacctttgacaagtccaaggagtatgccaataagaagtatgcccagaataaggaaggcattcattccggcaaactgaactatatgtttctggaaatatccaaagaggtgagaaggagaatacagccgatagggaaatgaggcgtagaatgcaaacagccgattttcacgaaccggccgttccaatcatcatctatgaatgaagaccgttgagaggcttcaatgaattaaatctcacactcatgctacgtgctgtcatgaaataatctgtaccattatatatgtcaccactgatatggaaattccacaacatggaaagagaccagtttttataagtgaaacttgtatatattagtattatgctgaaaaataaaatgttaatgtagattatatgtggaatttattattgttaatagtctaacactattttttgatgaacttatgaatcattttaactaatttgctttttagaatccttatccataccaatatccccacgtaatcaagttctttttatataaaaagatttatgaatatgctttaatgcgtaaatcaaatagttcaaaacattgctatatataaatgataaatgtgatgtgtttttcgttttttcgcatcattgagatatattatatacaagtacggcattaatatgattaagagttaatgctttgaataattactaaatagatatttaaaactttgcaaaaatataaatgcaaatgttttaatatttatttagtaatttttaattcgattgatgatagaatttctaaattaattcatatgtttgcaaacaaatccaaataatagagcttatgaaaagaaattattgcttatcattagtgttgcttgcattgtttggggtgtctgcaccttttgctgctaatgcagctgttgaaagtgtgctaagttcccaaagtactcagcaagccaagaaaatcacaggtaaagttttagatgcggcaggcgaacccatcatcggcgccagcgtgttagtaaaaggttctggtaccggcgctgtgacggatattgatggaaatttttctgtagaggcgccggtgggtagcacattggaggtatctttcattgggtacaaaacagtgacattgaaggtgacgaacgccactacttatactgtgagtttacaagatgactcgcaagcgctggacgaagtggttgtgacggcaatgggtatcaagaaagagcgcaaagctttgggatattcaatggaggatgtgaagtcggatgaattgatgaagatgaaaactgccaatcctatttcatccctttcggggaaagtggccggtgtgaatgttactcagtcatccggtgccgctggtgcgggcgctcagattatattgcgtggaggaacgtcgggtgctgaaggcaaagacaatcagccgctctttgtggtggatggtgttatttttgataactcttcatcagtggtgggcaattcggctttcgatggttccatgcgttctgcctctactacttccaatcgtttgatggatataaatcccgaagatatagaaagtatgtcggtgctcaaaggccctgcagctgccgctttatacggttcacgtgcagccaacggagttattcttatcactaccaagaaaggtaaagagggcgtggttgaagtgaatatcaattctaagtttactgcttcatgggtaaagaacctgccgcaaacgcaacgccaatatgcccgtggatatatggaagaccaatatgattcaaagaagaactatactggtactgtgtttaatgactttgcttatacttcgtggggagagaagtcgaacgcagctacttatgataacataggtgatttctttcaaggcggaaacattttcgatgaaagtgccagtgtagccgggggtaccaagaatagtaaattctatctttcagggtcttactatgatcaggtaggtgttgtgcccgagaccggatacaagaaatatgctttccgtttcaatggtgagcagaaggtggggatttttacctttaacgccagtgccgcatatagcgatgctcatacggaccgtactttgacgggtgccgggctttataattcgagtggtaatggtgctctttatggtgtgtacaactggtctcctttcgaccgaatgacccactatcagaacgaggatggtacccgttatcgtttgtttggcgatcgtcttgatccatgggacgaacgcgacaacccctattggattgtcaatcgtaaccacatgtatgacgacatcgaccgtttcaatgggatgctcagtataaaagccgatattgccaaatggtggtttgtttcttataaaataggtattgaccgttatacccaaactgcttccaaccgtttggctgccaatggcgtgcttaaacaagtgtggcaaaaaggtatgatgagtgacaacacccagcagttccgctatatgagccatgactttatgtcgaacatgagccataagttcggtgatttcgatttgaatcttttgttgggtgccacaatggacgaaaccaagacagaccgtagctcgatgatggcttggaacttttccgttcctgatttcttctcatacgccaatgccagtaaagacaataagcaattcacacatgcagctactaagaaacgtttggtaggagcttttggagaattccgtgcatcatggaaaaatatgctctatctcactgtgagcggtcgtaatgactggacttctactcttcctcttgaaaaccgttcgtacttctatccttcggtaagcggttcattcgtatttactgaagccttgcagcgactcggttggctggatgacagtgtgctcaactttggtaaattgcgtgcatcgtgggccaaggtaggtaaagataccggtgtgtacgaattggaaactgccttatggcctacgggtacctatcttgacggtacggtaggtgtgggaaatacttggacacgcggtaatgacaaactgaaaccggaaatgaccaagtctaccgaaataggcgtggaattgagtttcttcaaaaaccgcctgcacatagactatgcttactataccaacgattcatataatcagattcttgctcctcgcggtccgcaatctaccggttacatcttttggagtatcaatgcgggcaatgtgtataacaaaggtatggaactctctatttcgggaactcccatacagactaaggactggacatgggacattggcttgaacatggcaggtaatcgtggtactttggacgggcttcccgaaggtatgggcgtgatgtatgttaccgatgtgcaatatgccggtatgcaggcagcctcgttcagcggtggagattttatgggtattgccggtaccaaatggaaacgtaatgacgccggtgaggtgatactcgacaaaaacggtatgcctacttatgacaaaacccttgtagcagtaggtaatcgtgagtcatcgtttaccggtggattgaacaacacccttacttggaagaattttactttcaatatgctatgggaattccgtgtaggtggcgatgtggtcaacggtactcaatatgctatggataacagcggtgtgagccagttctctgccgatgtacgcaatcgttctctcactgtaacgggtgtcaatgccaatggtgacccagtgaccaatacttgggaggccgataaaacctatacttttaatggagtacaaatgagtggttacaacatcattaaggattactatcagaactattattctaaggagtcagccaactatattaccgatgtcaactctttgcgtttgcgttctgtttcattgagctatgagtttcctaaaacgtggctttccaagattggatttgtaaagcgtgcttcggtatcggtagctgctaccaatctattgctcatcaccaattacgacggtgatcctgaagtggctgccgctggtgcgggtgtaggtggctcatcatcagtaggatttgactactgcggtgtacctgccacttctaccatgtcatttggcttgaatcttactttctaactcttaaaaaacagaagcaatatgaaattattcaaatctatgatattatgtagtgtgggtgcccttatgactttgttctcggggtgtagtgactggctcgatgtaaatgtcgatcccgaaaatcccacagctggaaatgcgacctatgattcacgattggcacatattgaattttataccaacagtgccactcagtttgctgcttggcgttccagtatgtctatgggcgattggacacgctattatgacggcggtacttattggagcatgtcttattggagtcctcagaccggtgccgttaccactccctaccaatggtggttctgtggagctgctgtaaatattccatttttgattgacaaggctacggcagccgaggcttggcattatgtgggtgcagctcgcgtaattcgtgcctatggttttatgcttatgacagacctttatggagaaatgccttacaagtcgagtgaggctgaagccggtgttactcctacctataatgacggaaaaacaatctatttgggctgtttggccgatcttgacaccgctatcgagatgttccaaaaagagcaagggtctgcgacagcttcgttggctgtaggcgatatttggaacggtggtagtgtagacaagtggcttaaattggcatacttacttaaagcacgttacattaacaagcttattaaaaagggtgaaggcagttatcttgaagggaaatacgatgccgcagaaatcttggcttgtcttgacaaggctcagcaaagcaatgccgacaataccgtattcaatcatattgatgccaataattcgcatgatgtattgggatgggatgaaccggttgattattcaccgctcttttctgtatgtggcatgaatgccggctatatgcctaccaagatgctttacgataatctgacaaattttgccggaagtggaatagaagatccgcgtgccgataagattttaccttgggcatattcgaagcaatcaagtaattcacccgcagaggtgaagttcaaaaacggttggcgtcgttctatgggtgtagacatgattggcaatgatagtcccagccttaccggcggaccgttgcgctcgaacttctcggcagccaaaggttggtggattgacagtgaatcttctacccgtaagggggacactatttatgtagagtgtaccagtcagtgcaaagcttatcaaggacgtcctgatttactttatcgtcgcgatggcactgatgcctctcgcgaatcgggaactttctatactcgcgtgtcttctcccacctatattggaacctatgccgaagcttgtttcatacgtgctgaagtactctttaaccaaggtaataaaggagcggcttttaatgcttataagaaaggtattgcagccagtatcgacggtatgaacgataagttgaaagtgtggtgccgtgaagatgccaatttggaagcatgcccctcgttctctcctatgacgcaaaccgatattgacaactatttgaacaatggtatcggcactgaagagaatattactttgggcaagattcttactcaaaagcgtttggcattgcatttttccatggaaatttggaacgatatgcgtcgctacgattttaatccggagcttttcttaggctggggtattcctgcacgctatggcgttgatgctactgcccaaaagaatattccgcaaggtaaacagttccgtcgttggcagcaatgcagtcatgaactcaactacaatacggccaatctgcaagctatcggtgccactgttccgggagctgatacttcaattgcactttggaatgctgccgaggacgtatggactttacccgtatggtgggacagtgcccaaaactaatttttcattgcattttattttgtgatacaaattcattatctttacgcccaaaatgtggattttaagatatagttaagatattgaaggctctaatggtcttcattcatagatgatgattggaacagccggttcgtgagaatcggctgtttttttgtttcgtttgtttgcatatcaacggcggtaatatgttacttttgccctaaaaccgaagataggctgcacctcagcataaaaaatggacaagttcattttattttgcattcggtttgtactatctttgcgagaaatagctgagatggtgtgaactgtctttgcaaagattagtctatatatggaacaaagcaagaaatttatctctccgggggcatggttctccatgacttatccggtagactggaatgaattcgaggacggggaaggctctttccttttttataaccccaatgagtggaccggtaattttcgcatttcggctttcaaagggaatgctacatatggcaaggactccgtgaagcaagagttacgggaaaactcctctgccattccggttaggataggccggatggaatgtgcatatagtaaggagatgttcgaggaagaaggtgcgtactatacttcccatttatggataacgggcgcggatgaagttgcctttgaatgttcgtttacggtgaagaaaggagagccggttgcagaagcggagaagattatcgcttcgctggaaacgcggaaggatggagtgaagtatccagcggagataattccggtgcgcctttcggaaatctaccagattaatgaagcatacgagtgggtggatactactataaaggaattgttgaagaaggatttccagggagctgaggaagacattgccaagatgcagcagatgatggaagaaagcaacatcggtcctaagaagaaggatgcatggctggcttttggcatcgcgctttgtgttattttcgccaatgaagtggacggtatggaatggcgtaccttggtggacggaaaccgggaagcgcccatattgctgaacacgtctaccggtgaatggatagaccccatgaagctggtttggagcaaagtaaaggcaggaggtaaagtgaatctgccggagatatacagctccttgttctaaggtccggtcatctcggtactgtgattttcaactttcaattttcatttttcaactattaaagcattggcagcagtaaattcaattcttcaggtggaaaacttgaccaagtcgttcggtgacttggtactattcgaaaatatttctttgggcttgtccgagggacagcgtgtcgggttgatagccaagaacggcagtggcaagacgacattgctcaatatcctttccggcaaggaagggtatgacaatggcaccatttccttccgtcgtgatttgcgtgtgggttatctggaacaagacccgcaatatcccgaagagctgaccgtgctcgaagcgtgcttccatcatggcaacagtactgtcgagttaatcaaggaatatgaacgttgcatggaaacggaggggcatcccggcttggacgaaattctggtgcgtatggaccatgaaaaagcttgggagtacgagcagaaggcgaaacagattctgtctcaacttaaaatacgtgatttcagtcagcacgtaaaacatctgtccggcgggcagttgaagcgtgtggcacttgccaatacccttatcactgaacccgatttgctgatactggacgagcctaccaaccacctcgacctcgatatgacggagtggctggaggaatatctccgccggaacaacctcagcttgctgatggtgacgcacgaccgttatttcctcgaccgggtatgctccgaaatcgtagagatagacaaccggcagatttatcagtataaaggcaattacagttattatctggagaagcgccaagagcgtatcgaggccaagactgtggagatagaacgtgccaataacctctaccgcacagagctggaatggatgcgccgcatgccgcaagcccgcgggcacaaggcacgctatcgggaggatgccttttacgagttggagaaggtggctaagcagcgtttcaacaacgacaatgtaaagctggacgttaaggcttcttatataggcagtaagatattcgaggcagaccatctgtacaaatcctttggtgacttgaagattctggatgatttctcctacatcttctcccgttacgaaaagatgggtatcgtagggaataacggtacgggcaagtcgaccttcatcaagatactgatggggttggagcaggcagacagcggtacgctggacattggcgagacggtccgcttcggttactactcgcaggacggcttgcagtttgacgagcagatgaaagtgattgatgtagtgcaggacattgccgaagtcatagaactgggcaacggcaagaagctgacggcatcgcaattcctgcaacatttcctgtttactcccgagacacagcacagctatgtctacaagctgagtgggggagaacgccgccgcctctatctgtgtacggtcctgatgcgcaatcccaacttcctggtgctggatgagccgaccaatgacctcgatattgtgacgctgaatgtgctggaagagtatttgcagaatttcaaaggatgcgtgattgtggtgagccacgaccgttatttcatggacaaagtggtagaccatctgttagtgttcaacggacaaggggacatccgcgactttcccggcaactatacacaatatcgcgactggaaagatgcgaaagtccatcaggaaaaggagaaagagaaagaagccgccaaggctcaggaggacaagacggcgaaggtgcgtctgaacgaaaagcggcgcatgtcttttaaggaaaaacgcgagtttgaacaattggagcaggagatagctgacctggaaaccgaaaagaatgcaattgaagaggctttgtgcagcggtactttgtctgtggacgaactgacggagaagtcgaaacgtttgccggaattgtcggacttgattgacgaaaaaacattgcgctggctggagctgagtgagatagaatcgaactgaagttcgaaattgaaaattaagaattaaaaattagaactgagaaagtgggaaatctgacgaattatcatagccatagcctttattgtgacgggcgtgccggcatggaggactttgtgcgttttgcattgagtgaaggttttacatcttatggcttttcatcgcatgctccattgcctttttctacggcatggactatggagtgggatatcatggacgactatctatctgaattccatcgtctgaaggagaagtatgccggacgtatcgaactgtatatcggtctggagattgattatctgaatgaagcgagtaatccgtccatcgcccgtttcagggagttgccgttggactaccgtattggttctgtacatcttctctacaatgacaaaggggaagtggtggatgtagatgtacctgcggatacctttaagaccattgtagacggacatttctgcggtgacttggagcatgtggtccgtctctattatggtaggttgacgaggatgctcgagctgggtggttttgatattgtgggccatgccgataagatgcactacaatgcagcatgctatcgcccgggattgctggaggagccttggtatgatgagctggttagggcgtatttcgcagatattgcccgtcgcggctatcaggtagaggtcaataccaaagcctatcatgacctgggtactttttaccccaatgagcggtatttctcctacctgcatgatttgggtgtacgtgtgcaggtgaacagtgattcgcactatccggaacggataagcaacggacgtcccgaagctttgtgtgccttgaggaaagctggatatgaatcggtgatggaactacacggaggagaatggaaagagatgcctatcgtgttttgagtgaataggatacaaaaactcctgacttgcctttttgtaaaggtagtcaggagttttttctttctattatgaactattctgttttcagtaaaaagtcgtcaatcgcctttttgtaggtagccttatcggctgctccgcggaagagctgaggctctccattcatagggatgaatacaaaaagagggatgcttgttgcattgaacaacgctgccagttccttttccttatccacattgactttgtagacaacgattttatcggcatactctttggccagttccttcataatgggagccaccatgcggcaaggtccgcaccagtcggcatataagtctatgatggcaggcttgtttcccttgtatttccagtcctgggatttctcatagtcgaacacatccttgatgaacatggctttgttcatgacgataacttctccgtttgtttgagcataggccagcatgcaggaaaacacgagggcaaccattgctataatcttcttcatttcttcttgttaagagttttgttctataacggctttcaaatccttaccgctgatgacacccgaatggcgccatacggcttcacctttcttaaatacgataaatgtcggtactgcttgtatgcggtagcgggcagcaagctcttcgtgctggtctacatctattttggcgatacgggcagcatctcctatttcgtttttgagttcctccagtaccggatgcatggccttgcacgggccacaccaggttgcaaagaaatcaactaaaacgggcttttctgattgtatcaattcttcaaacttttccataattttttcctttctgtttttatttatttgtaatgataacaaaataggaggaggatttgttcgctaaatcattatttaatcgtcatctcttcaatgagatgcgaagctcccgcgtatttgtcgatgatgaacaaggtgtagcggatgtctacacatgctgctcgttgggaggacggacggaaggcaatgtcgccagtcagaccttcgtaattgcggtcaaagccggtacctatcagttctcctttggcattgaacactgggctgccggagtttccaccggtattgtctgtgttgacaatgaagcagatgggcatttcgccgttcggcatggcataacgtccgaaatcctttgcctgatacagctgtttcagtttggcggggactacaaactcccaattgtcgggatcttccttctccatagctcctttcagagtggtgtagtaatcatatttcacaccgtctgccggagcgtaggggagcacttgaccgtaggtcaggcgcaaggtggagttggcatccggatagatgggctgaccattggcaagtttcatgtccatcattccctttacccataccttgtgggcggcattgtagtttttattggcatccatcatggcaatggaggtctgaagcaggccgtccgtgatggaatatttcagcaagaccatccagtctgtattaatcttgtagaggctgggcttgcggatgaacttggcaaagttctccttgttgccgaagatggaatgttcaaagcaagcgtcgatgaaagcgtcgctgttgcccttgaaacgcttgtctatgatttggaaaataccgatgcgttgttcggcagggatatacttcatgtagattttcagcatttccttgccaacaatacgttccacttcggggaaggggacagaggcaaagtagcggtcggctgccttctgaaggctgtctttagctgctgcaatctgttttttgtccttgttcttcaaggcagataccagtcctgcggtgctggggatacgcatgaaatcgagtcccgtcaccagtgcttcctgaatggcttgctggtggtagagggctggacggcgttgctttacgatggcgcgtatctggtcgaatgcttgctgatagctattgtcgttcagcgagcgtccgcgtgccaggagtgcctcttgctgtgcacgtttagtgtccaatactttcagacggacgagaccttcgttcataccgatggcatttttccagtagttggcagaagatgcatacttgctggcatagtggatgcgtacggcatcgtcttgcaacatttgtttcatcagagctttctggcggacatcgcgcacgtggtggcgcatgaagttggtggtttgcatacgctcttccacctcgtcggaaatcatgtagcgccagttgcgtccggggaatcccatgacgaaggtaaagtcgccctcgcgatagccgtcaaggctgatggtgagatgtttcttcacttttaggggaacgttgtctttgctgtaagcggcgggtttcccgtctttgtcggcatagatgcggaagatggagaaatctcccgtgtggcggggccacatccagttgtcggtgtctgcgccgaacttgccgatggaggaggggggagcgcctaccatgcggatgtcgctataggtggtctttacgaacagatagtatctgtttccaccgtagaaggctttcagttccagcttgcggccgggtgtcagggcgatgccttcggacttggcgaagcggtcggctactgtcttcaggtatttgggagacagataattggtgccgttcgggtcgtcgtcggttttcagttgttcgtttacgtactctgtcacgtccagtatccggtcgatgtaggtgacggtgagtcccttgcagggaagctcctcttcgcgggacatagcccagaaaccgtcggtcaggtagtcgtgttccaccgagctgtgttgctgtatggcgccatagccgcagtggtggttggtcagtaccaggccttcggcagagatgacttcgccggtacagccaccgccgaaatgcaccacggcatccttcagggcaatgccgtcgggattgtagatttggttggtggggatgagcagtccgagttccgtcatggctacttcgttctgcttttgcaggtcggtgagcatccacataccttcgtcggcgtgtgcggcaaggacagaagatgtaatgaataatgataataggattcttttcatggtgatgtgcgttagaagagcatctgagaggggggctattcagtatacgactgaatagggttaagtatacgactgaatggcattcactatacgactgaatggcattcactatacgactgaatgccattcagtatgggaggtaatctctcagaggctttaatttattctataatgttcatttcttttatcagatgactgcaattgcccagtttgtcgaggatgaagagcacgtagcgtatatccagtgcaatgcaacgctgcaggtcattgttgaagttgatgtcaccgctcagagattcccagttgccgtcgaaagcagtaccgatgagctgtccttcgccattgatgacggggctgccggagttaccgccggtgatgtcgttcgtcgtgaggaagcaaaccggcatggtgccgtctgccatggcgtagcgtccgaagtctttcttttgaatcagttctttcagcttggcgggtaccacgaattcacggtcttcgggattctctttttcaaggataccgtcggtagtggtatagtagtcgtagtgtacggcatcgcgtgggctgtatgattttacattaccataggtcagacgcatggtgaagttggcatccggataggaggggacgggctgtttcatttcacccaagccacggatgtaggccttgtggagcagttccattccgctttccagttccatgtattgctttccgagttcctgcagcttttcgttcttggagcgcgagtaagccgtagcagggtctttctcgatggctttcacggtgggctttgccaggaatttatccaggttcttgcggttggagaggatggagttgtcgtaaatgttgtctacgtatgcgttgtagtcgcccttgaactctccgttgatggtttggtagaaggagggcagctcgtcggcgttcagtgccttggcaagggcgggcaggatggctttggctacggcgcggtccacttcgtggtcgtagtctttattgtggataccatcgtatgcattttccaactgcttcttcgaagcttgcagcaatgagtcgttcttctcttcgagcgctttctttatgttatccataataaggtaggtactgccgaattcgatggcaccgcgcaatgcttcgttggtatagtagagctggcgcagcgtgggggtgcttttctcgatgatggcatcaattttctctaccacaccctcgtattcgggttttccttgggcaaaggcggcatactttttctcgatttcggctttggcgcccaacacgtcattgtcgatgattgccttgttcataccaatggagttcttccagtagttactgcttccggcaaacttgctggcatactggatgcgggtcttgtcactggcatccatatacttgcgcagcacttcgaggcgtacgccgcgcatatcaatcattgcctgattcacggcgttcatgcgttgcttcacttcgctctgggtgaggtaacgttctgtgctgccggggaagcccataatcatggcgtagtcaccttcgttcagacctttgatggagatgggcaggaacttcggcgttttcaggggtacattgctttcactgtattcagccggctctccgttggcatcggcatagatacggaacatggagaagtcgcccgtgtggcgcggccacatccagttgtcggtctcaccgccaaacttacctaccgaggagggaggagcggcaaccatacgcacgtcgctgtataccttataatagaacatatagaatttgtttcctgcatagaaggggagtgcgcgcacttcaatgcccggtttacccttcaaatcgctcttctccagttcctcttttgccagtttgttgaggaacggggaagtcagtgcatcgatttccgtcacttcgcctgcctttattttagcgttgacaaggtcggtgatgtctacaatgcggtgcacgaaacggaatttcaatcccggggtgggcagttcttcactgcggttcatggcccagaaaccatctgtcagataatcgtgttccacgctgctgtgctgctgtatggcaccgtatccgcaatggtgattggtcagaatcagtccttccggagagatgatttcgccggtacagccaccgccaaagatacctacagcatctttcagtgacacgccgttgggattgtaaaggtcgtcagcctccagcttcagtccttgctttttcatcatgtcgatggagttctgctgcttcatcagttgcaacaaccacattccttcgtctgcacgcgcagagcagactgtcagtgcggcaatggccgcaagcaaacctttcttaaatgtaatcttcatataatcaattattaagtaatgtctttgaatttcattgtcatcgcttgtgggcttatggctttatggcattgtttcttattgcttccataatgtttgcaggcggacgccggttcatcagttcgttcttcataaagtccatgtatggggctgcgtgactgaagaacttatgatatcctgcacaaaggtaattcagtcccggctctccgtcggctgtacgtgcaaaacggttctttggacattcgccgttgcaggcaaacagccattcgcactccctgcattgggtggggagagattgttgcttcatcagtccgaaggcttgttgccgttctccgtacatcatctccaccagtgtattctgatggatgttgcccagtttatattcggggaaaacaaaatggtcgcacgcatatacgtctccgttgaactccatgacgcctgcatggccgcaagtctttgccatggaacatacacccggttgttcgcctatccagttggcaagggtagagtcgaataactgtatgtagtaagtacccacgtcctgctttacccattcgtcgaacaaggcgcataggaagtctccccattgttccggcgtgacggaaaagtctgccagctgcgtgctcttttccttgtctgccagggaggcaagatggcgtccgtccccatgaggggcaatgcgctccacgatgggggcaaactggatgtaatggcatcctatctccttgaagaaattatagaagtccagcggatagtcggcgttgtagtcattgaccactgccattccgttccattccacaccgtgctttttcagcaggttgatgccctgcatcaccttgacgaaagagggcttgccctgcttgttcttccggtattcgtcatggaactcctgaggcccgtctatggagacacccaccagccagttgttttctttgaaaaaccggcaccattcatcggtcagcaacgtgccgttggtctgtatgcagttgtctatggtgcgtccgttggcatatttcttttgcagctccatggcacgtttgtagaaagagagcggacgcatcagcgtctctccgccatgccaggtgaacagaacctggggcatggtctgcgagttgatgtactcctcgatgaacttttccagcagttcctcgctcatcacatgcttggggttgtctctatatagtttggatttctccagataatagcaataatcgcatgccagattgcataccgcacctaccggtttcagcattacatagagcggtttggcaaaaggtgcataggttgacatgtatattttctctatttttatgatttataattgtgcaaaaatacgtaaaccgaatgaaaaatcctttctttctattcggtttataaggaatattaatacctttgctgggtgtaattcaaaaatcgtttcttgcatgattagaatgagtgtgaaccgcattttaccctttttgctcctgcttgtgctctttacttcttgcaaccgcaagtataagatagagggcagttcctcggtaaccagccttgacggaaagatgttgttcctcaagacgcttcgggacgggcaatgggtgaacgttgactcggcagaggttatccatgggcatttcaagatgaaaggccgggccgattccgtgatgatggtgactctttatatggaccacgagggcattatgcctttggtgctggaagacggcaaaatcgtggtttccatctccaatactcagttgattgccaaagggactcctttgaatgacaaactgtacgagttcatagacaagcgcaattccctggaagtgaagatagaggagctggaacggaaagaggcgcgtatggtgctggacggtgccaatctggatgacgtgcatgggcagttggcaaaggaaggcgaagtacttgtgaaggagatgaacgactacgtccggcagttcattgtagataactttgagaatgtgctgggccccagtgtattcatgatgatgtgcagcacactgccctatccggtgatgactccgcagattgaggacatcatgaggactgctcccttgtcttttaaagagaatactttggtgaaggatttccttacaaaggcgaaggagaacatgcagctgattgaagagcagaagcgcatgaagcaaaatgcttctgtaggaggacagaaataaacaggaatgagttgataatgataaacgggaatgcctgaatatcttgataggatattcaggcattcccgtttgtcattatgtctttatctgtcctggtcttcgttcttcaccatccctttatacttttccggcaatgcactctccaccgccgcataagcctcgttcatgcttgccttgatgttttctgcccctttccctttgggaggaataggttcatggatggtcagtatcatccggtggcggtgtatccactttccggtgcgtggaagaatctcgaacgagccgtctatagtgacgggcaccacttccagttgcagttcatctgccaactggaaagcacctctcttgaagtaccccatgtgtcccgtgaaggtacgtgccccttcgggaaatactaccagtgacacgccgtctttcaaagatgattctgcctgccgcatggtggcaagcaccttcttggggctggaacggtcgacgaagatatgtcctgcgctctcgcatgccttgccgacaaacgggattttgcgcaggctcttcttcatcatccatttgaagttccgtcccaggaatccgtatatcaggaatatgtcgaaggcaccttggtgattgggcacaaacacgtaggaagtacgtttgtgtattttctcccttccatgtacctccaccggaataagcagtatatagcagatgagctgtgaccagattttaccgggatagtaaccccagatatgcgctcctcctatcagcgaaccgatgatggtgaccaatgctgtaaggatagtcagtaccaataaaatgggcaacgcaaagcaaacctgataaataatataaagtatcttcataggtgtcggattttttattgctacaaagatatacctttttcttatttcgtcactctttctctcttactaattttagtaccgtaatttccggccatgccccgaaccggaacggcagtcctacatagccgatgccaatatttacgtacaaagccctcttgccttcgtagtacattcctctccattccggatagataagttcggcaagggagtgcccgaacaggatgccttgcatggcgtgggtgtgtcctgcaagcatcagtgaaatatccgatcggggcagtacctcgcgcctccagtgggtagggttatggctgagcaatatttggaacattctctccgtgccctgcatggcttgtggcaagtctgcaaattgggagaaaggaggctccccgtcgttttccacaccgatgagggctatgctgtcacctttgtgatgaaggatgtcatgctcattgttcagcagtttccatcccattgctttctgctgccggattaaatagtccagattggcgatttctgctttcgggctttgccagtgatagtatgagccatagtcatggttgccgaggatggagtatactccgtccggtgcgtatagttgggagagtatttcttggaaaccatccagttcatggctctgctggttcacgaggtcaccggtgaagacaatcaggtccggcttctgtccgttgactgaatcgaccaactgtttgatggggtccggattgccctgccaactgccgatgtgtatgtccgatatctgcacgatgcggtagccgtcgaaaccttccggaatatcggcagaacgatattctacttctttcgtatcgaaacgggtgatgcctgcaaaagttccgtagaggatattgaagaagctgacgacagctaaaaccagtcctatagcggtgaacgggctgcggggacaacgacggatgatgaagtgcgccagtactcccaccagagagcaaagcatgaatatggtttttggaaagacaaacagcatgatggtaattgccagtctgcctatagcctgcgtatggtttgacatcgcattgtcgccagtaaggaacatgaagtaaacatagcctgccgccagcaataaggtgggaagccaatagaggctgcgtagaaatgtctttctggtttttcttactacataaaccaagtaaatgtaaaggtcggggatgagaaggaaaaggatgaaaacaagagttactcggtgcatatatctttcaattcttcaatgttctttttaatattgtccagatgtttataaatcactttcttgtagagaatatagataatcaacgcatcaaatactacaaagagggtaatcagtatggcttgcacgccaacggacatcagatgatattccatcacccaataattgaggatattgaaaaggataatccagatggagatgcccatcacctcatatttggtccattggcggaaagtggtcatacggcggctgacttcggcaacactcatttcttcaatatgtgtattcttattccaacggtatgttttccagtcccaccacatgcctgcgagaatgctgatggcaatgaatcctaaaaagggaacaatcttttcttgtagttgttcgttgaaaccgaaggtgggcagtagcagccatataagaagaagggtagccagacatatcgttcctattccgatagagaagcgttgtatgactacgaggcgtcccagacttttgcgggtatttgccttgtagccggcaatcagttctgtaatctgctgttcatcagcaatcggttctttctgcaactgttcattcagtgcgttccatgatttcttcagttcatccagttccatatatctattcctccttattcattcttttcaatttgtctttgatgcggctgagcttggtggcaacgtttgtcaaagtcagcccggtgatttcggcaatttcttcgtagcttttctcttccagatagagcaggatgatggatttttccaattgtcccagccggtttatcatccggtagagttgccgtagcatggcttgtgtctcgtcggtttcttcagtccggtcggcttcttggttgagggtaacgatttcggggatgttcttttctttgcggataaagctgatgcacgtgttcagtgcgatgcggtaaatccatgttgaaatcttgcactcccgccggaacttgggaaatgctttccataagttgagtaccacttcctgatacaagtcgttgagggtagcgttgggcgtggtgtacagatagcacaccttatatatcacgcgctcatactctcgtaccacggatacaaactcttgttctgcattttccatctttttgcttctttcgagttgctttgcactgttagtcgcggaaaggggcgataaatcacagttcaaaaggattattttttatggcacataggtgacacagattaaacagatgaccacagatgagaaattcatgatgaacaaaattatcagtgaaaatctgtttaatctgtgtcgtctgtgtaactcctttttcaatgtaccgaattatcagcattatgatacgctttctaaatttcctgccagaaacttccgcatattccctattggcattcctcggcggcgggcgtaatcttccagctggtcctctccaatcttgcccactgcaaagtatcgggatgcgggatgtgccagcatcatgccgcagacggaggagtgaggatgcatggctccatgttcagtcagcgtgatgcctatctgtttcatgccgagcagttcgtccagcaggaaattcacggattggtcgggtagggaggggtatcccacagcggggcggatgccttggtacttctcgaccagcaaatccggaatggacaaggattcgtcgggggcatagccccaagcctccttgcggacatattcgtgcatcttttctgtggcggcttcggcgaggcggtcgttcaaggtttgtacaaggagatgtttgtaagggtcgttcttgtaagtctcttcggcctcttcactgatggtagaggcgaaaagccctacgatgtcgggcgtgcctgaagagaggggacgtacaaaatcactcagacagagaaatggaccgccatcgggttgtggtgtctgctgtcggagcagagggaaggttgttccttctatcaagaggttatctccgtctgcatttgcctggcaaagcctgaagatgcaatggatggagattgtttcgtccagtcggtcgagcattctattggcttccttgaagagctgcatggcttcggaagctttggtacgttcctcctcgggaaaggtcgtcagccaaagtgcacggcaggaatcgcagccatggatgttggcaatagccgcaaagcgaggctggaagccccaggcatggaagaaataaatccagttgatgtaaggggttacttcatgaatccgatacgaaagcaattcatgccccggtgccagtattgtccttttcatcccatttaatccttaatccctaatccttaattcctagccttcactccccaaatctcagttcctcgccacgataagcatcgtccaccatgccgtcgctataaacgggatgtccgttggcaaaagtcctttccactttccagttgaaggtatgtccttccaatgggctccagccgcatttgctcaaaactttgtcggctgtcacttcccacggggtatcggggcgtaccagcacaaggtctgcccggtaaccttcacggatatagccgcgctcgttgatgcggtaaatttgtgcgggagcatggcacattttttcaacgatggtctcgagtgtgaatattccctcatctaccagttgcagcatgctgacaagcgaaaactgtatcatcggcatgccggacatggccttcaaggcacctccttctttttcggagagcagatggggcgcatggtcggtggctataacgtctatcaggccggagttgacggctgcacgcagggcatcgcggtcggcttgcttcttaatggcaggattgcacttgatacgtgtgcccaacgtgcgatagtcactgagcgtgaagaggagatgggcaacgcatgcttcggcggtgatatgcttctcggaaagtgaatagtcattgaacagttgcagttccttggctgtggacacatgcagaatatgcagccgtgcaccggcaatccttgccagccgtactgccagttcagaggatgcatagcatgctgccgaagagcggatgtagggatgcttgcctatgggaatatcattctctccggcaaacatttccttatacttggcaatattgttcttgatggtttcctggtcttcgcagtgggcggcaatcagcatgtctgtaccgttgaagatgttcagcaggctgttcatcttgtctaccagcatgtttccggtactggaacccatgaatagcttgatgccgcagacgcggtgcttgtccagcttgccgaattcgctgtaattgtcgtttgtagcaccgaaatagcaggaatggtttacgatacacttctcgttcagtaaatcaagtttggcgttcaaggcatccagcgtagtggtcaccggatttgtattgggcatatccatgatggaggttacaccacctgcggcagccgcacggctttcggtgaggatgtccgctttgtgggtcagcccgggatcgcgaaaatgtacatggtcgtcgatgatgccaggcaacagatagcatccggtggcatctatggtctcgtcacaaggggcggagagaggtttccagttggtcagtacctctgcaatgcgcccgtcttctatcactacggaacctttcacggattgtccttcgttgacaatcgtagcgttatgtatcaatgttcttttcatatcttcctaatatttatagtaaacccctatcactctatcacctatcacttcatctccttatctacggtaggatatttatggaaccaactgttccatttcaaccgaatcactccgaatacggcttcaccaaaaatactgctgttcattttggaggtgcccagttcgcgattgatgaagatgacaggcacttcctttaccttgaagccgcatttgtaggcggtgaatttcatttctatctggaaggcgtatcctttgaagcggatgccgtccagattgatagtctccaatacccggcggcggtaacatacaaatccggctgtagtatcgtggatgggcagcccggtgatgaagcgtacatacttggaggcaaaataagacatcagtacacgtcccatgggccagttcactacgttcacaccactcacataacgtgaaccgatggctacatcggcaccctcttcggagcaggcgcggtagagtcgcggcaagtcttggggattgtggctgaagtcggcatccatttcgaatacatactcataacctcgttgcaatgcccacttaaagccggctatgtaggctgtacccagtcctaactttcctttgcgctccaccatgaagaggcgttcgggaaactcctgctgcaaggtctttacaatggcagctgttccgtcgggcgaaccgtcttcaatgacaaggatgtgaaaaccatgtttcagagcaaaaacggcacggatgatattttctatattctcccgttcattgtaggtggggatgatgacaatgctgtctgatgtttgcatacttataggtaatgggggttataactgggaacaaatgtaatacatttcttttttatctggcagcattttcacacaaatcttgattttgcaaagttctggcgccacgactctttcatttatgtagctccttctaactcctgactataaggaatgcaggttaaatcaaagaaccatatgcttgactttgaactttagcctcaatctttagctattcccgtttcaatcattaacagaaaacattcaaactattaaagaaaaactttcgaagtataaaggataaagtgggtagatatagggagaaaaagtgctcttcagtcttggtctgtctatcccaagccttgggatagacagaccaacccctgggatacatgtccgcaggctggggataaactttgtgtaacataactcctgaatagggattgtgcaggctgtgttattcataattggaggaaaagaagtttcattgccttccccgataaatagggcgatacagaaaaaaggtgaaggatgtgcaggctgacagcagaaagattatttcagagaacatagttgccgacaggtcaaagctaaagattatttgtgtatttttgcaccgaatttatttcggtaggataccttatgagaggcaataccgggggaaaaagcgcaaagcaatgaatataactgaactgcaacaatcttatgcttcccatcccaatgtagagggggtgtgcaggcttctgaaagataactctgtccgtcacctatattgcggaggtttatatgcctctgccgcttctttgttttcgtctgtattggttcagcgggctacttgtccgctcgttttcattctgggcgatatggaggaagccggttatttctatcatgatttgacgcagatattggggacagagcaggtattgttttttccttcttcgttccgccgcgccatcaagtacgggcagaaggatgcggcaaacgaaatactccgtacagaagtgctgagtcgcctgcaaaaaggagaagaggggctttgcgtggtgacctatccggatgcgctggccgaaaaggtggtctctcgtaaggaactgggagagaatacactgaaactgcatgcaggcgagagggtggatatgaacttcgtgacggacgtattgcgcagctacggtttcgaatatgtggactacgtctacgagccggggcagtatgccgttcgtggcagtattatcgacgtcttttccttctcttccgaatatcccttccgtatagactttttcggcgatgaggtggaaagcgtccgtaccttcgaggtggaaacacagctctcgaaggagaagaaagaaagcatcgtgatagttcccgacttgagccatagcctggaaaaaaagggaagcggcggcatggtgtcgttcctcgatttccttccgtcggacagcttgcttgccatgcgcgattttctctggctacgcgaacgcatccagaccgtgcacgacgaatcgctcaccccacaggccatcgccgcccgtgagtcggaggagaatggagccatcacgctggaaggcaagctgattgatggtggcgagttcaccctgcgcgccctcgatttccgccggatggagttcggtaacaagcccaccggaacgccggatgctaccgtctcgttccatactacggtacagcctatcttccataaaaacttcgacatggtggcagagagtttccgcgaatacctctcccgtcactacaccatctacatatgcagcgacagcctgaaacagactgaccgcatccgtgccatctttgaggaccgtggagacaacatatcctttaccgccgtggaacggacgctgcacgaaggctttgccgacgacactttgcgtatctgcgtctttaccgaccatcagctgttcgaccgctttcacaagtataacttgaagagcgacaaggcacgcagcggcaaggtggccttgagcctgaaggagctgaaccaattcacccccggcgactatgtggtgcataccgaccacggtgtggggcgttttgccggactggtacgtatccccaacggtgacaccacgcaggaggtgatgaagattgtctatcagaacgaagatgtggtgtttgtctccatccactctctgcacaaggtttccaagtacaagggaaaggagggtgaagcgccccgcctcaacaagctcggcaccggagcctgggagaagctgaaagaccgcaccaagacgaagataaaggatattgcccgcgacttgataaaactctactcgcaacgccgcgaggagaaggggttccaatacagtcccgacagcttcctgcaacgggagttggaagcctccttcatctatgaggatacccccgaccaaagcaaggctacttccgacgtgaaggccgacatggagagtacccgtccgatggaccgcctggtgtgcggtgacgtgggcttcggcaagacggaggtggctgttcgtgccgctttcaaggctgtggcggacaataagcaggtggctgtactggtgcccactaccgtacttgcctatcagcatttccagaccttcaaggagcgcttgaaaggcttgccttgccgggtggagtatctgagtcgtgcccgcaccgctgctcaggcaaaggctgtagtgaaagggcttgccgaaggggaagtgaatattcttatcggtacccaccgtatcctgggaaaagacgttaagttcaaagaccttggtttgttgattattgatgaggagcagaagttcggcgtctccgtcaaggagaaactccgccaattgaaggtgaatgtggatacgctgaccatgacggctacacccattccccgtaccttgcagttttcgctgatgggtgcgcgcgacttgagcgtcatccagacaccgccgcctaaccgctatcccatccagacggaagtgcacaccttcaacgaggaaatcattgccgacgccgtcaattttgagatgagccgtaacgggcaggtattcttcgtgaataaccgtatttccaatctgtttgagttgaaggccatgatagagcggcacattcccgactgccgtgtctgtatcggacacggacagatggagcctgccgaactggagaagataatctttgatttcgtcaattacgattacgacgtgctgcttgccactaccatcatcgaaagtggcatcgacatacccaatgccaataccattatcatcaaccaggcgcagaacttcggcctcagtgacttgcaccagatgcgcggacgtgtggggcggagcaataaaaaagctttctgttacctgctggcaccgcctttgtcctcccttactcccgaagcaaaacgacgcctgcaagccatcgagaacttctccgacctgggcagtggcatccacattgccatgcaggaccttgacatccgtggcgcaggcaatatgctcggtgccgaacagagtggtttcattgccgacctaggctacgagacgtatcaaaagattctttccgaagctgtgcacgaactgaagaccgacgagtttgccgacctttatgccgaagaactgaaagcagacggaggcgtcatcagtggagaacagtttgtcgacgaatgccaggtggaaagcgaccttgaacttctgttgcctgccgattacgtgactggcagcagcgagcgtatgttgctctatcgcgagttggacggattgacactcgacaaggatgtggatgctttccgttcccgcctcgaagaccgcttcggcccgattcctcccgaaacggaagaactgctgcgcatcgttcccttgcgacgcctggctgcccgcctcggcgtggagaaagtctttctgaaaggtgggcgcatgtccctgttcttcgtctccaatccggacagcccgtactatcagagccaggctttcggtaaggtcattgcctacatgatgaagtacacccggcgttgtgacctgcgcgaacagaacaacaaacggagtatgttggtgaaggatgtcaagacggtagaagaagctgtctgtgtgttgcaggaggtagtggcaatgcaggtggaagagtaaactgttgccactcctgccactaacgtccgaactgcaaggcgaatcccaaattgaagaaagtgatgttgtttttgaaccagctatggtctactccgtcatcatacccgtctgtgttataaagtcgtgcatcggggttggcaaaccagtctgctgtcaggaaatcacagcgaatcatgcccgagagtttacggctgatgcggaactcatagcctgctgcgaaagttattccacaatatcctttatggaaaaggtgtccgttccgttcaccgcgtttatatgtccgttcctgatagttcatatacccgatgccgaacgagaggaacagtccttgattcccgttgctccacaagggccggtatgtgatgttggggcgtatgcagtgcagatgtgccttatccggcaggcgtgccatgcgtagatagtcatattgaagtcctgcggcaaataggggcgtgatgtagtagcggccttctgtcatcaggtcatatcccacccggttgccattcttgctgaagaagtcgttacggtttccctctacatgaggtaaggatacaccgccaccgaagatgatactgtaattttgcggcaggcattcgctttgtgccagcagacctgtcgctccaatggggagtagggataggcagaggaggaggaatcgtttcatgcagttgctgtgagtttcttggaaatatcgtatttttatcgtttcccgtatagcttgtctatcaaatccgtccgtcctatccggcgcagttcgtttatgatgttcctgcgctcttcgggtttgtaccagaagaagaattggcgttgagccagtttctcgcgctgcgttttggcactgaataccggttccagcgtataaggatggaagcccgtgtaccatgcttcggtggcaacggtcatgggagtaggggtaaagtcttgcacttgctccagatggaagtccagtcgtttggtgatgacggcaagttccgccatatcttcctccttgcatccgggatggctgctgatgaaataaggaataagctgctggcgtagtccttcttcatggttaatcctgtcgaatatcttcttaaactcaccgaactggctgaacggaggcttgcgcatgatgttgagcacgcggtctgacgtatgctccggtgctaccttcaggcgaccgctgacatggcgggcaatgagctcgcgggtatattcctgcgtacttttgttagtgttcgggtccttgctctggtgcagcagcaggtcatagcgtacaccgctgccaatgaaggacttcttgatgccgggcagggcatctacggcatgatagatgtcgagcagcggacggtggtccgtattcaggttggggcataccttggggtagatgcacgacgggcgtttgcatttcctgcagacggcctcatcccgtcccttcatgcggtacatattggccgacgggcctcccaaatcgctcaaataacccttgaagtctggcagctccgtgatggctttcacctctttcagaatgctctccttgctgcggcttacgatgaatttgccctggtgtgcggagatggtgcagaaggcacatcctccgaaacatccgcgatgcaggttgacggagaactttatcatgtcgtatgccggaatacgttttcccttgtatttgggatggggcaggcgcgtgtatggcaagtcgaaagaacggtcgagttcagcttccgtcaaagggggatagggaggattgactactaccgtcagcttgccgctcttttgcaagatgcgggatgctgtatatttgttgctttcctcctcgatatgacggaagttggcagcttctttctttttatctttcagacattcttcatgggaaaagagggtgatatccccttcttgtaccactacttccttgtcaaggtaaaccatttggggaatatcggcgatgagctttttgaagcttggggcgtccatctgtgtctgttggcgtttcagcctttccgcaagttccaccaccggtttctctcccatgccgtagatgagtgagtcggctccgctgtcgaggaggatgctggggcgtacacggtcctgccaatagtcatagtgcgtcaggcggcgcatgcttgcctcgatgccgcccagtacgacggggacatcggggaatagcttctttaatatctgggtatatacaatggaagggtactccggacgcatatccggacgtgcatccggggtataggcgtcatcactgcgcaagcgtttgttggcagtatatttgttgaccatcgaatccatacagccgggactgatgccgaagaacagacggggacgtcccagttttttgaagtcgcgcaagtcgtcgcgccagttgggttgggggatgatggctacgcgcaatccttctgcttcgaggatgcggcctatgacggcggctccaaaagaagggtgatccacgtaggcgtcaccgctgaaaagtattacatccaattcgtcccaaccacgcagttccacttctttcttggtagtaggaagccagtctgtaaggcgatattctttcatttgcacattaaaaactgtaatgtcatccgttctccgtcgtaaatctcacggaagcctatctgctgctcggaaagatactctttcatgtcattgaaggcagcagcgtcgtccatgatgatttccagcttctcgccttttccggcctcgcacatggctttgatggcagggattaaagggctgtaatgctgttgtccgcaggtgtcgatggttttcatttattcttcttctatggtgtcttgttgggaaagccattgcagatagagcttgatgagctgttgtagtccgaaggccttcatgttgttgtgatagataacgtcgatacagaggtcgagcaggtctttgctgtcttcctcttgcgaggcgatgagggagcggatgttcagtttcaacttgtcgagcacggtttcgtccacaataccgttgctgtcgatgagatggcggaagaggccgtatttctcgatggtggcaagattctcttcagaaacttctaaactacgggttccgctggggttggcttgtatagtgtacatgatgtttaatgtttagtggttaatgtttaatgattaatggaagcaaagatagttttttcactacagattacacagattttcacagattatttatagggattgctattttgtctgtgttaatctgtgtaatctgtggtgagaaagcggagtatggatgccataattacatttctggatgtttcttcccggatgctttcaaaagggaatcccatgacaaaagtgcgataatcactgccttgataggctacggcggcgggtgtgttgccgatggcataggtcatgactggaaaagcgggagacatgggcaggatgcaatcaggggaagtgaccggatagctttgctcattcggcaggcggggaagggtgaaggtatgccccagtccccggacagcgattttgtccccgtctgttttcagagagttgccatgccggtacttcaagatattctgaataaattctttattgccctgcgagctgtccatatcgctgcctacgtaggcaccgctgaccaggagatgacctcccgactggcaataggaagtcagtatgcgctgcatgggcgaggagaatgttttgtagtaggtattgcgtgccggattgctggaattgtcttctttctcaagtccgaggatatagtccactatcggataatcctctaatgagaggatgcccttttccacagcctcgtcgctgcatgagacgaagctgtaatttccggctgcctggatggctttgccatgtacgaaggggtaatcgaaagtgtttccgatgattttcatgccttcgtattcgtcactgctctctcccagacgtcgtcctgcttccttccggctaaaattctgctgggcgccgcagagggagatgtcatagagatagggtacgccgggatcttgtgacaagtcgaagcctgccgcatcgggggtgtctataacggcaggcccgctgatgcggtcgaatccgttgacgataagtatctgtcctttttcacgctttgccttgtaggcggcaagaatttccgaagggaagctttcgccaccccggtttacggcggttactttaaaggaatagacgatgcccggttctatttttacggtgtgggatggggagctgacgcgtacgccattgtcaaatcctccacgaccgatacgtgtatatacaatgtattcacgtggtttggcagtcggctccaacgggtcttcctctccttgccaggaaagctctaaagtattcttcttttgaccgaagcggatggcaaagtggctgacgggaaggggttggacaacgtagtctctgccgtgctggctgcatatgtattgcagaatagctttatagagcgcacgcccgacggtgaacttgaagttagggtcatgtcccaagcgcatatctgcgaagttctggtgcgacaacagttctacgatggtggaagggacggcgggcaggcgtgtttcactgtagttgcggttccataggctgcggcgtgtccagtctacgttgaaggtagagcggatatcacgctgcaactgcgttagcagaatgtccgaaaggtcacgggaggcatggcggtctgtaccggcatgcagccggccgttgttgaagttggtggtataaatgccgagagtgcctataatctcatcttccttactgaaaccggcatcgctatgcagggccatactcatttcaaaggggatgcccaaaccttcttccgtcgggttgaatagtgattttcctgcaaggtaattcactgtacgggaacgtacgttgatgtcgtcgttcatatcattctttccctcatagcctccatagacgggatagggcatgcctgcccattgggcaaagtagcgtgcgccttccaggtatctgggcaagccgctggtttgtcccccgcgggcaatgttgcccatgccccctccaaagcggacggcatcggcacagaccacgcctttctctttgctttcgttgctcaataccaccatgccgtagtcgttccggcctttgtcaaaagtgaatgtgccgaggtacacccatgtgccgcctcctatttgctggttcaccttgaactccgtgacgcctccattgtgaaatacaagatatttggcatcgcttacgctgcccggcagtgtttggtaagatacgtatacagcatattctcccgtttccggaatatcgggtacccattcggcaaaagccttgtctttcttcttttcagttttggtaaagcgtgccgtgccggagaggaaagggttttcattgtcctgatagattcgtttccgttgggcaaatccgggtcgggaggtctgttcccaacgtgctttccggcttttcacgtccagataaagggaaccttgtcctccatgtccgctcaggctaccgtcattgtctacgatgacttcctgcttctgcgtgtccctttcgcggggagtgaatacattggctcctgcattctctagcatgggcaggaggtagggcaggatgaaggattgggtgaactggtcttctgtagtgcagaacagcctcgggcgttgccatccccatttgtccttgtcattgatataatatttcccgtggctttgccaaagggcgatgtggcgtccttccagtccgcgggtgatgtcgtaggggcgcgaggtacgggttacccagggggtacctttgtattccaggtggctgaacagacgtgccttgtctttcttccctttccggtagaggttggggataagctcttcgatgctcttcccgtcagcaaagacggtgaggtcgaaatagttcaccggtcctggcaggatttgtcccagatggcggtaaatggcatcaacggtttcaggccgtagaggctggtaggcaaagcgctcgtttgtatagacaagcaatttcttcttccggaagtcaatgcggaaactatccagcttgcaggtaccgatgttggccgtatgggtggtgtattccctaaagaatgtctggaggcgttcttccacattctgctctagttcttgtgccggaaggaggaatccacacaagagccatatgccggttaggataagttttttcatactgatgaaatattgaagttgccaatatctgcttttaccagacggtggtgcgtgcaaaagtacataaaagaaagcttcactgatgagcgggttactttctttttattattttgcagacatataagtaagtcttaagaattaaaaagcattaatcggcaatctttttcagttctgtcagttccgtaactttgtccggatagaggatggcgttgtgcgcagccatttgagctgctttcttatggattgggtccattccttcgggagaatatgggttttctgttacattctgatgggtcaatgcctcaaaccatgtgcaggcagctgtatatctgcctatggttaagtcaaggtggtatccgtccctattcatatggtcgccgataaaggaggtacgtgcattttgtatggcggttcccgaagggataattttcttgatacccaccaggttggcggctttctttactgcatccacaatgctggtgtacattttcatttggttctggtcatagtttttgaatccggtgtggttggcattggtagcataagcccatgtctggtgcaccattaatacggtttcctttccaattcgttccctgatatagttaaccaattcaggtagggaagctttgtagctgtcatagataccagacaaagggctggcctgctgaacactgatatagtcccatttctcatcggccagtgctttctcaatagtcattgaccgggtttctgttttttccccgtctttctctactttgcgataggcataggccggagcgttgttgcgtatgttttgcacgtgccgttccagtgaacatcctccgataaacatattgccgataatcatggtgataccttcagcttctcccagttcgtgcaaatattgctctactgcatcttgtgaaaagctgttgcctattgccaatactttgatggtgtcgttattggcatggcatccatttgcaaacaatgtaaatggcgtgagtaggaataaaatgacaaggatgttgatagcatactttttcataatggtgtttgtttttaagttttgtcgtttcgataaataagtaacaaaattatttgattgtttttatatctgcaaatattccttgggaatataagaaggctgagacatgaaaaaatgagatgcattgccggagcaatacatctcatcctattgttaatattttatccgtttatagcggaatgtattccacaaaggcttccatcgcctcataggaagcaagtccgaggctgtcatacaaggcagctgttccgcggttacggtcctcgctgcgttgccagaacagacgttcgtcattgcccaggaacggtgcgctttccatctgcgattgatgcttcaggatagagttacgcttggcacgcagttcttccgggctgatgggcacagccatctcgatgttttcgatttcccattcggcccatgcaccgcggtacatccagatgcggcattccttcaaccatttggcaccttcttctttttccaagtcaatggcggcaaatacggcgtccgtacaaacacggtgtgtgccgtgcgggtcggccaggtcgccggcaacgaaaatctgatggggtttcacttcacgcaataggttgcgtacaatttccacgtctgcttcgctgataggattcttctgtatcttgcccgtttcgtagaatggcaggtcaaggaaatgacagtgatccagagggatattattgtatgtacatgcagtgcgtgcctcgccacggcgaatcagtcccttgatggtcaagatgtcgcgtgtatccatgtcaccgtctttcttctccttcaagtatttacggatttcagtatatttgtcattgatgacctggtcttcgctgttgttgaagatttggttgaacccgttgatgaagtgcaggaagcggataacttcttcatcgcctacggcaatgttaccggaagtttcgtaagccacatgcacgtcatgtttctgctctaccagacgacggatggtgcctcccatggagataacgtcatcatcgggatgcggagaaaatacgaccacacgttttggatagggctttgcacgctcaggacgataggtgtcgtcagcattcggcttgccgcccggccatccggtgatggtatgttgcaggtcattgaatatcttgatgttcacgttataggctgagccgaacaatgccagcagttcgctcagaccgttttcgttgtagtccttgttggtcagtttcagaatgggttttccggtgagttggcacaaccagacgatggcactgcggatgagcttgtcgttccattcgcaggaggttaccagccaggggcgttggatacgcgtcaaattggcggcggcagacaagtcgatagctacatgtgcattgttgtgagtctgcagataagatgcagggatagtatctgttaccggaccttcaacgcattctttcaccttttgcgctttctcctcaccccatgccagcagatatattttctttgccgagaggatggtggctactcccatggtgatggagctgatgggggtattttcaatgctaccgaacatcttggaagcttcattgcgggagtcgttgtccagcaatatcagacgagtggtagagttcaggcgtgaacccggttcattgaaacctatattacctacacggccaatgcccagcaaagcaatgtctaagccaccgaaactttcaatgcgctgctcgtaaagacggcaatattcaaagatggcgtctttggcgatggtgctgtcgggggtgaaaacattctgtttgtcaatgtccacatggtctatcagcatttccttcaatgcgttgaagttgctgttgatggcattgggagctaatggataatattcgtagaggttgaatatgactacgttgcggaaacttaatccctcttcctggtgcatacgtaccaagtctgcatatacattgcgcggagagttaccgcctgccagtgccaagacacagaaacgtcccgccttttgcttgtcacggattaactgtgcaatgtcaagggcaatctggttggcgccttcttccgcagactcataaatatctgtcgggattttttccagtcgggtcaataccgaccgttcaaatgcattctcaggtctatagtacctgggggagactctgttgagagtgatttgagagcttagattggttttcataaaatttattattaataaatgattaagtattgaactgttctttcaatcaacaaatatacgaaaaacaatgttcatccgcatattgctgaagattaattaagaaatactggtcgtcccatatctcatatgggttttgacggttgtacggaaagtgtcttcggtcattccataaagtcacggccaaccgccaccgtgagtatggattttacgttgggtcaacataggatttaggggttagaattattaaattaatcatgttgtcgctttgacattgtttcgaaggacaaaaataggtactttttggagaagatgtactccttcttttgggtattttcattaaatactctaaaaaagaggatttggtgcattttgtataatgtctcgttcgtttggggtataagtgaggataatcatataaaaatagaccattcatcgcactttttgtcgtttgggtttgttatatttgtgtgtgtttataaactctaaaatatcaatgtatgaaaagctggaaagtagaagcagccatcatagccgtggggctgcttttgttgggaatcatggtaaaaggcggtatcaacaattttgtgaataaggaccgtgtggtcagtgtgaaagggctggccgaaatggaagtgcctgctgacaaggtagtctggcctcttgtctacaaagacataggtaatgaccctgcactgctttatgccaatatggagaagaaaaacgctgccatcgtgagtttccttgaaaacaatggtattgagaaggaggaaatcagtattgcaccgcccgaagtgattgacatgcaggccgaacgttacgttgaccgcaacgtggcctatcgttataatgccacgtctgtcatcactgtcacttccaagaatgtggatagggtgcgtaagctcatgtcggggcaggctgaactcttgaagcagggtattgccatcacgggaggggattataaatataatgtgtcttatgaattcaccggtctcaacgaagtgaagcccagaatgatagaggaggccacgaagaacgctcgtgctgcagccgagaagtttgccaaggattcggacagtgaactggggaaaatccgcaatgcctcgcaagggcagttctccataagtgaccgcgatgcctatactccttatataaaaagcgtacgtgtagtgactactgtgaactattatttgaagaaataacgaactcgtccgcatctttccaagcgggaaactttagcctgaactcctgcagggaggaaaggttgagggaggcggtggcaatcgcctcttcgttgtcgggcacagtggcaagcacttcccccttcggagagtagaccacactgcctccgctgtgtggaatgtctctgccgtccttgccgatacggttgacaccgcagacataactgatgttttccagcgcgcgcgcttgcagcaggatgtcccagactttccggcggggaatgggccagttggcgacgtaaatcaggaggtcgtattcattgctcgtattgcggctccagaccgggaaacgaaggtcatagcatacaagcagcagtatattccagccgcgatatcggatgatgggacgccggttgccgggggtgaaatgttctgtctcgtgccccatccggaagaggtggcgtttgtcgtaatagtaagcattgccttcgggcgtaaggaagaatgcgcggttgtagtaggatggctttccgccttccgaggctgtttcgcaggcaatatagctgccggcaagagcaagccggtactcttcggaccattggcgcagtgttgctatggtttctcccgttgtgggttcggccaagctggcggtgtccatactaaagccggtggagaatgtttccggtaaaacaacaatctccgttgttccacgaagagtttctaacttctcgcggagacgacggagattttcttgtttattttcccagacgatgtctgtttgcaagatgcttattcgcatggcattaatgcttaatacctgattagatatttcctaaatcaaaattttcgggattttttcctttaaagttcttgaagtacagttttatctcgcgcatatccttttcgatgtctccggtaggcatgacagccttggtagaggagatggtcttggaaggataatcaatcccgataagcatgatgggcacttgtgctttaagtgctatgtaataaaaacctttcttccagttgggattggctttacgggttccttccggtgtaatagccaggtggaaatgcttgctgtttgcaaacttttcggtcatttggtccactaaggaagatttacgtccccggttcaccggaatgccgccaacggctttgaatatcagtcccagaggaaaaaagaaccattcctttttcatcatgaaactggtcttgcggccgatggcaccataaaacaatttaccgataaataagtcccaattggaagtatggggtgccgcacaaattacacatttgtcgtagtcgggcaccgtcacgtttgtcttccagcccagcaggcgataataaatgaagctataaaaggctttcttcatcttatttcagtttgcccattgcgtcaataatttcgtctacttttgcattgaagtcagcacgaagttttttgtagaaaccttttacatttcctggctcggtgtggctgatgcggcttatgaattcatcttgcattttcagaatttcagccatcagttcatcggctttttgtttgtctgttccaggcacatataagctgtttacaagacactctgtgaacaattcacctgcaatatagtttatattcttctttagttcttttctacttgccataatctttacgtttaaaatgaataatctgaattattttcggtaaagataatgtttttctttgttagtgtagagcaaaaaagggtttttatgtgtttttaatttagtagttttgtggaattattccacaaactgtggacacattccacagggaaaaatggaggatgccaccatgaataaagaactgccgtctgcttttctgcttgatatatagtttgttagacgtaatggatgagatggtgatagattggcatcggatttgctttaatagaaagaaacagggttaaatttaatatacaaacaagcatgagacagttttttacgaaaaaagaattgaaactaaagaagaagaggttgctgatgatggttgcctgcatggcggtattggtattgttggcaggttacgttattctgacttggcctaagaaggtggaatcggaagctcctaccgtgattgtggaatctgcggaaaaaggagatgtggagatatatggcgagtacgtgggacgtattcgcgctcagcagtttgtagaggtacgtgcgcgtgtggaagggtatttggagaatatgcttttcgcagaaggaacatatgtcaccaagaaccaggtactttttgtgataaaccaggaccagtatagggcaaaggctgacaaagctcgtgcacagttaaagaaggatgaagcgcaggcattgaaggcaaagcgcgatttggagcgtatccgccccctctatgcgcagaacgctgccagccagctggatttggacaatgctcaggctgcttacgagactgcagaagcctcagtagcgatgagccaggccgatttggaccaggctgaattggaattgggatatacgttggttcgttctccgctatcgggacatatcagtgaaagaaatgtggatttgggaacattggtcggaccgggaggcaagtccttgctggctacggttgtgaaaagtgatacggttctggtagatttcagcatgacggcattggattacctgaaaagcaaggaacggaatatcgatatagggcgtcaggactctacacgttcctggcagccgaacattacgattactttggcggataataccgtctatccttataagggctatgtggattttgccgaacctcaggtggaccctcagaccggaacattctccgtgcgtgccgaaatgccgaaccctaacaaagtgttgttaccggggcagtttacaaaggttaagctattgctggatgtacgtgagggtgctgtcgccgttcctcaaaaggcggttaccattgagaaaggtggtgcatatatttttgtgatgcgccgggactctacggttgaaaagcgtttcattgaactgggacctgaatttggcaacaattgggtggttgagcgtggtctggttgccggagaacaaattgtgactgaaggtttccacaagctgactccgggtatgaaagtacgtgcccaggctgccgttcctaaaaaggaggaagagcagacgagtgattctctgaacaagcaggttgtttccgaaacgaagcagactactccggctgagaataaatcaaaggacaacaacccttcaaagtaatgatgttatgaaagtaagtttctttatagaccgcccggtattctcggcggtgatatcgattgtgattgtaattgtcggtatcattggcctgaccatgctgccggtagaccaatatccgcagataacgcctcccgtagtgaaaatcagtgcttcctatccgggagccagtgcattgactgtttcgcaggcggtggcaacccctatcgagcaagagataaacggtactcccggtatgctgtacatggagtccaacagttctaattccggaggattttcagctacggtcactttcgacgtgtctgccgacccggatttggctgccgtagaaatacagaaccgtgtgaaactggcggagagccgtttgccagccgaagtgattcagaacggtatttctgtggaaaagcaggctcccagccaattgatgactatctgtctgacttccagtgatccgaagttcgacgaaatttatttgagtaactttgctactatcaatgtactcgacttgttgcgccgtatccccggtgtgggacgtgtttccaacatcggtagccgctactatgccatgcagatatgggcgttgcccgacaaacttgccaacttcggactgacggtgcaggatttgcagaatgccctgaaggaccagaaccgtgagtctgctgcgggtgttttgggacaacagccggtgaagggactcgacattactatccctatcactacccagggacgcttaagttcggcaaagcagtttgaggacattgtggtccgtgccaatgccaacggttccattatccgtctgcgcgatgtggcgcgtgtttcattggaagcatcttcatatagcacggagagtggcatcaacggtgagaatgctgccgttctcggtatctatatgcttcccggggccaatgcaatggaagttgcaaagagcgtaaaggctgctatggaggaaatcagtgcaaatttccctgaggggatgagttatgagattcccttcgacatgacgacttatatttccgaatccattcacgaagtgtacaagacgttgttcgaagcgctgattctggtggtgctggttgtatttctatccttgcaaagttggcgtgcgacggtgataccgattgttgcggtacctatttccctgattggtaccttcggtttcatgcttattttcggtttctctctgaacatactgactttgcttggattgattctcgccatcggtattgtggtggatgatgccattgtggtggtggagaatgtagaacatcttatggagacggagaaattgagcccgtatgaagctaccaaaaaggcgatgaacggattggcaagtgccttgattgccacatcgttggtgctctgtgccgtgtttgtgccggtaagtttcttgagcggaatcaccggacagttataccgtcagtttaccattactatcgccgtttccgtattgctttctacggtagtggccctgacgcttagtcccgtcatgtgttcgctcatattgaagcccgacagtggaaagaaaaagaacatagttttccgcaaaatcaatgaatggctgaacttgggcaatcacaaatacgtggctgtcattaaccgggtcatcaggaatccccgccgcttgatgagtgcgttcggcctggtactggttgccattttcattatccaccggttggtgcctaccagcttcctgccggtagaagaccagggctattttaagatagagttggagttgccggaaggtgctactttggagcgaacccgtgtggtgaccgaccgtgccgtgcaatacttggagaagaatccctatgtggcctatgtgcagaacgtgacgggtagcagcccccgtgtgggtagcaaccaggcacgcagtgagctgacggttattctgaaaccgtgggaagagcgtaaggggatttccatcgataagataatggagaatgtggagaaggatttgaaggaatatcccgaatgcaaggtctatctttccacgcctccggtcattccgggattgggtacctcgggaggtttcgaaatgcagcttgaggcgcgtggagaggcgacgtttgacaacttggtgcaggcggcagatacgctgatgtattatgcccagaagcataaggagctgacggggctttcatcatccttgcagtctgaaataccgcaactttattttgatgtggaccgtgataaggtgaaaatgctgggtgtgcccctggcggatgtattctctaccatgaaggcctataccggttcagtatatgtgaatgacttcaatatgttcaaccgtatatataaggtgtatatccaggccgaggctccttatcgtgagcataaggacaatatcaacttgttctttgtaaaggcaaaggacggagtgatggtgccgcttacttccttgggaaatgcctcttataccaccggtccgggcagtatcaagcgtttcaatatgtttaccactgccgtcatccgcggttctgcggcacaaggctacagttccggccaggcaatggagattatggagcagattgcacgtaaccacttgccggacaatatcggtctggagtggagtggcctttcctatcaggaaaagaaggcgggaggacagacgggtcttgtgcttacgctggtattccttttcgtattcctctttttggctgcgcaatatgaaagttggacggtgcctatcgctgtattgctttcactgccggttgccgctttgggtgcctatctgggcgttgtgatatgcggattggagaatgatatttatttccagatcggcttggtgatgctggtggggcttgcggcaaagaatgccattttgattgtggagtttgccaaggtgcaggttgacaagggaggagacttgatacagtctgccatccatgctgcccaactccgtttccggcctatcctgatgacttccctcgcctttgtattgggaatgcttcctatggtgttggcaagcggaccgggctcggcgagccgtcaggccatcggtacgggtgttttcttcggaatgatatttgccattgtattcggtattgtgcttgtaccgttcttctttgtcctggtatacaagacaaaagccaaagtgcagcataagattaagaaagactgattttaaagacaacgtttatgaaaagaaagaacatatatattattttgttgctgagtatgtttgcccttacctcatgcaaggtgggcaagagctatgtgcgtccggagatggcattgccggatagcctggcacagcagcaggatagcatgagcatagccgatgaacagtggcaggcggtttatacggacagcacgctgcgtgctttgatagaccgtgctctggaatataacaaagacatgctgattgcagcttcccgtgtcaaggagatggctgcccaaaaacgtatcagtgttgccaaccttctgccgcagctcaccggaaaggtggaggctgagcgcgaggtggagaattacggtggtcatagccgtgatgtaggcaatacttacgaagccaaggcgttgctctcttgggaactggacctttggggaaacttgagatggaagaaagtggctgctgtggccgaatatttgcaaagtgtggaggcgcagcgtgcgttgcgcatgaccatcgttgccgaagtggcgcaggcttattatgagctggtagcccttgatacggaactggagattgtgcgccagacacaaaaggcgcgtgaagagggagtgcgcttggcgcgtatccgttttgaaggagggctgacctcggagacctcttatcaacaggctcaagtggagttggctcgtacggctactcttgttccggatttggaacgccgtatctctctgaaagaaaatgatatatccttccttgtgggggaattccctacccgtatcaagcgtgtcaattttctgcaggaactggatgtgccggagtccttaccggtaggtctgccttccgatttgttggaacgtcgccccgatgtccgtgtggcggagcagcagttgagggctgaacatgccagagtgaaagttgcttataccaatatgttcccccgtttggccctgaccggacaatttggattggaaagtgatgtgttatccaatttcctggaatctccctattccttattgaatggggtagtcttggcaccacttttcggttggggaaagaaccgtgctgcattgaatgcacagaaggcttcttttgaagccgaagtgcatagctatgaaaagacagtgctgaatgcttttaaggaagcgcagaatgccattgtggatttcaataagataaaggaggtctaccaactgcgtgccaaacttgaacgttctgccaagggatatgtggatttggcacagttgcaatacatcaacggcgtcatcaattatatggatgtgctcgatgcccagcgtggttatttcgatgcccaaataggggtgagcaatgccatccgcgacgaacttattgccatggtaaatgtctataaggcattggggggtggctggcaaaccgaatgacgtgtgattaaagaaaacagcaagggcgtgtatgtaccgaaatatttgatggtatatacacgcccttgttctataattggcttatttcatctaggattctgtatttagagtctccttgttttctttcttttcctttgccttttctacttcaagagctacgtttacggcattcatgcctttaaggccacgttcgaggtcgaacgtcacaatattgttttctgctatatctgtcagcacattgttaatgtggaaaaagtatttttcgaccccggataagtccttgatgaagccgaagcctttcgattcattgaaaaactcgatacgtcctctgcggatgaccggttcttccttgtcttttttgggagttgatatgacgatttcttccagctttatttcttctttgggagtgttttctgccggaggagtagaggttatcatgccgtttttgtcaacataggcaatcatatcttcaaagctattggctttgttggatagttttttttcttctttctttttttgtttttcagctcgtcgggcgagtcttttcttttcattttcacgcttgtctgcggagatggatttggccatgtatttttatttattgagttataaaaaaagcagggggcattgctacaacacctcctgcttttgtcagtagttaagaatattaatatcttctagagttgtaaccgcctcttctgtcgcgattgccgccattggaaggtctttcttcgcgggggcgtgccacgtttaccgagatttgtttgtggtcaaattcagcaccgttcaattcgtcaatggctttttggcctgctgcatcgtccggcatttctacgaaaccgaaacctctggatcttcttgtttctctgtctgtaatgattcttgcagaagaaacttctccgtactctgaaaataaatcgtttaagtcagcgtctgttgtgctgaaatttaaacctgaaatgtaaatgttcatttgaaattttaattaattgtaattattaaattggagtatggagaataattatggaagagaccgcctaataatagttgtatattaaaagaagaacaatgcgataacgactcgtaactcaaactttgcggcaaagataacacaataaatcagttaattgctttcttctcctttttattttaggataaaaaacgataaatgtcattttatacattatttcggcctctcgtttgcatatcttacgaaaaaaagcgaaatttgcgacgcttttaaacggaactttactaacacctttaaataattaagagaaatgactaaaagtgcattgcaaattgcaagggctgcctatcagcccaaacttccgaaagcgctgaaaggaactgttaaggctgcagaaggcgcagctactcagtctgttgctgaccaggaagaaatcaagaaattgttccccaatacgtacggaatgcctttgattaagtttgaaactaccgatgaggtggttaacttccccgcaatgaacgtgggtgttatcctttccggtggacaggctcctggcggtcacaatgtgatttccggtattttcgacggtatcaagaagctgaacaaagacagcaaattgtatggctttattctgggtcctggcggcttggttgaccataattatatggaactgactgctgacatcattgatgaataccgcaatacgggtggttttgacatcatcggttcgggccgtaccaagctggaaaaggaagaacagtttgagaaaggttatgaaatcctgaaagaactcggcatcaaggcattggttatcatcggtggcgatgactccaacactaatgcttgcgtactggctgaatactatgctgccaagaattatggcgtgcaggtaataggttgccccaagaccatcgacggtgacttgaagaatgatatgattgaaacttctttcggtttcgatactgcttgcaagacttactctgaagtaatcggcaacatccaacgtgactgtaactctgctcgtaaatactggcacttcatcaagttgatgggacgttccgcttctcatattgctttggaatgtgcattgcaggttcaacccaatatgtgtatcatctctgaagaggttgaagctaaggatatgtctttggacgacatcgtgaccagcattgccaaggtcgttgctgaacgtgcagcccagggtaacaacttcggtacggttcttatccccgaaggattggttgaattcatcccggccatgaagcgtctgattgctgagttgaacgacttccttgctgccaatgcagaagagtttgctcaaattaagaaatctcaccaacgcgattatatcatccgtaaactctctccggagaatgcggccatctacgcaagcttgcccgaaggcgtggctcgccagttgtctctggaccgcgacccgcacggaaacgtacaggtatctctgattgaaacagaaaagttgctgtccgaaatggttggcactaagctggctcagtggaaagaagagggcaagttcgtaggcaagtttgctgcacagcaccacttcttcggttacgaaggacgttgcgctgctccgtctaacttcgacgctgactactgctactctttgggttatgcagcatctgcattgattgctaacggaaagaccggttacatgtcttctgtacgcaacactactgctcctgccgaagaatggattgcaggcggtgtgcccatcactatgatgatgaacatggaacgtcgccacggtgaaatgaagccagttatccagaaggctctggtgaagctggacggtgctccgttcaaggcattcgctgctcagcgtgaccgttgggctatggaaacagactacgtttatccaggtcctatccagtacttcggtccgacagaagtttgcgaccaggctacgaagactttgcagctggagcaggctaaataagttgatgcatcaacaagttgacaataaaacggaggggcggttcattccgccctttcttttcctttgctcatggcaaccaagacctccacaaatatccggcgtaaaactactgccgcccgtcgttcttcctctccgcggagcaagaagaaaatgcagccacgtaccatgcccgtatggttgcgcaatcttttggcggtctgtatcattcttgttttttctaccggcttttactggtttttcattcgtccttatgcttatcgctggaagccttgttatggtcagaaaggttacggtgtatgtatgccttgcaactatgaggtgcatggcatagacatatcccactatcagggaaagatagattgggaactcctgacacataatagagaagcccaatttcccattcactttatttttctgaaagctaccgaaggcggcgatcatggtgacgatacgtttacgcagaacttcggccaggcgcgtaaatacggttttatccgtggtgcctatcattattttatccctaagaccgatgcccgcaagcaagccgatttctttatccgtaccgtgcagctggcaaagggagacctgcctcccgtacttgatgtggagactaccggcaagcagtcaccgcaggaacttaaaacggcagtcaagacttggctggatagggtagaggcgcattacggcgtaaagcctattctttatacttcctataaattcaagaaacgctatctcagcgattccattttcaatgcttatccttattggatagcccattattatgtagattccgtgcgttatgagggcaagtggcacttttggcagcacacggatgtaggcactgtgcccggtattgaagaagaggtggatttgaacgtctttaatggtacaatggaggaacttttggagcttacgttgaaaactccttgtatagaacgctaaaggtcaactttagcttcctgatattgacctttagctttttagtattgacctttattatttttggaatttcactgccgcccaccggttcttctcacgatggtggacaaagtgcagcccgttgcgttcggcttcttcgcggatgacgggaatgtcatctatgtagaaaccgctcatcaacaattccgctccgggattcatgcgggctatgtagtgcttcatatctgccaggaggatattgcggttgatgttggcgataaccatatcaaaaggacctttgctttccagagaggaggcatcgccttgggatacggcaatattgtccactccattcaattctatattttcgagggagttgcgcacacaccattcatctatgtcgatagctgtacaaggggaggctccacgcatgcgtgccagtatggcaaggatggaagtcccacaacccatatcgagcaatgctttgccttgcaggtcactatccagcagttcgcctatgatgaggcttgttgtctcgtggtgccctgtgccgaatgccatttgcggattgatgacgatgtcatattctgcttgtgggacatcgttgtgaaaagtgctgtgaatgacacaacggtctccgataacgatgggctggaagaagttcttctcccattcctcgttccagtctttgtcttcggtttctacgaaattatattctatctgtgtatcgggcagagggaagtctgcaagtgcttctttgagtagagattcgttatacagctctttctgtatataggcagtgataccgtcggtctgctcaacaaaactttcaaagccagcttcacccaagactccggaaagtacatcgttgactatttctgtgcacggaacagtgcggaatgtaaattctaaatatttcatcggaatatgattgtttgttaaatgcagaagaagattttaaagaacaaatctatttctgcgtatctttgttttcacactgcaaaggtaatgtaaaccgagggcagaataaaatgaacttgttcattttttatgcggaagtgccgcttgcctcgtcaaaaggcggggtatttagggaattccctataaatctttggggaaaatctgctgcatgggataaaatccggtgttatctttgtgacgtgaagaaatagataaacgtaaaatccataaaccaaactaatatgaaaaagattgtttttttatcgctttttgccttgtgcctcccatggacactggtggcacaaagtatagatgacgacctttactacactccttccaagaataaggaagagaaaaaagaagaggtgaagcaggagaagaaagtcgctgctcccgtagaagagattgtagtaaagtcgaatgtaccgaccactgtctattcatcgccgggaagcactactgttgtagtaaaagaccgtaagggaaacacccgcgatgtggacgaatataaccgccgttatgactcccgcgacaatgatttcgtgatggagaacgataccctttacatcaatgaaaaagaagatgacggcctggacggcgaatgggtgaacggtgaatttgaaggttcgcaggatgattacgagtatgctacccgtatcatccgtttccgtaatccccgttatgccatcagcatcagcagcccgctatattgggatgtggtctatggcttgaattcctgggattggaacgtgtataccgacggattatatgcatatgctttccctacattcaccaaccgcttgtggtgggattggcgctataactcttatggttggggcggttatccttactatggctggggatggaacagctggtacggtccgagctggagctttggctggggcggctggtacggcggtggctggtggggacatcatcatcaccatcactatcatcccggatattatcccggtggcggtggtcattggggaggcggccattggggaaatgcatataccaatagacgttcttatggtccgagccgttcttcttatgccggaaacagagtatcgtcctctacttcccgccgttcttctactgtaaatggagggcaggctgtacgtcgtagcagtactacttccggtcaagtgagacgtagcagtaccggtacgtcaacccgtcgggtggtaggtacaagaagttcgtctacagttcgttcaagttcttctgcaactcgctcaagtgtaaaccgttcgagtgcggcttctacccgccgttccacttacacccgtccaagcagtacgcgtagtagctcatataatagtagcgtagaaggagttcgtagcagtcgttcttccggtgtacgctcttctgttggaacttccactcgtagcaggacttcatcgacttataacagaggttcaagcgccgcaccggcacgcagctactccaatgacaacaatcgtagtagcagtcgttcatattctgctccagtacgttcatccagtagcacccgttcttcttccagcttctcttcaggcagtagctcacgttccagttactccagtggtggtggcggtggtgccagtcgttccagtggcggcggtggttccagaagacggtaagtataagtatgttttaatctaacaagactaagaattatgaagaagataaccatgatagcccttgctatgtttacagctgtaggcgcaggggcacagacaatatatgatgcaacgaatattgcacagaaggaattgaatggaaccgcccgttttgtcggaatgggcggagctatgggagcattgggtggtgatatttctaccataggaaccaatcctgccggtatcggtatttatcgtagcaatgatgctatgtttacctttggctattcaatgacgggcacagaaagcaattatgtaggtaataaatttgaaacgaacaagaaccgctggagttttgataatgccggttttgtgatagcttcgaagataggcaatcatactcctttgcggtatgtgaattttggttttaattaccacaaatcaaagtcattctataagaatatgacgatgcaggggttgatgggaagcatagataatcaatatgtatctcaagtgcggagtatggcgcagcaggctacggatgcagcttatgcgttctatcatcgtcctcaatatgattacccggatcaaggagcttatttggactatggtcgcaaggatatttatcaacataattatgctggatggctggggactatggggtatcaaggtgcacttgttcttgaggatatagaaagtgaggactataatacttatcttccttatattccttccgaagcggatgcttatttcttgtcgcgtgagcgtggcggtattgaccaatatgatttcaatatctccttcaatataaatgaccgtttttactttggtgttactctgggtgcttacgatgtggattacaacaaatattctctctatgatgaaatgtatgcctacaaatgggagggcgacgggcagatttatgaggaaggctactctttggagagctttaaccgtatacacggttcgggtttcgacttcaaattcggtgccatcttccggccgattgaggattctccgcttcgtataggtttggctgtgcatactcctacttattacaaactgacttatactacgggagcgttgctgacttcggatttgtttttaccgaatgaggctggggatgaaactcttactcgtaccactgtggatacttattctgcattaggcggtagagatatggaccgtgattttaagctgcaaaccccgtgggtatttaatgcaagtttgggctatacagtcggtaataatctggctttgggagctgaatatgaatatgaggactactcaagcatgaagttcaaatatcctgaaggtgacgagatggcatgggaaacgggtgaggctgacctctgtatgaagggggtaagtacgcttcgtttaggagcagaatacaagccgatacctgctttctctctgcgtgccggttacaattacagtactgcagcctataaaaaggatgctattaaggcattgccttccaattctataaatacagatacggattttgccaatagcaaatcgatgaatactttcactttaggtatcggttatcgcttttcttcgttttatgcggatttggcttataaattcgatacttataaatctgatttctatccgttttataatgatataaatggcttggtaacaccgccaacaacggaagttaccaacactcgcagtaaagtgctatttacattgggcatgcgtttttagaagaacaattttcattgcagataacctttcattgtcaataccttagggtataaaagaactccccggaatgtacaaatacatttcggggagtcttgtgttataggggagggattacagataccatgccacgccaaatgaatagggagatacttccggtcccttgtctttctggaataatccgtatgtggagtagcgcaggtaaatgccgatattaccataaccggcttgtgccagcaggtttatgccgacgggctgcacatacatacctttgcctacggttttcttcttgcctccgttgatgtgtgagaatgacttcacgctgtgacgtatctcaaattcgggaccggcattgaagaacactttgtttcttcccactctttgctgccattccatcaatacgggtacacggaagaagaaatggcgcagacggcttttattgtaactggtgtcttcgttgcctgcggtgaagatgctggttccgttttccttcagcaaggcatagttaccgtcgatattgaaagaacggtatccccagctgactcccaggttgattccccaatgcgggttcttcttgaagttgtgatatacggagaggatgttgaagccgaattcccatgacttggataagtcgagtcccatcttgtcgcttgctccgaaggaaaggaagtcgttagccagccggctgtagccaatatacagaccggaacagtgcggttcgtaagcattgtatcttctctttttggggatgaatggcagggcgtcgaggaaagtgcgcttgtctgcatccactttctcgagatagactccttcataaatttgtacttctttcttttctccgtcttccaactgctcttcgtacaccttgatgcgcatgtctccttttcctttccggatgatgatggagtcgccttgtgtctgtactgtagctttctgttcagggtcagtctgttgttgtgctgccatgcggccggccggcacagcaagcaggcaggccaaaatcataattctggttttcatatcgtatattgtttttagtgttattccgatttgtaaagcatatccattatttccttttcactgagcagaccctctatgtaaatcaaagtgcccatggagtcttttcctatcttgaaaatgatgtagcggttcagcttctttccattgcgttccacctctttcagttggtaataagcgctgcgcagcacaccgctttccattacctcctgcgccttctttgcgttatcttgcttgtcgtgtacaatggcctgctgaatttcccggcgatagggggatacattcttgaacacaaggctcttgtaggtagtcatgcggtaagatttcaggatgcttccgttcagctctaccctggtcacgtccttttgttcgccatacttgttgaacaggtcggctatttgcaatctctcttgtgcatgtacaaaggctggcaggcaaatcagcagggaaaagaggcacagactacgtatgcaaatcagtatagatattttcataaccttgttatattagtgttgaaacagtaagttgcttaaatcttcatccgtgaagctggcgttctgcagggcttctagtgctttggcttccaccagtttctcgtctgtataccgctggccgtcgatgacgacataattttcgggaacaccggaaagcggaaatataatcttggctatcccgagaagcaggagcaatccggcggcaatgccgctgacagcatagaatgtgcgatagagacggaaaggcttccgctgtgcgggtacttcctttgccgattctgttgttacggatttttcctctgtcggttccgccattgaagttgcttcccggttcagataagcgaatagggggcggtacgtttgcaggtgctccggcacttcctcttcggtaaagaaacggcgcagttcacgctcttcttcgcaggaagtttccccttcgaaatatttatccagcagttcatctatcttcatggctcatttctcctttcttttctttcttgtatggttcgcaggtaaacgtctctcactttcttccgggctcttgacagattgctgcggatggcttccggtccgcatcccgtgatttcggcgatttcgtccgtttcgtatccttcgatgtccttcatccgcatgatggtgcgttgaagattgggcagcgagtcgatgatttcgtgcatcagacggatttcatctttgatttccaacagccgttccggtgttccggtgggggatgccgcctgcactatgtcgagagatagggtgtcgttgcgtttgcagcgccacatatctatacagatgttgtgcgtcaacgtcatggcaaatgcttcgatgctccggtattgctccagttcaagccttttgttccatagcttgagcagtacctcctggacggcatcttctgcatcctccggttcgtcggtcaacttccgtgcatagttcaacagcttggcacggagtggaagaacggttattttgaattctttgagttccatttacacagataagacgaatgggaaatacaaacgtgacattgtaaagtgaaaaaagttggaataaaaaaagggacttactaacattagcagtcccttttcttcacattactataaaagtataggattatttcttgaaatagcggttgtacagaccttcgaaacctttaccgtgacgggcttcgtccttagccatttcgtgaacggtgtcatggatagcgtcgaggttcaatgctttggcacgggtagcgatacgcttcttgtcttcgcatgcacctgattctgcgttcattctcttttcgaggtttgtcttggtgtcccatacgcagtcacccagcagttcagcgaatttagcagcgtgttctgcttcttcccaagcgtaacgcttgaaagcttctgcaacttcaggatagccttcacggtctgcctggcggctcattgccaagtacataccaacttctgtacattcgcccatgaagtggttgttcaggtctttaatcatttcgtcgtcgcaacctttggctacgccgattacgtgttcgtcggcaaataccagcgggccgtcagctgttgcttcttcaacttctacgaacttgcttgcgggagctttacacaatgggcacttttcgggagctgcatctccttcgtatacgtaaccgcatacagtacatctaaattttttcattttctctcagattttaattagttgaattagttattctttgttgttcttaaacgttcttcttctatgcaatgtttacagattcctttataatagtagtggatttcctgcacatcgtgcccgtccatatccatgtcgaccactttcttgatgttgttattgcacatcaagtcataaatctttccgcaacgcttgcacaagaaatgaccgtgcgggctggtatcggcatcataacatgtgttacgctcgtcgatagtcagggtttgtgcggcaccttgctcgctcagtagtttcaaggtattgtataccgttgttttagacagtgtcggtatggagggagacagtgccgtatagatttcatccaccgtgggatgcgtacgatgctctatcaagtaattcatgatggctatgcgctgtactgaaggcttgatattatgattctgcaatcgttttactacatccatataatctaaagtttcaaacttgtaattattacatttttaattcacttgcaaagataggaagttcctataattctccaaaagatttttggaaaatttttagttgcggtcattaaaattgtttatatatgttcctcttcttgtaggcaggttgccgtatttttgccataaaagcgaaggcaggatgcaccccggcttcagtcggtttctcgtgccgatatagagaaaacgtttttctcttatctctcttaatcagaattttgccgtatctttgcaccgaataaataatataacatccttatgaattacggatatgtaaaagtagcggcggctgtgccccgtgtcaaggtggctgactgtaagttcaatgcctcagagattgaaaaagagattattatagccgacgggaaaggtgtgcaaatcattgctttccccgagttgtgcattaccggatatacttgtggcgacctctttgcccagcaacttctgctcgaagaggcggaaatggggctgatacagattctgaacaatacgcgccagatggatatcatttcgatattgggcatgcccgttgcactgaacggtgtgttgctgaatgcggcggttgtcattcagaaggggagagtgctgggcgttgtcccgaagacttatcttcccaattataaggagttttatgagaagcgctggtttacttccgcatgtgatgtggcagaaaaaagtgtgcgcctttgcgggcagattattccgatggggagagacctgctgttcgaaacggcagataccactttcggagtggagatatgcgaagatttgtgggcacccataccgcccagttccacgctggcactgcaaggtgcggaaatcttgttcaatctttcggccgacaatgaaggtatcggcaagcacaattatctgcgctcgcttatcagccagcagtcggcacggtgcattgctggttatgtattcagctcatgcggtttcggagaatccactacggatgtggtgtttgccggcaacggactgatttatgagaacgggactctgctggcggcaaacgaacgcttctctttcgaagggcaggtggtcatcagtgaaattgatgtggaacacttgcgtacggagcgccgggtgaatacgaccttcgcggcttgccatgcaaattgtgtttcggcccttccggtacgaatctctacggagtatgtcaacagcagggatttgaacctgacacgtacttttgaaccgcatccatttgttccgcaggggatagcgttggacgaacgctgtgaggaggtattctccatccaggtgtccggactggcgcaacgtctggtgcatactaaagcgaagagtgccgttatcggcatttcgggtggactggattctacgctggcgctgctggtttgcgtaaagactttcgataagttgggatggtcccgtcagggtattgtcggtgtcaccatgccgggattcggaacgaccgaccgtacttacacgaatgccatcgacctgatgaactccctcggtgtgactgtccgcgaagtcagtatcaaggaggcctgcatacagcatttcaaggacatagaccatgatgtccatgtgcacgacgtggtttacgagaatgcgcaggcacgggagcgtacccaaatcttgatggatattgccaaccagacctggggaatggttatcggtacgggcgacctttcggaacttgctttaggatgggccacttacaacggcgatcacatgtcgatgtacggtgtgaatgccagcgtccccaagactctggtgaagcacttggtgaaatgggtggcagagcatgatatggacgatgcttcacgtgctaccttgctcgatattgtggatactcccatcagcccggaactgattccggcagatgagaacggtaatatccagcagattaccgaggatttggtggggccgtatgagcttcacgacttcttcctttattacttcctgcgctgcggtttccgtccttccaagatatttttcctggcagcacgcacattcaaggggatgtatgatgaagaaaccatcaaaaaatggttgcagactttctgccgtcgtttcttcaaccagcagttcaagcgttcctgtttgccggatggtccgaaggtgggcagtatctctctgagtccgcgcggtgattggagaatgccgagcgatgcttcgtcggagatgtggctaagggaggtggaaggactctaattctttacttcgggtatgccgtaatatcgatatgggtatttgatgactgcatcttgtttgcattcttgctgcatgtattttgcagtgcgactgcaaacgtgttgcagtatcactgcataactgttgcagtcgtactgcatatcggtgtgcagtgccactgcaacggctttgcagtggcactgcaaaatgtatgcaggattttgcagtaataagctgttgattgataactagttgtaaaagtagggatatgctgcgtgtatggaaaagtgcagcttagtttcgtttcccgtagtatcgtttgtagattttcttgtattcttttccctttttgaaactatccagccatgtgttgaggctgtccagcaggataggggactgtttgcttaccccccaggaatagaattgcgtgaagctgatggcggtattgatgtctatttgaggaatgctgtcggctgcggtacgggcaatgctttcgtcgcatacggcatagtcgatgtctccatgggctaccaaggcaatcagttgttcggaaccgtacttctctatttcctcaacgtagatggtgtcgcctatctcatttcccaggttgcggatgcgtagtatggaaggggagcctttcactacgtgcagtgtctttccagccaggtccagttggcttttgatgaataatgacgagtcggaaatattctcaagcttgcgttgcaccagcacttgcttgttcagcacaataggggtggtaagcagcaaggagtctttcagctcactggtggcgaggatgccgtaggcaatcacgtcatattgcccgtcggccaggccttccagccgcttgttgaagctcatttccggtgatatggccgcttgcagcccgtggtcgcgtgcaaaagcttctatcagctcgtagtggaaaccggacaaggtgtcatcatccacatagaaactgatggagttgtattccgtcgaagcatgtatgatgccttcggcagctatctcggcataatcgcgcggatgacctttcggtttctcttctttcttgatgagatagtgggcaatgagagccgctgcaattcccagaagtgcgtatttgagcagtctgcttttcgtcatacagtcatctgttagtcatagaaattccatgagacgccaattttgaacaagcgcggattgatggggtagtgcggcaccaggaaggaattggcgcttcccatacccgcgttgacgtgatacatcatggcaaagatacgcgtccgcttcaagtgcaggttggcatatacgtttacgatggggtaaccgcctatttccaccaaatcgtccgtaggttgcagatggaactgctggacgccgggtgcataggcaggtgcgttgtacttggtgaagtaacggacatcggcacccaactgaacggtcagcaccttcttggcgagtttagccagtatgtagaagttatggtagagcgagagttggggcaatggaagtactgtttcattgctcgtcttctgccaggtcacctcattgtccaggtggaagacaccgaggcggaagtcttgtttcagtgtggcggacagcacttgtatgttgcctccgttctgttcgggcagggcgctttggttgaagtaggtgtagttcttgatattctctacgccggcacggagattggttccccaacgggaaatgttcagctcgccttccacacgcgtacggaattccttgtccatgttgtcgttgtcccagttgtagtggttggagtggtaatggcgcatgtagaaggaaggaagcgtgttgctcacataaccgcgggcgtagaagttcaccgtatctttccatagacggaagttcaggtccagattggcgttgacgcggaactgcccgatggctttgtctaccaaccccacttcaccgtttacgttgtagtgcagcagtttgccttcgcgcttggcgagttcgccacccaggaagatttcctgctcggtgtagcggatgcggcgcatgtcggtaagtgtgtccgtattcatcaggtcgtaccggctgaacttgtgggagatataagccgtaagtccggctttggcgtatttgttgaaaccttccagcaaggctattccgaacacgttctttacactgaatgccgtggtggagtcgttgctgtaattcttgtaaagcttgtagtcttccgggaagaatccttcgggctcgcttcccgaacggaattggtgccgcgaccgctctactttcaaggtatggataaagctggtgacggggacgaactcttcttcgaaaagtgagtcgttgtctgcggtagaaacagacggcaggctgtcattggcagctgcaagtgtgctgaccgattttgatgctatgctgtcgtttggcaatgctatgtcgttgttcgaagcggatatttcggattcagaggacggggaggatgaggctttgggtgcggataccgtcggtttgccttcttgtgtgttccgtactctccgcgtaaaaccaagacgatagcgctgtgtcagatagatataaaaatccttgttacggttggaactctgttccaatttgaccgggatagtggtggactcgtactctttctttcctccggacatgttttcgggacgggtgatgtattggtcgtctgcaataccgccgttctcgttcatcttcaggaaaaagttgttgtagactgcttgtacctggtatttctcgccgatatagctaccgaacagacctgcattgaagtgcgaggtggactggttctggtaataaccgcgtccgtacagatagtcgatgttaaagccaaatgccaactgcttgttgacgttgacggagaagtaggacttgaagcgttcttcaccgttcactttgctgccggctttgtagtaggtaagattggtgtaaggcacgttgctgttggtgaaaagcacctggtcgggacgtgtgaaaaaactggagaagggagccatgaagatggtaggttcgctttcctcccgttcgaagaacagacgtgagaggcgtggagaacctaaatttcccaagtagttgtaatggccgaacattccttccaccagattggtgctctggaagttgaggctggctgtgtcggcaggtatgatggtacggttgcccagtgtctcacttagtttccacatgtaaagcttgggtggaagactttgaatctcagtattggtactgtcttccagattgtccggctgggtattcgggtcaatctggttaccgaaccggtcgcgattgttcatcgggtttaaggtgttttgcgccatagccccccatatccctataacggacagaaatatatatgtcagtacaattcgtctcataattaggcgcaaagatacaataaaaaattatttgcttactgaattcagccttttttgcttcttttaaactgtcttgttttctgttttgttctatactgcttccggttctctgcccttgaatccatactttttccggcttgaaatgaaataagcccttgcaataaatcaatatcacaagggcttatccgttttcctttatctcttattctggcgtaaagttcctcctcttatggggagtggctttacatagcctttcatttcatttcctgaataagttccattcctttcttgatagcttcttcgttcatcggtatcaagtggtggtggcgttcgggcagtgtcttcttcaatcctctgagtacactgtccagtgtaaccatcggcttgattttcaataatccacccaatacaatcatgttgaatgccttggcgttgttcatttcattggcggcatccatggcgttgatgcggtaaacgtggatgtccttacgcgtcggcgggttgatgatgccgtaaccgtcgtagataagtacgcctccgggttttaccttgctttcgaatttctccagtgacggctggttcaggatgatggcggcatcgtacttgcttaagatgggtgaggatattttctcgtcacttacgatgactgttacgttggctgtaccaccacgttgttccggtccgtaagccggcatccaagtcacctctttgccttccatcaatccggaatatgccaaaatctttcccatggacaatacaccttgtccaccgaagcctgctataatgatttcttctttcattgttcttctgtctttagcatgattatttatctttcaggtcgcccagcggatagaaggggaacatgttctctaccatccattcattggatttcgcaggagacatcttccagccggagttacaggtggaaacgatttccacaaggttggaacctttgcctgccatagagttctcgaatgctttgcggatagcctttttcgctttgcggatggcgggaacggactgtacgctttggcgtgtcacgtaagcggttccttccaattgtgcagcaatatcggccatcttcagcggatagccgtgcagatgcacgtcacgtccgtaagggctggtcgatgtcttcatgcctacaagggtagtgggagccatttgtcccccggtcataccatagatggcattgttgatgaagatgatggtgatgttttcgccgcggttcaaggcgtggatggtttcggcagtaccgatacaagccaggtcgccgtctccttggtaagtgaacaccaggcggtctggccaaaggcgcttgattgcagtggcaagtgcgggcgcacgtccatgggcggcttcctgccagtcgatgtctatataattatagatgaacacggcacatcccacgggggagatgcctattgctttgtcttccagtcccatttcttcgataacttcggctacgagtttatgaactacgccgtgactgcatcccgggcagtagtgcatgggattgtcgttcatcagagtcggtttcttggcaaccagattctcgggctttataatatcttcttttgtcataatcacttctcctatctgttggtgaaccgtatgaaaaactccatcaacttgacgaatatcgccgcgccgcagacgtagatgaacagcttgaagtcatcttttgcagcaaaatatataatgatagctgccaaggcaagtaccatgaagagaatgttcagtacgtttcttattttatcaggattcatttcttaatcagtttttctttcaatgcatctactatctcatccggatcgggaacaatgccgccgaggcgtccgaaatgttccactttcactttaccgttcacggcaaggcggacatcttccaccatctgtccggcattcaattctgtaacgagcatacctttcaccttgtcggcatacgcggcaatggctttggtcgggaacggccacaacgtgatggggcggagcatacctaccttgattccttcttcgcgtgccagctccattgctttctgtccgatgcgtgccatagagccgaaggctacaatcaggtagtcggcatcatcgcaatgaatttcctcgaagcgaacctcattctcttctatctgcttgtatttggcctggaaacggatgttgttcttttccatttcttccggtttcagttccaatgaggtgatgacgttgggtttgcggccattggttctgccggtagtggcccatgggcattgttcgatgacttccgcatcggtgcggcgtggcttttgtaccgggagcaccactttttccatcatctggccgatgacaccgtcggcaaggataattgccggattacggtatttgaaggcaagttcgaatgccagtcctacgaaatctgccatttcttgtacggaagccggagcaagggcaatcagacgatagtcaccgtggccgcctccttttactgtctggaaatagtcggcctggctcggttggatggttcccagaccgggaccgccgcgcataacgtttacaatcaagcaaggcagctcggcacctgccagataagagataccttcctgctttaggctgacaccggggctggaggaggaggtcatgaccattttaccacttccggcaccgccgtacaccatattgatagctgccacttcactttctgcctgaagaaccaccatgccggtcgtctcccagggtttcagttcggcaagagtttccaatacctccgattgcggagtaatgggatatccgaagtaaccgtctgcaccgcaacggatggctgcgtgggcgatggcttcgtttcctttcattaatacaacttcttctgccatattctactgatttacagatttattctacttttattttatatactgagatacatccgtccggacatactgtggcgcacgaggcgcagccgttacaagtatcttccaatatttggtgggcatagttataccctttcacattcacctccttggtgagggctattacgttgagcggacacgctaccacacacaagttgcagcctttgcaacgttcggtgtctactacgattgctcctttgatttttgccataatttacgttctttatttattgattgtacatatccttgttgtagaagttcaggatgtccatagccatttgataggcatgttgtgccgggctttcggggttcaggtcgatggcatactgatagttgttcagtgcttgttgccagttgccttgtttccgataggcatttccccgcaggtagtaagcttcgtctttgccgggaaagtctgtttgcagtatttcgtcaagctgctggatggcttgctctacatttccctggttgataagctcttttatggtattcagtcgttccatatctaaaaaatatccgggttatcgaaccacaaagatagtttttatttgaagacaatgagcatcttcactgtgaaaaataagaaaaaggggcaaataaaaagcccgaagtttctcacgattctatcagaatgtcagagcttcgggcggatatcataaagaaggtgattctattgctttacaagtgtaccggtatcttgtccactcttcgttggtggcgtccgccttcgaatggtgtactgaagaattccctcataatcatgtcggcttcttcggtactgatgaatcgccctggcatgacaagcacattggcatcattgtgctggcgtgccaaatgggctatttctgccgtccagcagagggctgcgcggataccctgatgcttgttcagcgttatgctgataccttcaccgcttccgcagatggcaattcccggatagcactctccggcttcaacggccagtgccaaaggatgtgcaaagtcgggatagtcgcaactctcggttgagtaggtcccgaagtccttgtaagcccagcctttggcttccaaccagccgcgaacatattccttcaattcgaagcctgcatggtcggaacagattcctattgttttcatgatggtcagttaatataccaatgtgccaatgtgctgatgcctgcagcttgtagggcgcgggcaatcagcacatcagcacattggataatgattataacattgcttttacttgtttgtaaacgttctctgcggtgaaaccgagcttttcgtccagcactttataaggtgccgagaatccgaatgattccaatccccatactttaccgcggggacctaccagcccttgcagtgtgacgggcagaccggctgtcaggccgaataccttggcaccacacgggataatgccttcttgatatcccggagcttggctacggaacagaccttcggaaggaacggacacgatacgcaccttgatgccatccttgcgcagcaattcagtaccggctaccaatgtggcaacttccgagcctgaagcaacgaggattatatttggattttcatcggagccggctacaatataagcgcctttggcagcttgttcgtaatcgttgccttcgggcaggttggcgatgttctggcgggagaaaatcaaaccggttggggttgtggtattttccattgccagtttccatgccacagttgtttcttctgcatctgccgggcggagtaccaacatggaattatgtcccttgtggtttttcagtttttccatcaggcggatttgggcttcctgctctaccggttcatgggtaggaccgtcttcacctacacggaaggcatcgtgtgtccagatgaacttcacgggaacttccatcagggctgccatacgtacggcaggtttcatgtagtcggagaatacgaagaaagttccgcaagcggggattacaccgccatgcagtgccataccgatacagcaacatgccatagtcagctcggcaacaccggcctggaagaatgcaccgctgaagtcacctttcttgaaggcatgtgttttcttgaggaatccgtctgtcttgtcggaattggaaaggtcggcagaagcaacaatcatattttctacttgagtggcgagagcactgagcacagtggcagatgctgcgcgggtggcaacgcctgctttctgttcgatggcggcccaattcacttcgggaaccttgccggagaagaacatttccagtttggcagccttttccggattggcttttgcccatgcggctttggctgcatacttttcagccatgattttcttcagctcagttgcacgcttggcatatagttcggccacttcggggaagatgacaaacggatttgtcgggtcaccacccaaattcttgatagtgtttatataagcgtcgccgcccagaggagcaccgtgcgtggcacaatcagcctcgtagctgctgccgtctgccttgcgggcacctttacccattacggtatggccgataatcagcgtcggacactctttctcagctttggcttcgttcagtgcaccgcggatggcatcgggatcgttaccattgattttaatgactttccagccccaagcttcgtatttcttgccggtatcttcgatggtcacatcctttgtctcggtagaaagctgaatgtcgttggcatcatagaacatgatgagattatccaaccctaatgctccggcgatacggcctgagccttgggagatttcttcctggatgccaccgtcagaaatataagcgtagatggtctgtggcattacttcttcgaaacgtgccttcatgaacttggctgcgatggctgcaccgactgcaaatgtgtgtccctggccgagcggtccggaagtgttttcgatgccgcgcatgatgtcacgttcgggatgtcccggagtagggcttccccattggcggaactctttcagttcgtccagcgtgaacttgccggtcagggccaatgtagagtaaagcatcggtgacatgtgtcccgggtcgaggaagaaacggtcacgaccttcccaagccggattttcagggtcatataccaggaactctgagaagagtacatttacaaagtcagcaccacccatggcaccgcccggatgcccggagttggctttctcaaccatggatgcagcaaggatacggatattgtccgccgcacggttcataagtttgttgtcgttcatattgaatctaatttattttgaatattatcaataggttatttggtccttgtaggttttccaagggcaaagataactctttatgcgtaattcacaacactcgaagagtgtcttttttatcagtattactgcctttttgctgctaaaatgatactaaacgtatttagctgattttgtgcggtgcacggtagttttactgtaactcaatagtaacgattgatttggccggaagtttaatcttgagaatatctttattgatttttacctctttgaacggaacgggtttcacattgtcgggattttcaaatgaattgtagtccgtcagattggtggaagtcaatatttcaccaactgctttcttggctttcgttccagacagattgatggtcacttcctgtgcattgtctgcatctacgttggacatggaaatgtgtatcttgccgtttgggtctttggaggcggtagcgctgaccattggtattctgcggttgtcgcgtacatccatcatgtcgcagttcagctcaagaggaatgtaggtggcatcctggtgtacattgtacattttgaatacataataagtgggggtgagtaccatgttttttccgctggtcagaatcatggattgcaatacattgacgatttgggcaatgtttgccattttcagacggtcggtatatttatggaagatgtcgaagctgagggaagcgacaaaagcatcacgcaatgtattctgttggtacagatgtccgggattggtacccggttcagtgtcccaccaggttccccattcgtcaagcataagagccacgttcttttgagggtcgtattcatccataatggtgcaatgcttcttgatgacatcttctatttcgcggcatttgcccagtgtccagtaatagtcgtctttactgaattgggtggcggcgcctttactgccgttccatccgctgacggtatagtagtgcaaggaaagaccgtgcatacggccgcctacgcggtccatcagcactttggtccagttatagtcgtagtcgctggcaccgctggctatcttgaaaaggctattgccgtcatagttgcggcagtaggtggaatagcggcggtagaggtcggcataatattcgggacgcatgcttccaccgcaaccccagctttcgttacccacgccgaggtattttactttccaggctttgtcgcgaccgttctggcggcgcaggcgtgccatgggggagtctccttcggaggtcatgtattccacccatttggcaagttcttctacggtaccactgcctacgtttccactgatatagggttcacatcccagcatttcgcagagattgaggaactcatgggttccgaaactgttgtcttcgatagtgcctccccagttgttgttcaccattttggggcggttttctttagggccgataccgtccatccagtggtattcatcggcaaagcagcctcccggccagcgaaggacgggtacacggagctccttcagtgcattgaatacgtcggtgcgataaccgttgatgttgggaatatcggagttttcacctacccaaagtccaccatagatacaagttcccaaatgctctgcaaattggccgtagatttctttgggaatgatttgctcgctctggtctgtgtgtaaagtgatagtggcacttttctgtgcgaagagtgacaacgaggtggagagaaatatgctactgataaataactttgtgttcatagttttttagtgttattaaatacttagttcttgaatcttactgctgcttcttcgatgggcaaaccagctttatagctttcgatgtaggtgttgaatccgcttacatcttcggctgtcggtgagatttcaataccggcatttccggtgaatacatgcttgtccaggaagtcggcaagggattggtcgtttccgttgtttgcaaggtaggaagcgaggagggcaataccccaggcaccaccttcgccggctgtttccataacggaaatgggtgaattgatggcagctgccagtattctctggcctactcctttggttttgaagagtcctccgtgaccggtgattctgtctactctgattttttcttcattgaaaaggatgtcgttgccgattttgagaactcccactgaagcatacagatgggtgcgcatgaagttggcaaggttgaacttgtcgtttgccgaacgtacaaacagtggacgtccgtctgccagtcccgttataggttcgcctgatatgtagttgtatgaaatgaggcctccgcagtctgcattgcctgtcagggcgtggttatagagttttccgtagatttcgtccatatctacggggatgcccatcagttcctggtattctttgaaaatattgatccaggcattgaggtcggaagtgcagttattgcaatgcaccatagctacgaggcttccgtcgggggtggttaccatgtcaatcatttcgtagggcttggacaattctttctccaatacaatcattgagaaagaggaggtgcctgccgatacgtttccagtgcgctgctttacggcgttggtggcaaccatgccggttccagcgtcaccttcgggcggacagacgggaattcctgctttcagatgtcccgatacgtcgaggcgactggctccttcgggagtaaggaagcctgcgttttcaccggccgacaataccttcggcagaatatctcgaagcttccagtcgtatcctttcggagcaataagtttgtcgaacttatccaccatttcagaagaatagtttttggtgatgagatcgatagggagcataccggaggcatctcctatgcccagtaccttttggccggttatttgccagtggacaaaacctgcaagggtagtcaggtaattgatggatggaacgtgctcttcattatccaggatggcttggtagaggtgggagatgctccaacgcagagggatgttgtagacaaatagttcggatagggctgcggcagcctggccggtattagtatttctccaggtacggaagggtacaaggatttcttctttttcattgaatgccatatagccgtgcatcatggcactgacaccgatggctgccagggtttctatctctgtatcgtagaggctctttacattggtacgaaggtctgcgtagcaatcctgcaacccataccagacagcctcgacgctatatgtccacagtccgtcgactaactgattctcccaagtatggcttccctgggcgatggggttgttttcctggtcaatcaaaaccgccttgattcgtgtggaaccgagttctataccaaggatggccttacctgcctcaatggttgattttgcatctaatttcatggtattaatgataatttacggatttatagtacgattataaacaacggattactaattgcaaactactagttacgtttgtggtacgtgtaattagtagtccgcaatcggtaatccgtaatgattatcagcaaagtgccttgttcagcatatagtagacttcattcatgcgcagttcttttttgaactcgctgatggtggtattttcatcgatgactaccatttcgatgccggccatttcggcaaagtcttcccaatattccaccgtcaggtcgtaggagaagctggtatgatgtgtacctccggccagaatccaggctgcagcgcccacctcgaggttgggcattggaatccacagtgcgctggcaacgggcaacttgggcagaggcttgctcttgatgcattctactttgttcacaatgaggcggaagcgattgcccaggtctacgatggtagcggctacaccttcaccttgcttgctggtaaataccaggcgggctgtttcgctgtcgataccgatgctcagacggtgcacttccagtttcggcttctgttcggcaatcagtggacagacttccaacatgtgtgcctgcaggatggcgctcttttctccgtcgaagttcagcgtatagtcttcgaggaaggagcaccccttcggcatgccttgactcatcacccaagtggtacggtatagtgccgcagttttccagtcgccttcggcaccgaagccgtaaccttccgccatcagtcgctgtgaggccagtccggggatttggtcaaagtcgcccaaatcgttgaagttggtggtgaagcctttggcacccgtgtctttcagcacacggcgaatggcgatttcggccttggcggagttccatactttggtgtaggcttccgtacgtgcgtcttccagttcgggagcgtggtcgtagagcttgaagtattctgctacaagtgccttcacgtcctcgtcgctgacagcattgtagtgtgtcatcacatcattgatgggatagtagtccacatgatagcccaatacttgttcggcactgaccttgtcaccgtctgtcacagccacgttgttcatctggtcgccgaagcggatgatgagcatatcctgcgcatcagcccatgcggcagctacgcgcatccatgcggcaatctggttttgggctttttcgtcctgccagtggcctactaccactttgcggttctttcgcatacgtgtcacgatgtgtccaaattcgcggtcgccgtgagccgattggtttaggttcataaaatccatgtccatcgtctcccagggaatttccttgttgaactgtgtatggaagtgtagtaatggcttcttcagttcctgcaaaccgtgaatccacattttggcaggagagaaggtgtgcatccaggtgatgaccccgatacacttttcgtcgttgttggcggccttgaaggcagcagttacttctttggatgaattgaccgtacctttatatactacctttacgggcagtttcccggaatcattcagacctttcaccatttcattactatgtgcgtctactgcgataacagcgtcacctccgtacaagagctgtgctccggttacgaaccatacttcatattgttcaaatgcgttcatacaatttatttttatagtttatatttaaagaatgatagttatttctgtccataataagcgttagggccgtgcttgcggctgaaatgtttttctatcagcagcggattcatggtcagattggggttcacggcataggctatacttgccatttttgccacctgctccatcactacggcattatgtaccgcctcgtgtgcgtcttttccccacgagaaaggaccgtggttctttaccaatactccgggagtatgtaccgggttcagcccctcaaagcgttttacgatgacatttcccgtttccagttcatacgctccttccacttcctccttcgtcatgtctgctgtgcagggtatggcgtcgtggaagtaatcggcatgtgttgtcccgatattcgggatgtcacatccggcttgtgcccaggctgtggcgtaagtagagtgcgtatgcaccacaccgccgatttcggggaatgctttatagagaaccaggtgggtcggtgtgtctgaggagggctttaaccgtccttccacgaccttaccgtcaagattcactaccaccatatcctctgctttcatttcatcgtaactcaccccactgggcttgatgactaccagaccagattcgcggtcaatgcccgatacattgccccatgtgaagataaccaatccgtgcttcaccagttcaaggttagcatggaatactttgtctttcagtgcttccagcatattatttaaattactaattacaagttgttgaatattaggttctcagagcttaaatttcggagctttgcggtatgccttctcattaaactgatataaagcagctccacgtttggaccccgttttgtctattttgtcagttttttctatatagtccatttctgctatgcgttttcggaagttccgtttgtcaatgctctcgccgtatatagcttcgtataagctttgcagttgtgacagcgtgaacagtttaggtagtagattaaagccgattggttcggtggacgctttttgttgcatcaacttccgagctttctccaccatttgcggatgatcaaagattagcgctggtagttcattgatatttacccagaaagcattgtgttgctgtacggattctttgtcgtattcgttgatgttgatgagcgcatagtaaacaatggagactacgcgttctcctgggtcacgatctatggctccgaaagcttggacttgttccatatatacatcttccagtccggttagttcattcaggactcgtttggctgcatcatccacgctttcgtcttcctgcacgaatccacccatcagcgaccattcgcccattgccggttcgaagttacgcttcagcaacagcaggttcaattctccttcattgaaaccgaaaataatgcagtcgatacctacataaagtttcggatttgaactatagtaattactcatatcttaatttttgtttaaggggtatgctgcatggatatatatcatagcaacataccgatttaccagaaataccaataaaaagcagcagtaatacccaggatgataagggtatgaatgatatcccatttattccaactcgcacgtgtagctgctttttgttcaggagttgaagttccgaataccagcccttgaatcttttcagcgcttggggcagctgtaaacatgctgactgcgataaccactacgatgcagaacaagaacatccatccgcagaaaaacagccagttcatatcatagaacagatacttgaaggtactgcttgacacatctcctacattgctgtaatatacttttgcccccagacgggttaaaccgataatcattccggcaatcagtccccacataccgccttgtgcagaggtgcgtttccagcagatccccaagaggaaggctgcggcaatgcctggtgctaatacagattgtacatcttgtaagtaggtgtaaagtacatcgcctacactgcgcataatgggaatccagagtatacccaatatcacaatcgcaacagttgccatctgtccaattcctaccaactttttctcagaagtgttcggcttgaaacgtttgtagaagtcaatggtgaaaagcatagcagatgagttgaacaaagatgcgagagaactcatcaatgctgcaagaataccgcaaacaaccaaacctttgactcctgcaggaagcaattttgctactagagttgggaaagcagcatctgcattggcatttccgtttgccagcataggtagaaaaccttctcccccggttccgagatatttttggtgtaatgcgaaagcaatcatgcctgggataaggaataagaatacgggcaataatttcaagtaagctccgaagatggtaccgcgccgtgcttccttttcattctttccggaaagtacgcgttgcacgatgaactggtctgtacaccaataccagaatccgataatggctgaaccaatcagtgcacccaaccaagggaagttagggtcgttattactgcgtataagttctgtcattgtgttgccataatcgttcactgtgactgcaccgcagattctcatcatctcatcccagcctcccaattctttgaagccgagtacaaggattatcagtgaacctaacagcaagatgggggtctgcaggatggaggtataaagtaccgacttcattcctccgaagattgtgtagagcgcagtcagtataaccagaccgatggcggcaatccaaaagaagtcgattccccaaagttcttttataccgaatacttgttggaataccaatcctcctgcataaaccgtcacggcaacttttgtcagtacatagctgattaaagatattacagacaatattgtacgtgattgtggattatagcggcgttctaggaattcaggcattgtgaataccatacttcgcgaatagaacggtacgaatacccaacctaagataaggatcatccagccttgtatttcccaatgtgccatcgccataccgctggaagcaccggcaccggctaatccgattaagtgttccgaaccgatgttggatgcaaagatagatgcaccgatagcgagccatgtggcatcacgaccacctaaaaaatagtctgctgagtcattctgtttctgtttgacaacccagacaataattccaattaaagccaggaaaaagattccaatgactaaccaatctaatgtttccacgataataaatgatttataaggttattgttatttttctacggaaaatttgaaaacacattcactgttgtaaatttgtccgggttccagtacgacagaaggccattgggatttgttggggctatccggataatgttgtgtctcgaggcatacggaagcgcgctggttgtaagtaatgccttttttaccttttacggtgccatccaggaaattcccggtatatacttgtatgcctggctcattggtataaacttccagggtgatgccgcttataggcgatgtcagtttggctgccacttgggataggtcacctttagtattcagtacccaattgtggtcatatccgtttccgttctttatttgttcaaagtccgtccggttgatgtcttgtgccacactcttgggagtggtaaagtccattggtgtttctttgacggagatgatgtcacccgttgtcatgaaagtactgtctaccggagtatagttgtctgcattgatgtataagatgtggtctgttgctgcctttgaagggtcacctgataaattgaaataagaatggttagtcatattgataaccgtcttttggtctgttgttgcactgtattttatatcaatggcattgtcatccgttaacttgaaaagtacttttgccgtaacattacccgggaaattctcgtctccatccggtgaaatgcgggtgagcttcagagttgtgctgtcaatgggattggcactgtatacttggtattgccatcctttggggccaccgtgcaggcaatgtccgaaattgttctgtggtaactgtatggtatctccgtcaagaacgattttcccttggttaatccggttggcgtagcgtccgatagaagcaccaaagtcacttggtatgttgatgtaatcggcaatgctgtcaaagcccaatactacatcctgcataactccatttttgtcgggtaccataatggatacaatacgtcctccaaagtttgtgatgcatacttccatgcccgctttattcttcagcgtataaagctgtgtctgggcgtcattgactgttgtttggaattttactggatcaagaccggacagcgtaagcgttgtttctgtcttttgattgcacgcagttagcatcattgcggcaattcctgcaagtagaacatgtcttttcatggttttgtatttaatgtaaatgagatgattatctttctttgggtgtaaaagtaacacttttctttagtgtaggctgtacacttttatatgttatgcaacataagtgtcaagaaacatatctgtgccaactggctgtacagatagatgtgttcggaataaacttctcagatgattttgtttttagagtggaaaacggtggaataggggagaagaaaaaggcgcttcccattactgggaaacgccttttatttgaatgctgatgtctattattctaatctgcgggcaccgtcgctgatgactacatcatatacttttgggcttctgccgaacttcttcttgaattcatcttttgctttttcgatgaatgtactgtacaattcatcctttaccagattgattgtacatccaccgaatccaccgcccatgacacgtgaaccggtaactccacaatcgaatgcaaggtcattcagaaaatcgagttcttcgcagcttacttcatacaacttactcatgccatgatgtgtttcatacatcttttggcctacagtttcataatcgcctttttccagggcgtcgcaaacgtcgagtacgcgttgaatctcttcgatgacatattctgcacgcatatagtcttctgcgctgatgtcggctttggcttcttccagcatgcccatggtaacgtcacgcaggaattctacgtgtggatgcttcttctgaacagcggcaacagcagcttcgcagctttgacgacgtttgttgtatgctgaagatgcaagttcgtgtttcactacagaatctacaagaaccagacgatagccttgcgggtcgaatgggaaatactgatattccagtgaacggcaatccaggcggatgaggcttcctttctttccgaatacagaagcaaattggtccatgataccacagtttacgccacaatagttgtgttctgtagattgtcccacttttgccaattcaaatttgtctatcttgttgtcaccgaacaagtcgttcaaagcataggcataggtactttccaaagctgctgacgaggacattcctgcacccagaggcacatcgcctgcaaaagcggtattgaaaccttttacatctacaccgcgtttcatcatttcccggcacacgccaaagatatatcttgcccagcttgcgcggggtgcatcttcttcattcaagccaaattccacataatctttcaggtcgatggaataagcttttactgtgtttgtgccgttgggctttatttctgcaatcattcccttatcgattgctccggggaatacaaaaccaccgttatagtctgtatgctcaccgataaggttgatgcgacccggagaagcataaacagctcccgttgttccgtcaaagtgcttgatgaaacggcttcttacgtattctatatccatgatatttatattttataaggtgaataaataaattacctatattttcttgttaatcgaccttgatgtccttattgacatttttgcagcctaccaaaccgtagaacaacagatagccaagggctgcgatgataacccagtaactcggcatgaaacctgcaatgtcggccaccaaaccttggataacgggcaagatgccgccgccgcataccaataccatgaacagaccggaagccgctgccagatatttacccaatccttctacggccaaattaaagataccaccccacatgatggaagtacacagacctaccagtaccagatacattgcattgatgggtacttctgcaaatccgaaagagagacctcccgtagcactttgttggagtaccggcagattgacaagcgaaccggtagatgagaagatggcaaggaataccaaaagtaagcctaatgcggaagtaaaggtaagcattgccttactggagatttttgcacccaatgaagcgccggccagacgtccaatcagcatgaggaaccaatatgtacctacaacaaaaccggaaatggtggaagaaatgcctgctcctcccttttcaatcggatcggtcaagaacaagttcagagtacccggtacaccaacttcgacacctacatatacaaagattgctatagctcccaaaatgaagtggcggaattttaaagcgcctgacatcaacttaccgataggttctgttgaagttgcagcattgggttccggtatgggcacaatcaaaagaacgaagaacgcgatggcaaatacagccattgctgtgtacattacagggaatatctgagagatagtagctttttcaatggaaccggcaatcaggatacctacgaacatcggagtaatggtggccattacggagttgaaagaaccacccacttggataagctggtttcctttgttaccttcgccgccgagcttgttcagcatcgggttgactaccgtattaagcaaacacatggagaaaccggcgatgaaagcgccaatcaaatatacggcaaaagccatatcagggcttgaatgaccggataaatattggatacctacaccgataaagcctacagctactgctatcaatgccgtttttttataccctacccgttgtagtaagatgccgcttggtattcccatcactgcatatgcaataaagttaccaaagttacccaacatccctaaagcgttggatactgaaaactgatttttcagtacgattcccataggggcagcaaggttggtaacaaatgaaatcataccaaaaaggaagatcatcgtgataattgcgatgagtttaccattctgtttttgttgtgtcatggttttgtaaaattaataagtttataaattggattagttatttcattcttgtacaccaaacttgtagattgtcacttgctggtactcatcacccggtagcaatactgccgacggaaaatgggacttgttgggcgtatcgggaaaacactgggcctcaaagcagactgcacttcttgcagggaaagtggctccatgggcaccttcaaagcccccgagccagtttcctgtgtagagctggacgccattttcagtggtatatacttccatcgttcgcccgctgttgggctctatgcaggtggctgcaaggctcagctctccactttcagtcttgttcagtacatagcaatggtcatatcctgcgccattcacaatttgtgtatgtttctcatcaattcgttcaccaagagtatggggagtacggaaatccataggagtaccttctaccttcaatatctctccggtaggaatggatacttcatcgatgggtacataaaaatctgcgttgatggtaacgatattgtttaagactgtaggggagggattggctataccggcaagattgaagaaaccgtgattggtcagattgacgatggtggctttatcggtagtagcccggtattcgatgaccagagcattggtctcatcctccaggcgataagtcatttctacttcgagatttccggggaagccctcttcgccgtcagcggatgtgtagttgaagatgactgttgatggctctggctggacagcatcccatacacgggtatgaaaaccagtcggaccaccatgcagtgagttgggaccattgttgattgccaattggtgctcttcgccgtataaagtaaactttcctttagctatccggttaccgtagcgtccgatggtagtgtttagaaaaggttccgggctgttgattacatgttcaatactgtcgtgtcctaatacaacattggcatatttgccatttttgtcgggtaccatgatggaaagtattgcacagccgtaattagtaactgcaacttccattccctgggcattcttcaggataaacaaatctgtctttttgttatttatatccttttgaaagtctttttggttcaaaccggacaaattactttctgttggagtagtgtttatcatatccatggtattaattaaatttcttgcaaataaaaagaaattcttttgttcccccaagtaattggaaggaaatgtagagaacattttaggaaagtttagcgtttaacaaatggaatacaaattgatattttttgtatgtttgcccccggaatctaaaaaaatcacatcattaacagaaagttctaataaaaacaacgaatgtatcctctaaaatttgagcctattctgaagcagacgctttggggaggcgacaagattattccattcaaacatttgaatgatacccttgccaatgtaggcgagagttgggaagtgtcggcagtagaaggcagtgagtctatagtggccaatggtgcagacaaaggattgacgctgtcggatatggtcagaaaatataaggaagacctggtaggagaagccaactatgcacgtttcggaaataagtttcctttattaataaagtttattgatgccaagttggacttgtcgattcaggtacacccgggtgacgagttggctaagaaacgtcataacagttttggtaaaaatgaaatgtggtatgttattgctgctgaccagggtgccaagctgatttccggttttgcagagcagattactccgaaagaatataaggaacgagtgtataatggtacgtttgcggatgttctgcagacttgcgccattaaaccgggcgatgtgttttatgtgcctgcaggtcgggtacatggaatcggtgcgggagcttttgtagcagaaatacagcaaacgtcggatatcacttaccgtatttttgattacaatcgtaaggataaggatggtaaatcaagagaactgcatacaagccaggccattgatgccattaattttgcagatgtgcaggacgattttcgtacggagtacgagcaggtgcagaatgaaccggtagaaatggtggcaagcccgtatttcacgacttccatctatgacatgacggaagaaatcacttgtgactattctgaactggattcttttgttatctttatttgtgtggagggttcttgccgtattattgataatgagaagaatgaagtttccgtacaagcgggcgaaacaatcctgctgccagctgcaacccaagaagtgacgattgtgcctgaaggagcagtgaagttgcttgagacgtacgtataaaagtgctcagactatatcggataaaaaagaggggatgactgttatggccatcccctctttttttatccgatattctatctctttcttccaaatatttttctgaatttcttcattacctttacccccaatactataccgtcaaaaacagccatacccgtgttgaatgctctcatcatggcatttgccttgttggtagctggttccagcggagcaaaaatttcttgtgtaagcccagtcatgatttctttctggagtcgtatttcttgtagcagcatggcttttttctgggcgatgctttctaaagtgacgggagtcgtattggtcgtattatccatgaatatttcgaattaattgtctaagaataattctgcgataagttttactgtcggatcaataatgagctttttgcggaataggacaagcagaacgatgagtaggatatggaagcacgtgataagtgcaaaactcatcattagcccgcctaccagcggagctaaaatatagaccagcgtaaacgacagatgaaacagaaccactacgccgagtatgacgaccaatagcaccaataaaagcgtagaaagcagtttggacagtttttcggtgacttccagtttggtatattctttttgcagctccaggtatttcttgaattcaatgaagagctgctgcatattttctatacttttgtcgtctgcaaacatagtggttctgttttttaccttattccgttacctcacctttgatttccgcagcaatttcatctaccaagtcttccatttcgcttcggttcagacgaatccctttcttacggagaatttctgcgattttgttacgggtgtcttctcctttttcaggagcaaataagataccgagggctgcacctactgcggcgccacccaggaaagctgctaaaacatttaatcctttcataatgatattcctttcttttttgaggttcgtacgacaaaactaacaaatttttttgaaactttgttcggaatatcagtttttttatgattgtctttatcttccaactccttttggggtgttgttttgcgaggtttgcttttttcttctccaaaagtctccattcgtacggctcccgcgatagattttgttttccttggttttggccttaatttcttcagtcttgattttctgggcttttaaaccatcggcggtgacaaaagggtgttcttttattactgggatacttttccctatcaatttttggatatctttcaggtaaggcagttcttccgattcgcaaaaggagagggcaataccgtcgtggccggcacgtccggttcgtccgatacggtgcacgtatgtttccggaatgttgggcaactcatagttgatgacgtgtgatagttggtccacgtcgatacctcgtgctgcaatatcggttgctatcagtacacgcagttcatggttcttaaagccggtcagtgctcgctgtcgggcattctgcgacttgtttccatgtatggcttcggctcttattccggacttactaagggtacgtgcaagtttgtctgctccatatttagttctggtgaagataagtacggactcgatagccggattcttcagcagatgaatcagtaagtcttttttctcttttttctcaacaaaatagactgattgggagattgtgtcaaccgtagacgatgcaggggtgacttccactttctcggggtgcgtcagcatggagtttgccaaggtctctatttccggaggcattgtggccgaaaagaagagggtctgtcgttttgcgggcaataactttaatatgcgccggatatcatgtatgaatcccatgtccagcatccggtccgcttcgtccaatacgaagaactcgagcgcttttaggttaatgaaaccttggttgaccaggtcttgcagtcgtccgggagttgcaaccagtatttgtactccacgtttcagttcatctgtctgtggcttttgtcctacaccgccgaagatgacggcatgtctcaatccggtatacttaccatatgcactgaagcattctcctatctgtatggccaactcgcgggtcggcgtcagaatgagtgctttgatacttttgcgattatccgttttatataacttttgcaagatagggatggaaaatgcggcggttttgcctgttccggtttgagcacatcctaataagtcttttccttgaagtaatatagggatcgatttttcctggattggggtaggggtggaatacccctctttttgaagagccttcaatataggttctatcaaattcaaattttcaaatgtcatgtaatcaattaagtgagcctcatgctctgtttatatttggcaaatatacgtcaagtcttccgggaaatctctttttatggaggggtttaattatatttaactaaggatgctgaggtataatcgcatgttatggtgtacttttgttccatatttagatagtggcatggaaaaatgatgaaattgcatttaaaatatctttggattgtattggtggcttgtactttgaccgcttgcatgaatggtgggggtgacttggccggtaagtggcagttgcgtcagtatcaatatgccgacggtacatcagagaaggtggacagtgtattctataattttcaaaaaggaagtttttctgccatatgtttgttgaaagatggaggggtgactacgttttttggaaattattctttgaaaggtgctgaaatttccattattttgttgcctgaaagtgttaacgataaaaactatgatacttatttcgggtggccggaaggaaaacgtacctttaaagtggaagatttgtcctactcttcattgcgtttggaatatgagggtacgaaatctatttttcgaaaattttgagataaagaataagaatagacgattttactaataaaaacaatagaaaagatgaaaaaattagccgtattgggaatgggagtatgcatagctctggcattctcttcttgtaaatcaagtgaaagtgcttataagaaagcatatgaaaaggcaaaacagcaggaattggccgagccgcaaacaactgcccctgctgaagaggtggctccagtggttaccgctccagtagaagtaaaggtggtggaaagtgcacctgccggcatgcgtcaggaaaaggtgactgtggtatcaggtggtaccagcttgaaaacctttagtgtagtttgcggagcttatagcgtgaaagctaatgcggaaggtgtgaagcaggcattggtgaatgaaggctatactgcaatggtggtttacaatgcagaaagaaacctgtatcgtgtagttatcggtacattcgatgacagagcatccgccgagaatctgcgcgactctttcaaagctaaacatccttcgaatgatgacttccagaaggcatggttgctgtatagcgtcaattaatagaattctttttggtaattcataacagaaaggaatgtatgtttcctttcaagatgaggcagtaactgcgaagttactgcctttttcatgatatgccgaaagaatgtgaaggctggcgctgtcgcgtgtttggtttggcaaaacaaagtgtttcctttaacagaacagtttgtttcattaaagagaacactttgtttctcttaacagaacatctcgttctatcgcataaaaacaaaatgtttttatatactgaaacaacttgtttttaaaggttgaaacaaagtgttcagtactgtgaactaacggactaattgagaaaagacccagataaactcatgttgtcacagtctctttagttcctcttccttcgtgaatatttcactctatttttctctgctccggattgattttcctgattgtgaaaagtgcttataatattctctctttcgtttaaaagaagttataaaacaagagatggaaacttttagacctgaaaaagtttttaattttgtgccttatctttgagaagaatatagtatggaacgacgatatatactgaatgcgattgatgccgctttgcaggctggcgagaaaattctttccatttacgatgatccggcatcggattttcaggtagaaaaaaaagcggataattctcctcttactattgccgaccgtaaggctcatgaaactatctgccgttttttggctgatacacctttccctctgctaagcgaggaaggcaaacatttgcctttttcggaacgacggagttgggaaactttatggattgtagaccctttggacggtacgaaggagttcatcaagaggaacggtgagttcacagtgaatatagctttggtgcatcactcagtaccggtaatgggagtcatttatgtgccggtaaaaaaggagctctattttggagtgcatgattcgggtgcttataagctatccggtattactgcacgtgatggaatgtcgtgggatgaactgcttgtgaaagctgtccggctgccggaaacaagcgtgcacgaacggtttgtaattgtggcttcccgttcgcatctgacgcccgagacagaagattatatcgagaaaatgaaatgcagccatgcggaagttgagcttatatcaagtggaagttccatcaagatttgtctggtagctgaaggcaaggctgatgtatatcctcgttttgcccctacgatggaatgggatacggcggctgggcatgctattgcacgtgctgccggaatggaaatttatcaggcggggaaggaagaacctttgcaatataataaggaggatttgctgaatccgtggtttatcgtagaacccaagcataccgaaataaaataacgactttatgacatttgagatattgtttgtgctgctggcattgttgggcatggtgattgccttggttctggataaaatgcgtccgggcatggtgctcttttctgtcgtagtattgttcttgtgtgcaggtatcctcactcctaaggagatgctggaagggttcagtaataaggggatgatgactgttgccatgctgtttttggtcagtgaaggcatcaggcagtcgggtgctttggggcaagtaatcaagaagctgcttccccaaggtaagactacggtctttaaagcgcagttccgtatgttgcccaccattgcttttatttcagcttttctaaacaatactccggtggttgttatctttgctcccattatcaagcgttgggccgaatctgtaaaattgcctgctaccaagttccttatacccctttcttatgtgacgatacttggcggaatctgcaccctgatagggacgtcgaccaatctggtggtgcatggtatgatattggaagccggatatgaaggctttactatgttcgagttgggtaaagtgggcattttcgtcgcgattgcaggcatcctttatctgttcgctttttcctcaaggcttttgccggatgttcgtacggatgcggtaaagctggatgaggaaccggaggagcatggagatttacatcgggtggaagctgtactcggcgcccgttttcccggtatcaacaagaaacttggtgattttaacttcaagcggcattatggggccgaagtgaaggagattaagcgtagcggtcagagcattgtcggaaatctggaaaatgaatatctccgcgaaggggatacgctggtggtgatggctgatgactcttttgtaaagacctggggggaatcttcggtgttcgtgttgctggccaatggcaaggatacggaaccggtgcccggaaagggaaagcgctggtttgccttggttttgctgatattgatgatagtgggtgcaacggttggtgaacttccggttgtcaaggaagcttttccggaaatcaagttggatatgtttttcttcgtttccattactactatcattatggcctggacaaagatatttccggcccgcaagtataccaaatatatatcttgggatattctgataacgattgcttgtgcttttgctatcagcaaggcgatggtgaattccggagtggcagatgctgtggcgcgtttcattataggcatgagccatcattatggcccccacgtgttgctggctgctgtgtttatcataacgaacttgtttacagaactgattacgaacaatgcggccgcggcactcgctttcccgttggcactttccatctcttcacagatgggagtcagtccgatgcctttcttcgttgtaatttgtatggcggcttctgccagcttctccactcctatagggtatcagactaatttgattgtacaaggtatcggtaactataagttcacggattttgtacgcatcgggttacctttgaatatcattactttcctgatatccattttcttgattcctttaatttggccattttaaaaaaagaagaaataataacatatggaagaaaacaaccacatatatccgatatttgacaaaatgctgatgcggaaagacaaagaagacttgttgaagcagcacagcgtgatggtttggtttaccggtttgagcggctccggcaaaagtacgatagccattgccttggagcgcgaacttcataaaagaggattgctttgccgtatcctggatggtgacaacatccgcagtggcatcaacaataacctcggttttacggaggccgaccgtgtggagaatatccggcgtatagccgaagtttccaaactctttcttgatacgggtgttataacaatcgcggcttttatcagtcctaataacgatattcgtgaaatggcggctgatattatcggacaagacgattttctggaagtttatgtcagtaccccgcttgaagagtgtgaacgccgtgacgtgaagggactttatgccaaggcacgtaagggagaaatcaagaattttacaggtatttccgcgccttttgaggaaccggctcatccggctctgacgttggatacctctgttctcagcctggaagaatcggtcaataaactgttggaactcattttaccaagaattcagaagaaataagatataatgaaagaagaatataaattgagccatttgaaggaactcgaagcagagtccattcatattatccgtgaagtggcagcggagtttgaaaatccggtgatgctgtatagtatcggcaaggattcttcggttatggtgcgcttggccgaaaaggcgtttgctcccggcaaagtgccgttcccgttgatgcacatcgattccaagtggaagtttaaggagatgatacagttccgtgacgagtatgccaagaagtatggttggaacctgatagtggaaagcaatatggaagctttcaatgcaggtgtcgggccttttacgcatggcagcaaggtgcatacggacttgatgaaaacgcaggctttgctccacgcattggataagtataagtttgatgcggcattcggtggtgctcgtcgcgacgaggagaagtcacgtgccaaagagcgtattttctctttccgcgacaagttccatcaatgggaccccaaaaatcagcgtcccgaattgtgggatatttataatgcccgggtacataaaggagagagtatccgcgtatttccgttaagtaattggacggagctggacatctggcaatatatacgtttggaaaacatccctattgtgccgttgtattttgccaaggaacgtccttgtgtggagattgacggaaatctgataatggcggatgacgaccgcttgccggaacagtaccgcgaccagataaagatgcgtatggtgcgtttccgtacgctgggttgctggccgttgaccggtgctgtggaaagcgatgccgataccatcgagaagattgtcgaggaaatgatgaccaccaccaagagtgaacggacgacccgtgtcattgacttcgaccaagacgcaagcatggagcagaagaagcgcgagggatacttctaaaggaattaaaaattaagaattaaaaattaaatcattaaggatgaacgattctacacttgatataaaggcttttcttgataaggatgagcagaaagacttgttgcgcttactgactgccggttctgtggatgacggaaaatccacattgataggccgtctgttgttcgacagcaagaaactatatgaggaccagctggacgcactggaacgcgacagcaagcgcatgggaaatgccggcgaccacattgactacgcccttttgctggacggcttgaaggcggagcgcgaacaaggcatcaccatcgacgtggcataccgctacttctcgaccaacaatcgtaagtttatcattgccgatactccgggacacgagcagtacacacgcaacatgattaccgggggctctacagctaacttggcaattattctggtggatgcgcgtatgggtgtcattacgcagacgcgccggcatactttcctggtgtcgttgcttggcatcaagcatgtggtgcttgctgtcaataagatggacttggtggatttctccgaagaacgttttaatgagatagtcgatgaatatcggaagtttatagctccattgggcattcctgacgtaaactgcattccgctgtcagctttggatggcgacaatgtggtggagaaatcggaacgtactccttggtatgagggtatttcacttcttgactttctggagacggtacatattgacaacgaccataatttgaaggattttcgtttcccgattcaatacgtcttgcgccccaatctcgatttccgtggtttttgcggtaaggtggcttcgggtattattcgtaagggagatgaagtgatggcattgccttccggtaagaagtcgcatatcaagagtatagttacatacgacggcgaattggattacgcctttccgccccagtccgtcaccctgactctggaagacgagatagatgtgtcgagaggggaaatgctggtacatccggataacctgcccgtcatggaccgcaattttgaaacgatgctggtttggatggatgaagagccgatggatatcaacaaatcattcttcatcaaacagaccaccaatataagccgtactcgcatcgacagtatcaagtataaggtggatgtcaatacgatggagcatctttccattgacaatggaaagttgagcaaggaaacattgccgatgcagctcaatcagattgcgcgtgtggtgctgaccactgccaaagagcttttctttgacccttatcggcagaataaggctaccggttcgttcatcctgatagacccgataaccaacaataccagtgctgtaggtatgattatcgatagggtggaggataaggagatgcacttgtccgaagacctgcctatactgaatttgcctaagctgggtatagctcccgaacattacgaagccatagaaaaggctgtgaaggagttggagcgccaaggcattgcagtggttgtggaaaaagaatgaacagctttttgatagagtgggagagaaactgtaatatattaatatatagactataatgggactattagaattcaacaagcttcctataaacacattggtaggcgcagattggaaaacattcaaggatataacgggcggtcgtgacatcggtgctgcctacaaaggcaagtatcggctgacaaaagctgtctgccgcctgctgtccactttggctcctctgcaggacagacgttatgaaaagctcctggcagataagcccctggagcatgatccggtattcattttgggacattggcgtagcgggactacgtttgtgcataatgttttctcctgcgacaagcatttcggctacaacacgacataccagactgtatttccgcatctcatgatgtgggggcagcctttcttcaagaagaacatgagttggctgatgccggacaaacgccccacggacaatatggagcttgccgtcgaccttccgcaagaagaggagtttgctttggcaaatatgatgccctacacctattataatttctggttcctgcccgaatatcagcaagagtatgccgataaatatctgctgtttgatgatattacagagaaagaactgaaagtgtttgaggagactttcgtcaaattgataaaaatctctctttggaatacgaagggaactcagtttcttagtaagaatccgcctcatacgggacgtgtgaaagagcttgtcaagatgttccccaatgctaagtttatctatctgatgcgtaatccttatactgttttcgaaagcacacgtagtttctttactaacaccattcagccgttgaagttgcaggatatcagtaatgaggagcttgagaagaatattttgtccatttatgccaaactgtatcataagtacgaagcggacaagacatgcattcctaaaggaaacttgatagaggtgaagtttgaggacttcgaagcggatgcaatgggaatgactgaacatatctacaaggctttgtccattccgggctttgcagaggcacgtgctgatattgaaaagtatgtaggcggaaagaaaggatataagaagaataaatacaagtatgatgagcgtacagtgcagttggttcaggataactggaattttgcgctggaacagtggaagtacgatttataatgattgtcaattattaatgagagaaatgattcaaaagaaagttcgtatattgggaatgctgtctgccatgctctgttgcggagcagtttctgcacagcagcacgaggtagagatgattcctttcggaaatatggatcaatggattgaccgccaaatcaaggaatccggtattattggcggtgccacgaagaatgtatatgccatcgggcctactgctactgtcaccgagaccaaggcatacaagaatatgggaggttcgccgtgggcgacatccaatgtgatggcccgggtagccggtatcacgaaaaccaatacttctgttttcccggaaaagcgaggggatggtttctgtgcccgtatggacacccgtatggagagtgtgaaggtttttggaatagtggatatcacggtgctggctgccggctccatgtttctgggtgaggtgcacgaacctatcaaggggaccaagaatccgcagaaaatgctgaattccggcataccgtttacaaagaaacctatcgccatacagtttgattataaagtaaagatgtccgaccgcgagaagcgtatccgtgcaacgggctttagccgtatcacagatgttgagggaaaggacttcccggaagtgaatctgtttctgcaaaagcgttgggaagatgagaaggggaatatctatgccaagcgtgtaggaacgatggtcgtacgatattatactactaccgattggcataataatgccacttattccatcatgtacggtgatatcaccggtgaccctgcatacaaggcccacatgatgcgtcttcaggttgaagaacgctatacagttaacagtaaaggagagagtgtgcctattaaggaggttgcctgggggacgaaggacgatgtgcccactcatttgctgttgcaattcacctctagtcatggtggtgcttatataggttctcctggcaattcgctatggattgacaatgtaaaattggtctattagaataaaagcagttaaagttgatgtcatactttagctgctttttttatggagtcaacgagactttgacttacttcttatttcaaatgaattttgtatgtcagccctcccgtgaaatatttcatcctctgcatttcgacctgcacatgcagatgcttgaacagcagataagtggctcccaaagcaaagtccttggagtcgtactccgctatcaccctcaactgcggatggaaggagggattgtaggtgacacccagtgcaaagccattcagtttgtactccttgcggttgttgtaaaggtaggaaagatggacaccgatctcctccttacccacaacgggtatatgcttggaggcggcaatatagaaacggctgtaatagccgttaccttccgtggtgcctacctggccgccgccggaagaagtgaacgggtcggacgtccccagcacgacagccggcatgtatttccagaactgcccctccttcaacacacgcagacgggcggaaaagtagcggtcctggttcgtgaatccgctgtacccgtatggcttcaatcccaacgcctccgccttgaagagcgtacacgtgtaggccacttccagaaaggggaagatggtgacgttcaggaagtagttgtaggtatgatagtaccaggtgggcggtgtgagctccttgttcaggaagttgccgccgaccatgaaagtcttgtcgcgctgcatctccgcagagggcgcatgcaacagcccggttgtaccatacgtcaactgggaaaaggccgaaagggaaaggctgcaaaacagaacaataaagaatagcttaaacttcatcatcacatataaattcagtcgctgataaaaaatgggttgctttataacatacatcggacatagtaccaaaaaaaggcgtctgagtcccagacgccttcatttttagagtctatttgtcacttggagtgtattattccaggataactacgcggttcaggaagttcttaccgaacatgttttcagtaccaccgaatcctacgagttcaagctggtccttgtcaacaccctgagcaatcaaagcgtcgtaaacaacctgggcacgcttttcggacagcttctggttccaagaagcgctaccggtagccttgtctgcataacctgcaactttgtacttcttgtccggattagccttcagaatcttggcagccagttcgatgttaaccttgccatagtcgtccagacgggcgctgccaatcttgaagaagatggcacgcggaccggcaacttcaacttccttggtcacttccttaacttcaggtttagcgttggccagtgcattcttgcagttagccaggtcagcctgagcctgagccagttcacttctatatctgttgatttccgcattgactgcgtcttcgtcaatcttagaaaccggaacgaacttcttaccgccgaagatgtagctaacacctgcggtcagcatacctgtaccttcagccttgcgatggctgctgatattaccgaaaatggacggagcgatggcaccgcgagcttctacgtcaatggtccacttggtgttgatattgaacttcaagcccaaaccggcagaagcgcctacacgtgctctagccttttcatctccatcaggaatcattgttccatcgttttgaatcagcacatttgctgactttgcaacagttacttgaggacccaagaatccataaacttcaaagaaacggttaggattaacgcctgcgaacaatgtagaaagattgatcattgcatcaatgttaccaccaaagtacgtcttattgtgttcccaatatgagttatccagacacaagtgctgagtaacgccattgaactgggcacgtacaccccatgtcggagtaatcaacttaccaactgatacgctgaaatgcggagccaatttattgaaaccatcattgttgatagcgtggacaccaccacctacactcacgaaaatattatcgctccatttcggagtgtagtagttcgttttttcttgtgcattcagatttgctgcacaagcgcctgctaataataaggaggctattactaatttacttttcattattcctttagtttaaaattaaaataataactaaaactattattattcagcagcaccgtcaccaccaccggcattgttaccattgccatgaccgtgaccatgaccatgttcagttgaagtaaagactggatctacaacagtcttaactaccttcttaatctttacattaggaatagtgtacagtttgccatccaccactgtagagattgtattatcagaagtttcgtattctgtagtagtcttcaaagttacaatagtataagcaggaactgttactttcttagtataagttacatctgtgatacccgggctatatgatttaaccaatgctttcaacaccttttttacttcatcatcagacaatcctctagttataggcatagcatcaatcgatgcatttacagcagcaatattagtaacttcttgtccaacttttgctgtatatggcagatccatttctttttctttactacttgtattttcaccacctttttgttctcctccaacttcactaggggtaatagtttcctcatcctgatcaacaacaacatcttcagcagcattcagttcttgttgcaagaaaatacttaccggaatcaaagcaaattgtcctttattcaaagcaggaacagtagcttggccttctccagacagatactcgtcttttgtagctgcaaaagttcttgttgcagcagcaatctttccatctgaaccagcttcaattacgaaaggattgctagtaatagcagcaccattttctgtaatgcttgcaccatttatgatagaaccatctgataaatcatatacagtaatagcaacagtagcacttgcagggtccaattctacaggcgcaacattgaattcttctttttcgcagcttgtgaacatcacacttgtcaaagccactgccgccaatgctaatttagcatttacgccacttaaaaaaattttctttttcatctcaattaattaattaaaaatttaacaattctgacttaataaaatatgggttaaaactatttctttccattatattatcacttgcttctgccttatagtccttataataatacctttcattacccgcattataagcaatgcccatgttagtagaagtattc

SEQ ID NO: 4408 - DNA, 49776 bp, Unknown
  gut microbiota DNA sequence
agtttgtaaatgtgtctacctatatcaggataagacataatgataatcaagtccattcgtatgtcccacaaggaaacggtcataactaaattcggcgattacgtcccgcatcaatccgcagaaagataaacagcaggattgtgaatccccagagagaagaacctccgtaactgaagaaaggcaacgggataccgatgacgggggtcagccccagcaccatgcctatattgatgaatagatggaacaagaatatactaagcacagaataaccatacacccggccaaagggagattgctgccgctcggccacgacaatcagccgtaaaataagaataaggaacagtaatagtacagccgtagaccctacgaatccttcctcctcacccacggtgcaaaaaatgaagtccgtatcttgctccggcacatacttcagctttgtctgcgtaccattcaagaaacctttgccggtcagccccccggagccgatggctatcttcgactggttcacgttatagccggcaccagcaaggtcctcttccataccgagcaccaccttgatacgtatctgttgatggggctccagcactttattgaagaagtagtcgctggagtagaggaaacctatcgaacccaaagcaaacagcccaatcagaaaataagataaatggcgctcgcttaaagaaagaaagacaagatacccgacaacaagtgcacaaagcccccactgcacccacaccaagttgaagggtaccacatattccgaaatcagataagccacgagcagcactcccagcgaaccgccgataatattccgtgtgggttcccagcgctttttataaacccacaccatacctccggcaaagagcagtaccatcagcagtacggcaaattctccgataggcgtcggtgtatcggcaatcatcaccgcatcaaaacggatgcccaccacaaagtaggccactgcacatatacccgagaacagtaccacgcccggcattccctcccgataaagcatcaggaaaaatgcagagtacaccaatgccgaacccgtctcccgctgtaggataatcagcaacatggggaagagaatcaggaaagccaacataagggagcttttccaattcttcatcgtaaacgagtaggcactcatatacttggcaagcgccagcgccgtggcaaacttggcaaactccgccggctgcaaactgaccggccccaggatgagccacgaccgcgaccctttcgtgtcgggcgcaatgaatatcgtgacaatcagcaacagcatcagccctatatatataaggtaggagaacatgtcatagagggaatcatccagcatcagcagcacaaaccccagcccgaaggaacatataatccagacaaactgcttgccggcacgcgtagagaagtccagaaagtcacggtcaccataatcataactcgccccacagacactgaaccagccgaatacaatcagcagcaggtaaacgacaatcgtcacccagtccaatgatttccatatgctatctctccttgtcaccaatttatttacgattttacgatttactatttactattgaagtcactcaccgttcatccctaacccctaatccttaatccctaatcatcatctctcctcatctccgtaaagtatcacccggttactgaattcttccgcccgtatctcattctcgggcgacagctttccatgcagatactggtccatcatcatggcaccgataggtacgccatacgtggcaccgaaaccaccgttctccacatagacggcaatggctatcttagggttgtccatcggggcaaagcccataaagacagaatggtccttgccgcggttctgtgccgtgcccgtctttccgcagacctccacacccggcaggatggctcccgccatgcggcaagtggcgctacccgtacttccgtctacagcggcacgcatgcctttcaccaccatttcataatattcgcggtcgatggtgggataacggggattgcgatagatgctgtccagttcattgtcttctatctccttcacgatgtgcggagtaatgaaatgcccccggttggcaatggtggcacccagattggctatctgcaacggggtggcgagaatctctccctgcccgatggagatactaatcaccgtcagaccgttccacgaaccccgatagggcttgtcgtagaactttgcattcggtatcagtccacgctgttcgccggggaggtcggtaccgagccgatagccgaagccctgcgataccatgtggtctttccatacggtaatggcattctgcggcgaaccgtattttttatcaccgaacatgcgatacaatccccaacagaaataggaattacaagaggtagcgatggcaggaatcagcgacagaggcgaaccatgtccgtgacatcccacatgaaggcctttatgattgaaaccatgcgcacaagggaaagtcggataatcttcgtggataatctcttcctgaaggaaagtcagtgcctgcgccgtcttgaaggtggagcccggcggataagctcccatgatggcacggttcaacaaaggcttccgcttgtccatctgcagcaggcggtggttctttccccgctggcgccctatcatcagatgagggtcaaaggtaggcgaggaaaccatgcacagaatctcacccgtagccggttcgatggccacaatggcaccgattttgtgttgaagcagccgttcgcccaacatctggaggtcaatgtcgatgcctagtgtcaggttcttgccgggtacggaggaacggtccaactgtccgtccatgtagtgtccctggatgcgcccgtgagcgtcacgaagcagaatctccacccccttctctccacgcagatacttttcataggatttctcgatgccttgcttgcctatatagtctccgcgaatataatagtcatcgttctcaatgtctttcttggacacttcgccgatgtctcccagcaaatggccggcagagttataggtatattggcggatagtacgccgctgaatatagaaacctggaaatttgaacagcttctcctgaaacacaccgcactcttcggcagaaagctgcgtcatgaacacctgatgggtgtatttggaataaccggggttcatccagcggttcttgacgtccttcatccgtttgtcaaactgctcacgggtaatgttcaaggcactgcaaaggtcgagtgtatccagctgcgtcacctcccgaggcacaaacgtaatatcataggcaggctggttaaacacgagcaacttaccgttacggtcgtagatagccccccgtgatggatattgtatcttgttcagaaaagcgttactgtccgcgttcttcttgtagtcatcagtcatgatttgcaggtcgaacagccggaacacgtaaataagaacgatgacaatagccgccgctccaattacatatttccgcttttccagtgtatagtctttcatcaattcctaatccttaatccctttatcctttctttcttattccctcaacagccataatgcaggtcacagtaagcagggtacttgccgcaattctcaacaacagcgtaccaatatgggcaaaagagaagaattcgagggtaagcaacaagccgtgatgtatcagcacactcacaaccagatatttcaggaaaggaagaatccccattgtacggatggccggaaccagtgtatccagcgtgtcacgaggcacgaacagccgcaggaaagtggggcgcaagaaagccagcaacaccgtagcggcagcgttcatccccggtgtgtcggaaaagacgtcgacagccagccctaaaaagaatgcccacaacatcaacgcattgcggggagtgtccgactcaaacttcagtatcaagtagatatacagaaatggagtggcatatcctgcaatatgcacattgttcaatatcagcacctgcaacagtaccaagcctatgaaccatcctattttatgcagataattaattaacaacgctaatgagttataagttacgagttacaagttattgagtgtataagttataagatataaagatgattaatccctaatccttaacccctaatccctaatttcttagtcacttctcgtctgccctcgactccaatgccttttgttcatcctgcccgttgcgggaaatgacgcgcacattgctcacctttccaaagtccgtagccagctttatcttcaacagatacgaaagcccgtcgtgcgagtcagacatgtcatccaccgtccccaccatgacaccttctggaaacacggtggaatagccgctggtcactactgtatctcccagattgaattcggcatgccggggcaaatccttcagataggcaaaacgggaattacctccctcccacttcaaataaccgaaataatcactgcccacaatcttacagctgatgcttgacttgctgttcagcaacggaatgaccaacgagtaatggggagaggtcttatacacaatacccaccacgccattggcatctacaactcccatctcaggacggataccttctgttgttccacggtctaaagtgatataattgtcagccttgttcaagctgttctttatgacattcgccttgaatatctgatactccgtaggagcaagccgttccatgctgtacaacctggcggagtccaatcctttctccttcaagacattttccagaaacgaaagccgctgctccagccacatgttgcggtcgagcaggtcttcgttggccgtcttcaagtggaaataggaagtgatgccacccgatatttcataaaccttccccgccacgccattggcagaggtgaaatacacactctgctggtaatgattaaagcgaaataataaaataaaactggcaacctctaacagaagaaagaggaaccagtaattatatttaatgagaaagtttaataaatttcgcattaccgcatcaagaatgagaagcggtcaacgttcttcaatgccacgcccgtacctttggcaacggcatgcaaggggtcttccgcaatgtggaacggtatgtttattttatcagtcagacgcttatccagtccacgaagcaatgcaccgccaccggcaagatagataccgttgtgaacgatgtcggcatacaattcgggaggcgtattttccaatgcgctcaagatggctgtctcaatcttagagatagacttctccaagcaatgcgccacttcctgatagcataccggcacttccatgggcaatgccgtgatgcggttcggaccatgaacgatatagtcttcaggagcatcctcaccgagttccgtcaaggcagcacccacattaatcttaatacgctcagccatacgctcgctgaccttcacgttgtgctggcggctcatgtattcctgaatatcggcagtcaagtcgtcaccggcaatgcggatggagttgttacttacgatacctcccaaagagataacggcaatttccgtagaaccaccacctatgtcaacaatcatgttgccttcgggagcctctacatcgataccgataccgatggcagcagccatcggctcgaaaatcaaataaacgtcgcgcccgccggcatgctcggcagagtcgcgcacggcacgcagctccacttcggtactgcccgaaggaaccccgattaccatgcggagtgacggagagaagagacggttacggttgttcaccatcttgataagtccgcgtatcatctgctcgcaggcatagaagtcggcaatcacaccgtcgcgcaacggacggatggtacgtatgttttcgtgggtcttttcgtgcatcatctttgccttgtcacccacggcaatcatcttatcggtacgacggtccaaagccaccaccgaaggctcatccaccacaatcttgccattcgtggtgatgatggtattggctgtgccaaggtccatcgctatttcttgtgtaaaggagaataatcccattaatatttacgatttaactatttacgatttacgattgatattcctcttgtttacaatttgagattcagacttacgatgtaacttcaatcgtaaatcgtaaatcgtcaaatcgtaaatccgaattagtgtttaaagtgacggaatcccgtagttaccatggcaatgccatgctcgttgcaatattcaaacgagagttcatccttgatacttccacccggctggatgacggctgttacgccttcattgccggcaatttccacgcagtcggggaaagggaagaatgcgtcacttgccattacagcgccattcaagtcgaaaccgaagtttttggctttctcgatagcctgcttcaaagcatccacacggctggtctgacctacaccacttgccaacaactgctttccttttgccagcacaatggcattcgacttactgttcttcacaatcttgtttgcaaagagcatatcctcaatttcctgtgcagtgggagccttcgtagttacagtcttcaattcttcaggagtttccaccttaaggtcgcggtcctgaaccaatacgccattcagcaaagagcggaactgcttcttaggcagagctgccggcttgcggaccaggataatacggttcttcttctgaccgaggatttccaacgcatccacatcataatcgggagcgataatcacctcaaagaaaattttattgatttcttcggcagcagccttgtcaatcacggcattagtgatgagcacaccaccaaaagcggataccgggtcaccggcaagcgcatcgttccatgcttcgagcacagtgggacgtgaagccagtccacaagcattattatgcttcaggatagcgaaagtcgtatccttgaattcgtcaatcaagtcaacggcagcattgatgtcgagcaggttgttataagagatttccttaccgtgaatctggtcgaacatagcatcaatattgccatagaaataacctttctgatgcggattctcgccatagcgtaaagtcttctggctgttggcagaacaacggaaagcggaaccttcctcgccatcgaaatagttgaagatggcagaatcatagtgtgaagacactccgaaagcctctttggcaaaccaacggcgttcttcgatggtagtagtggctccgtgttccatcagcatgtcgcggaacggctgatattgtgcttgcgaagcgatgataaccacgtcgttatagttcttggctgcggcacgaatcagagagataccgcctatgtcaatcttttcgatgatggcaggttcttcggcaccactggcaacggtagcctcaaacggatagaggtcaacaatgacgaggtctatttcggggatttcatatttttcaatctgttgcatgtcttgctccaatccgcggcggcaaagaatacctccaaaaaccttcggatgcaaagtcttcacgcgtccgcccaggatggaagggtatgtagtgaggtcttccactgccttgcagggataacccagggattctataaactgacgggttccaccggttgagaggaactctacaccttcttcatgcagtttggtaatgatttcgtccaaaccttccttatggtaaacagataccagagctgttttgattctttttgtttcagacatggatttgcgtattaaagtatgcgtatattagtatttgatgcgcaaagttacaaattttgtttattcatacatacattcatacacaataaattaggtataattaaaaaaggcggcatctgtttccagtctgccgcctttttttaagggttattttgttggtttaccaaatagatacacgtttttctaccggcaagaacatcgggtctttttctgtcacgttgaatgcctcataccaagcaccgatttgcggcaatgcaccgtttacgcgccattcacccaatgagtgcacatcactcttcgtgcggttcaacacttcttcgggacggatatcattggcccatacacctgcgtatgccaggaagaaacgttgttcgggagtaagaccatccagcaccggcagcggattggcagccgtagctttcttgaatgcctgataagaaacctgcagaccaccgtggtcggcaatattctcacccaatgtcatgcgtccgttggcatatacgcccggagcaacctcgatgctatcgaagaagttcaccatcacctgagcacgctcgtcaaagttcttggcatcttcagcagtccaccagtctttcaggttaccgtccttgtcgtactggcgaccctggtcgtcgaatccgtgagtcatctcatgaccgattaccacaccgatggcaccatagttgaaggcatcatccgcattcatatcgaagaaaggatattgcaggataccggcggggaaacagatttcgttcgtagtcgggttatagtaagcgttgacggtctgcggagtcatcagccattcgtccttatccaccggcttgccggccttggctatcatttcggcatggctccactcgttggcacgttccatgtttgcccagtaagagtcgtttttgatttccagtgtggagtagtctttccaagtgtcgggataaccaatcttcacatggaaggtagccagtttctccagagctttcaccttagtggaatcacccatccaagcaagattctggatacgttcgcccaggctttcctgcaagttcttcaccaaagtcaccatacgctccttggcagcagcagggaaatatttctccacgtacatctgacctacagcttcgcccagcgcgccgcttacagtgcttaccgctctcttccagcggggctgcatttcttgtgtaccgctcatggtgcggctgtagaagtcgaagttctgttctgccatagcatcgttcaacaagcttgcggcagaatcaatcaatttccattgcagataaaggctctgctgttcaatgggcagcgtatccagaatatcggcagcagctttcagtgaagcgggctggcctacgatgatttccttcacatccttcaagcccatggcagacaaataagcatcccaatcgaaagtaggataattcttcttcaactcttccatgctcatcttgttataattggcatgcgggtcacgcaactccgtacgagagcggaaagccttggcaagacgtgtttccacatccatcaccacctccatacctttcttggcagtagcctcgtcgaaaccagccaactgatacatcttctgtacatgtgtacggaaagcatcacgaattttggcagtagcctcatcattctccagatagtattcacgttcgcccatgctcagcccggtctgataggtctgtacagcattcatgctactgttcatttcgtcagcgccaacatacagcacgttgtaggcgataatacccttcttctgcatatcgcccagcaaggcataaagctccttcttgtccttcaaagcagccagctggtcgagttcagccttgatgggggctacaccgtccttgttcagcttcacgctgtccattacgattttgtacaagtcaccgattttttgtgccacgctgccgacttcgtgctgggtggcggcaagctcttcaatcagtccttgaatctgcttgcggttgttttctgcaaggatagtaaaagaaccgtactgtgagtattcagcaggaatcggattgttcttcatccaaccgccacatgcgtattggtaaaagtcagttccgggtagagccgttgtgtcaagattggcgagctggatgcctgctgtaagttcagcctgctgcttgccggtgttgcaggaagccgtcatcagacagaatgctgcaatgggtaacaaatgatttgctttcataaacatataaaatataatagttagtgattctccaactctacagtagccgcgtcccactcttccatcacgcggtcaagctgctctttcagtttttggtgctgctcataaagcgacatgtccgaagcaccttccggtgtggccatcctggcctcaagaatggcaatggcagcctccgtctgctctatctccgcttcacaatcggcaacgcgacgttccagtttcttgagcttcttattaagctccttctgctcctcataagagagtttggctgccgagggttgaaccggttctgcaccagcatttcccgatgccgccttaccggcagtgggcgaagcggaaagtgaaggggatttctgtaactcattcaggctctctatctgcttcttttgcaggaaatcataaattcctcccagatgttccttcaccagtccgccaccaaactcgtacactttagtcgcaagtccgtccagaaaatcacggtcatggctgactattatcaccgttccgtcaaaatcgcggatagcctccttcaacacatctttggaacgcatgtcaagatgattcgtaggttcgtcgagaatcaggaaattcaccggctccaacagcagttttatcatggcaagccgggtacgctctccaccgctgagcaccttcacctttttatccgaagcctcaccgccgaacatgaaagcacctagaatatcacggattttgaggcggatatcccctacggccacgcggtcaatcgtatcgaatacagtcaggctctcatccaaaagctgtgcctggttctgggcaaaatatccaatctgcacattatgtcccagtgtaagcttaccggtataatccgtaatctcacccataatacactttacaagcgtagacttaccttcgccgttcttaccgacaaaagcaaccttctctcctcggttgatagtcaaattcacatcgtggaaaacaacgtgcccaccgtaggatttctccatatcctcgcagataacgggataattaccgctacggctactgcaaacaaacttcaggcgcaaagaggagttgtcttcctcatccacttcgatgcgctctatcttttcgagctgcttgatgcggctctgcacttgcacagccttggtagctttgtaccggaaacgttcgatgaaatcttccgtatcttgtatctgcttctgctgattctcgtaagcacgtagttgctgctcccggcgctccttgcgaagcaccacgaactcatcgtatttcactttatagtcgtaaatgcgtccacaagttatttcgatggtacgcgtagtgacattgttcaaaaaggcgcggtcgtggctgacaagcaccaccgcattggcacgggtggaaaggaagttctccaaccactggatactctcgatgtcaaggtggttggtaggctcgtcgagcagcaacacatccggacggcgaagcaacagcttggcaagctctatacgcatacgccaaccaccggaaaactcgcttgtagagcggtcaaagtcctcgcggctgaagcccagcccttggagcgtgcgctctatttcggcacggtagttggtgccgcccatcatcagaaaacgttcgttttcgtgagtgaagcggtcaatcagtttctggtaatcctcgctgtcgtaatcggtacgttcggcaagttgccgattcatgcgttcgatgcccgcctgcatctcaaaaatatgctcgaaggcaagttcagcctcctgcattacggtgcgcttgtcactgagtatcatcacttggggcaaatacccgatagtacattcgcgaggaacggcaacaatgccggcagtgggctgctgaatgccagccaatatcttgagcatggtggacttaccggcaccattcttgccgacaagagctatacggtctttcttattgataacataagagacgtcttcgaacagaggagtggcattaaattctaccttcagtccttctacagatatcatagtgtcaatgaatttagcgttcaagactgcaaaggtagcgattttcaacgttatacaatatcatacgctcacataattacatcaaatatccaagaaagagaacactactcccgcatttcctgcggaaggacaattgcaaagcggctccccttgccaagagttgaagccacttctatttttccatgaaacctttcaacgatagtcctgcaaatggccaatcccaatcccgtgccctgcacaaaagcatctcccttatagaaacgttcaaaaatgtgcgccagaacttcttccgacatgccagttcccgtatcttccacaaagacttccaatgtagcaaagtccttcagcctataccctatggttatgcgtccttcagcagtgaacttcaccgcattattgataagattgttgacaacttgccccaaacgcgtaggatctgtatagataactgccgcccggtccggaaggtctagcagtaactccactcctttccgaagattcatcttctgcgcactgtaaatgctttccaatatgccatttaaagaaaccttctcaaaatggaattccatcgtgttcgattctatcttggacaaatccagaatatctgaaatcaacaccattaacaactggctgttcttttcaatcaaagacgtaaattccataatctcctgccgcgacaagtcggcatccccacaagccagcagtgtagagaagcccacaatggcatttagtggcgtacgtatctcgtggctcatattagcaagaaatacgctcttcaactcatcgctacgttgcgctttctgcaaagcctcgttcaatttattctccgtatccttgtatttctgcgtactcatgcaaataccgatgatacggaacggcaaatccgtcaattgccccacataggtagattgcgcctcaaaccactcccacttgccgtctcccctccgtagacggtattccactgggcgttcgtacaaattaccatgcaactgtaaagccaaagcatcaaacactcccttccggtcgtccggatgaatcagaaatgcgaattcctcaggcgtcagcgtatagtcacgcgtaggaatccccaaatattcaaaataacgcggttctataatcatcagattatgttccatgtcgaaagaccattgaaatatctgggtgcggctcagcgcaatattcagcaaatgcttctgtgtccgttcttccaacacattcctgaaatagagtacaatcctcaccaattgtccatcttcatgaattcccaccatagcaccttgtatcagaaaactgataccactcttcaattcacgtataaagcaattgatatctaagggaataatccgcacatccctctcccgaagttgcagcaaaaggtcttctaacacattctttttatcacataccacttccaataagtcagtgatacgccgccctatcacatactcattcaaatggagttcattcatcacctgctgattcagacgccagatacaatcttccaaatcaatcataataatgctgacgggccatgagttgaacaactgctcggagatggcatttattatacgtacttcttgaggaacattcggattcatcagaattgttttatcatacaaggagcaaagttcgggctaaaatgcttatgccacaaacaaacccttataaatcaatattccgttttagcatgtatatattctattattcacaactttaccttatttaacagagacaaattgagcgtaatattgattttaactgttatctctgtcatttatacattattatcccccatttttgtgtcttaaaatctccaacatgaatatatccgaattcaatataaatgccgagttcattgcctgcaatcatatcacaaccaatgaactgaatccgctagtggaaaagccataccacaccaaggccagtatcttcgctctatgcaccaaaggagttctgaaaaccatcataaaccatactcaattcagggttgaagctaacaccctcctagttattcctcccgagaccttcgtacaattgctacacacgtcagacgatgctgaaatatatgtcgtcatattttcccaacaacttatccagagttcaggggccggcaaggtcatgatggataagtttcacattataggcaaacactatatttttcctctatcgaaaacggacttccagctttatgccgagttcatgacctatttgtcacacctctaccaaagaacagaaagcccctcaagtctagtttcattgcaaactctactgacctatctgttacaaggtatatccgaactctgtccggaacgccctagaataaaagagactccgggcagcaggcatttcaaccaataccgcatttttatccgattggtacacacagactatgtccgggagcatcaagtgtcctattatgcattgaaaatgaatatgagaccggcagctctttgccgccttgtcaaaaaggaatcaggacatacagccatggaaatcatcaacaatactatcatcatggatgccaaagcacaactttgtaccgccaacactccgataaaggatatagccgtgagtctaggttttaataatgcggccttcttcaacaaattctttaaacgtcatacgggaatacctcctcagaagttccgcacatcctcaaaacaataaaatccactcaaaacacaaaatgcggatattctgccatgagaatacccgcattcctcaataagagaagtctgccatcaatctaccttcttagcaataaaaaacacataaccgtagaattccttatatttgccgtatagttcatcctcaatcatttggagtgagctgaactcttcggcaattttattaccggcatatttcttacggaaaatctcctgggccgcaacctttgaagcaaagtaatgctctgtccagcaattctccggcagaatgaatgtagcaacggggagataacccgccttgtacaacttggtcacctgattgggaagtgtatccatttcagagtaagcgtccatccagaagtcattgatttccgcagggcgttcgtccgtaaaccatgaactctcggagacggcaatataccctcccggtttcagatacttacgccactccttcaagccacgttcaaagccaatgttatagatagcaccttcacaccaaatcatatccagctcctcctcaccgaaaggaagggcatccattgaaccgacaattccttttactctgtcctgcaagcctaactgccttgcattacggttgaagatatcaataaagccgggaaaaaggtcaattcctgtaatccgccccggcacatggccagctactaccattgtctggccacccgttccacagccgatatcggcaataaaggattcatcggtaagaccgtctacaaagctcaatgccttcaacgtcgcttcaggactgccagggccttgtcgttccatattggagaaaaagtcacagattaaattaagttcgaaatcgtggatagttttattttcgttactcattttcttactatattttgcatatacggaaagtatcacaataccttcagcataatatgcggattaaacttgaattataacaataaaaaaacactctcgaaagaagttatccgagagtaaacgaaggggggacaatctgtgcagggaacacagattgtttacaaaaccaaatccgatttaaatgtctttgtcatactgcaaagatacgcaatattttatttaatcaaagattttacggttaataaagattttcccttgcaccgggcgcatgctgaagaaccgcacctaccacctggcaagtatccagttccttacagtcgccacaagtattgaaacctttttcgtacacacatttgcggatagcacaataatcgctgcaataggcaaacttcaccccgtctgcacggcaccccatacaatggatggtttccggcgtaatttctggcgtattgttcagcacactccactctttggcagttttctctctcagctcatcgtcattattgacagtggctatacgggcggcgcaattttcgcaatccaacccgcaacatgcaattaattgtttcatcacttggttataacgatttatgtttgaggatataatgccctttttcccgcacatcgattcagtaagcccaaaactcaccccataccttggaacagacactcatttaccgacagtcctcagcgctttcttaacgatatacttggtctctttcgtttcactttcccaacgcctgcaaagcttccttacaaatccggattgcgtcttacttgcatcatttaaccaattccctacgctgttccggacatacttggagtaatctgatttcaaaggttccaatatcggtgagcccaatgcagggttctgttccaacatttcagtatgcttgcaccagacacctcgtgaacagaaaacagaagaacaaatatagctctggcaaacgccttccccatatttgtccttttgttcttttacccaaataaattaatgcgaatcaagttatccttccgtcttactttagaacagcttcgcaggatactcgcccgcatccaccaaagcctgaatcttgtcgactacactctgacggtcttcgggataagtcacaccgaaccacttgctggttgtatcgagcacttcgcaggtagcagtgccattgttaatcagcttatccaccatcagcgggatgaagaattcgcttttcagattctccatattcttcgggtcgctcaggaagctcttgaaaaactctgcactgtaagcaaagtaatcgggagtaaagccccagaagttcatgctgaccggagtcgtctcgggagtggcagtccattcaccgttatcatcgatgtacttcacctcgccgtccatacgctgaatcttggtacgctctactacagaagtcaacaagttgtttgcatccgttccgcacaaaccacgggatacggtaccgctttcgctcaatgtattaccgatgcggaagcctaccatggaatatacatttttggaaccttcgggaagggctgcaagaaatttgcccattacctggaaggaatcacgaccgtagaaatcgtcgcagttgataacagcaaacggttcctttattacatcggcacccatcattacagcatggttggttccccaaggtttggtacggccttcggggcaggtgaagccttcgggaaggtcatcgatggactggaataccagttcgcaggggatatggccttcgtatttggaaataatcttgtcgcggaaatcctgctcaaaatctttacgaattacgaaaacgagctttccaaaaccggcattgatggcatcgtaaatagaataatccatgatagtttcgccattcgggcctagtccgtccaattgtttcaagccaccataacggctgcccatgccggctgccaataagaataaagttggtttcatatttagttattatttaaaaaggttagtatatcacagttgataacggctgcaaatgtacaaaaatttatggctgacagaagggagttttagttcattctttaccactatccgttcaaaaaggtacatttagaacggataaccgatggcaaaatgcaacgccatgctgtccttgaacttgggaatattataataccccgacttcccggtatcatacggatcatgcagcccgatacccaagtccagacgaaaaacaagaaagtccaaatcgtaacgcaagccaaatcccgtgcccaaagcaatctgtttcgggaaattcttcaacgtaaattcaccattcgggcggttttcatctttacgcatcagccatacattgccggcatccagaaacaccgctccatgcaagtcggcaatcatacggaagcgatactcgatattggcttctatgcgaatatcacccacgtggttgatataggtatatttcctatccgtctcgggaggatagccgcccggacctatactgcgtgcagaaaaggcgcgcacactgttggcaccgccgatatagaactgttccgtataaggtgcggtcgtagcgttgccatacgaccatatcacccctccggcaatacgcgaggctatcatctggttcttgtctatccggtaatggtacctgaattccgagttcagcttcaagaactgtgcaaaaggtaccccgaaaagcttctttccttcctcactgaacggcttgccgaaaatacggtagacggcagaagtcaggttaccggccgacgcaacggtggtctgccaccagatggggttacgcttgccgcgcacggaagcgttgtcataagtataggtgtactccatggcaggaatgaactggtcgcgcaaactaacgtagagtgccggattctcggcacgcaacgtatcgaaagcggcagtaggattgcgcagtacattgaatgtcaaccggaaaggagttatactgtgcctggaagtcgatttgggctggaagtcataagtgacattaccgccaaaagccaacagcttataatacttggcacggttcatctggtcggcatataaacggaaagtcgttgtagccgggaagtcatactcacggtcgcccatcctaggaaacaccacgcgcggaaagataagcgaagtggagatacccagttcataactgttcatcaaggaagaacttgccttgcccgtctgccattcgtacgaaccgttcaacttcacattccagctttcaccgccaccgaagacattgttcttcgtcaccgtaaaagcggcacccggtcccgtctggttattgctcttcatggtgacattaaaatccaactccgcatcgtagggtttatcgagcgcggcaatgaccctcacatccaatgtatcagacacaaacgccgtatcacgcggtatatactgcatctccgcataacggaaaataccgacgcttgccagacgctcctgaatacgggtctgacggtacaaactatacaaactctgcatagaacgctggcgggcaatacctgcgctgtcctgtatctgacgtttccgccgataaccttgatagttcaaccaacggtaaagcatgttgggacgtaccggaggtttgttgtagtaatgtatggtcaagcctttgtaatccatgctgtcattgggttcctgcccctgctttccaagaagatagacggatttacgccccacacggaactgcttctcggctacctttggcataccgggaacgggaatcaagcgcatctggacatgcccattgggaaccatcatggtatcggcctgataggttaggtagtcgggacggaaataataacagcccacattacgcagcagggtactgatacgggtacgctccccatccaaatcagccacattgaattgttctcccgaactgataagggaacgtcggcgtcccagctccataatgcgagtggtacgctcgctgaaaccacgataatataccgtatctataaagtaggggttacgcatgttcaccgtatattgcaactttgccttcagcgagtccttcgggtcgataaatgtcttgtagctgacgcttccgttgaaatagccataatcgcgcagcaagttaaccgccgccttctggcgtatatcgggattcaccgtagacataagcaccggagtggcggcaaatttattgaatatccactttccgaatcccttctcatacttctggaaaccattgtaaatccacagtccgaaaggaaagggatagcggatagtagagcttcccagcaacgaattgttcggtgccgtagcaagggcggcttccacctcttccatagcaatctcaccaacagacgtttcactgcggttcaatacaatcatcggcttttggccggtatagagtatctccccctcgggcaagtgcttcgtggtggagcaacctgccagaaatatcaatcctgcaatatataatatcagtcgtttcatatcacattcctactttttcatatcgctattttcagcctccggttttatctttttcttcctgaagatgaagagttcactcaatcggtccatcttccggcgcagcacaaggccgacacccgtttcggttatctcaccgtcgagtatgctttcgtagtttttattatggaatacacggacatatcgagtacccgacgcatcaagacggtattccagcgatatattgtcaatgaatgattccgcatcgttcgtggcattggccccggtggacacttttccaccgatgactatctgtacgcggtcgttgaagaaacgctgggaataacgaaaactgaagtctttctgcgtgtcacccgtttcagcagaggtacggtcttccacacctacactgatattggccccttttatacctcccgccaaggagtttatctggctctgaagcactgagttcaaggcggctcccattgacaaacctcctcctttggcaccactgttcaggtaaatacccgtggcaagcatggcaatggcctgcttgctacgctcttctgcacccattgcctgcagctcattctctactgcggcatcttcgggcgccgaaatatcgaatatcaaatcgggagcgtcaagcctgttcttgatggaaatggaaacatcgaagttcaccatgcgcgaaccgtccccgtcaccatcggccacagaagcacgcatacgttccgtagccttcagactcagcgtaggattcataatattcccccgccaatccacataactgccgggattgaactggaactccttcaacgggatgataggcagcgaatatttcatgacgccacccgaaagggtatagcgtccggtaaggctcatatccccttggggagtatactgcatattcaaatcaccgccaccttccagttcgatgtatttgctgcggtcgggactcaagtcagcacgaagacggacagcatcgtcaatatggacggacatatacatttccaatcctcccaaagacatggcaggaacctcatctgcttttaccgacgtcgtatcggtgaacgaggtaaaggtaaccagcccactgagacggtcttccaccgttaaaggggaatcggtcaacacgtaggttacgttggtattgcccagcaaattcatgtttccacgcatcgtgagcccgtcaagcggccccttcaccgtggcatgcaagtcgacgaacacctttccatacaccagactttcgcgggtacgcggtgcatccagcaacgtatagttctctgccagcagattgaggttggcagtaggacgctccatattccggaaatcaaccttaccgtcaatcgtaaacggattcttgctggtggtataaatggcaaacttatcaaatatcaactgattgtcctttatctgtaccggacggttgtcgaaccagtaacgtgctcccgcctggcgtgcatagacagacacactgtccaaaacaatatcaccatgcatttgaggcttgtccagcgaaccgtaaatataaagccctccatcaatatctccggtaaaggccaccgtttggtcagggatgaatgcattggccatcttcaatggaaaatgctcgaaacgggtggacacttccagggtatcctttccgttcttctgcgtcaagataccgtcggcggtcatcacttcttcattatcatatgtaaaataggtattcagatagtgcgtattcttgtcgcccggcaaccaggtagcccccaggccgatgtctccaaccggttggcgttcgtaggtcagtttctctacattggcttcggcagacacctgcagggaagtggcagtctgtatataatttgcttcggcagagaacaatcccgtaagccggggcatataaggaagtacctccgtaagttcatccaggcgcaatcggctcagttctacgtttatattctgcaaggaaagggtatcattcttgtcggattgcatacggaaacacagaccatcgtcgctgtccatatcaatattggcatagacgcgcatattcttatgcagataaatccagttactattgtccgcaaagtggaatttacggaaagcgataatcggctcggcaggaataaggttcagcagcacaccattaccgcgaccgtgtccttcggtcaacggacgggcattaataccgaatagaacaccggtctgcccttttccattcacataatccacagtcagttccgcatcttcattacggacttcacccgtcagtgtgctacggaacacaaactgcgggttcttaggaccgtttatgacaccaccttgcaacttcatgcgggcagtatcctgcttcactgtaaaaaatatcgtatcgagctgcaaggagtccatgcgcaatccgtgaacagctgtacgtccattgatgccgacttgcggagtaaatccgaagctcagtttgaaatcattataggaaataccctttgcagccaggaaatagctgacgggattctggttaccggcttccagatgcatgcccgctgaaggaaggacttggcgcaaagcggcatggtccaaacgccgttcatcaatctgctttgtcaggatagagacaaatttatccgactgttccatcaacttcttcaacgtgctgtgagcgcggaaacgcagattcaagtcaccggcatcaagcctcaacttgagagaatcatgacgtgcctccgctcccattgtaaaggcaaacgggtttttcaatggtcggggcaccaaacccagcttatgcagattcacctcttccacatttaaatccaaagcgccatccagatagttgcggtcaagacgcatatccgcatttccctgcatcttgagaaggacattatcgctggcaagacggacggtagcaacggatgacttgagtccggcatgcacatctacaccggaaatgtcccaatggccatactgtagtttttccaaggaggcattcaaagcggccacagtttttcgtgatgccacatccaccccttgccccttagcggacatctttgccgtaagagtatagatagagtccttgggcaggaagtgatgcacctgcaagttgttgatggcaaggtcggcatggtaggcttccgtagcaagattataggcggcgtccaaattcaaggcgccttccttctccttcagtttcagggcggcagtgcactgcgccccctccataccgagacgtgccgcaaggtgcatactgtccggcacaatgatggagccatcgggagcaatgtcagctagtccggtcaggaagttcaagttctgcgtatgcatttcgaagtccatgcttccattgcgtttcacactgtcggtcaggctccagaattctcctcccccactcaacgaaaaggctccgggcagctcagccgtaaaacgggaaatctgcatctgcttcaggtttccttccgtaccggcatgaatcaccaacggacggaacggataggcttccttgaaagcttccggcaagccaccggcaaaaagcagtacatcctgtttgccgatacgggcattgaaacgggctgtcagacggccggtggtaggtatatttatcagttcccagtaagtctgtgccgtaaggttcatctcactatgaggtgtcagcaacttcaaagaagggatacggataacggtagaatcggcaaacaaccgcccggtcagggaagttacactcaaaccggaacgctcatacatggaaaattcccggataacggcattcatatctctgccgtagtacatcacagaatcaatgcccatacgaatgtcgcgaagagcaatgtgcgaggggtcgaagcctatcgcactccccgggccaccggtatcataattgacagaagttccagtcagcaggaattttctccagccatagaactggtgtttcaggtcggcagcagcgtccgcaatctcagcatctcctatatgggctttcagccccatggagtccaatggcatctgtaaatcgaccgagacgttcttcaacttcagagtatggagtgtgactttccagtttaacgcagtgtcagtagtgtccttgggagtctcagtggtatctgcaagcatcacctgcacatgggtatcgctcaattctatattattgaggatggcatcttcttttgtaaggtctatgccatggctctcgaaaaagaaatgccccagtacccctttgatgcacataccttccattaaattggaggagttgacagcaacttgtttcaaggtaatgtcatccacctccactttccctttgagtaaaggccatgcctgtacccgtacgttcaaacttccaagattcagcaaggtatcgggatgctgcacatcaacagcactgtcggcaggctgtaccaccaatacaccgcggaccaacaaattcaaaggaaagcgaaggtcaatccgctccacggatatgtccatacccgtagcacctgatgcaattgccgtagcctgcttccgtatcaaattctgtacgggaggcacataaagcaatatcatcaatattataaacagtataataggagtaagcaacacccacagtgctgttctcaaccattttcttctcatcggaacgtcaatctttcatcgtatttaaaagtcctacaaagtaaacaatttctttcgacatttggttcccgacagagaaaaatcacgtattcttctctgttcccccattacggaaaagctgttgcctgagtaatgacatcctctatcaaaacgagggcggcaagggcgtgttctttcaactctccggtaaaaggcactccatgagaagtttccaacagtttcagcaatgcaaccagttccgctgctccaattaaagtaaagaggggaatcattttgtgggagacagcagccatctcgtccacatcctcattctccacagccttctgcaaacgctccgcattgaggcgggtttcagccacaaaactttccagaatggactttgccgcctcggggtcatcgaccgaaaaagcagtgagcgaagagaatttataccccgggcaagccgaagtttccgaaacttccgtaacctccatccctttgtcctccatattcaattcatgtagcaattcactgacggtaaacggcttatgcaggcatccggcaaatccatgcaccgtaaattcctcacgctgcatgtcactgcgggcagtgacagcaatcaccggaacagactgtgcctgcggtatgttcgaagcacgaagcagtttcagtaaatcaaaaccattaatagcaggcatctgcacatcagtaagcagaacatcaaaggttgcagtgcgcaaggcatccagcagttcatccagttgtaaacaagagacagaatttataccactctgctgaagcatggcggcagtaagggtaagctgaatacggtcatcatcgataaggaggacattcttcagtgaagaatgaggaacggggaatgaagaattgccattcggcgtggcagcacatcccgattcttcatccttcattctccgtccttcactccttacgggatagataggaatatatatggtgaaagtgcttcccttgcctggcacactgtctacatcaatcgtgccttcaagcaactgtaccagcatacggacaatggaaagtccaagtccaaacccctctttaccctgagcacccggtaagcgggtaaactcctggaagatacgttcccggtcggcaggttccatacctttaccggtatcagcaatggcaactaccagtcgacggtcctcgtaacgggcagtcatggtaacactgccttggtccgtaaacttcacggcattggacagcaaattgttgataatctggcgcagacgcaaggggtcgcaaatataggtaccgcccagctccggggcaatgtcgcaatgaagcgccagtcctttggcagccgtaagtggttcaaaactgacgtgtatctcttcaagcaggcgggaaggatgaaaggtgacccggttgatttcggccttgttcaaatcaagacgatggaagtcgagcaaatcaacgaccagcttcagcagatgttccgatgaggttttcatattgtccagatagaaccgctgacgctcatccaccgtcagacgggaaagcaagtcggcatagcccataatagaaccgagcggggctttgaaatcatgggtaatggcaagcatcagtttttcacggacagcgagtaaatcctcggcacgacgacgggcctcttccaactcacgacggtaacggttgcttcgggttatgtcgcggccgatgataataagaaaaaaagcggaaagcaacaccgcacctacggcaatgccactgataatcttggccgaacggcgtcggaccgcttgttgatactcggcttccgtccgtgcacgcagcagagtttccgtctcgtaatctttcagcaagctgtcaatacgagcggtcagcatatggtccaagcgttgcagatagcgtttacgtcgctgtataacagtgtttacagcttttttctgctgggccacggcacgcagtttctcatgcaaagaatcggccggattatagggttcaatcaccgtatccgttgcaaattcaagagaggtctttacctggatagctgtatctttctttggggggacaaacacttcacccaaacgacggaagaaccccttcttccgaggacgtgtcacgacggtatcccgatgtgtaatgatacggtgctgcacacgctgctgggtcactaccgagtcctgctgggcaattatctgctcaatgtcactggtggataccatgctgtcattcgcctcactcagcgtgcgcagcatttttatcgtattggtatccttctcgcgtatcaaggcaagcacgctgtctgtccattgtacatcgcggtcatcagtaagaataaggttctccatttcccggtgtacgaaaaacaaggaaaaaaacaataccgccagcaacaaagtgtagcctacggcaatctttactttggagacattattcatactatcaaatcctttccctggtctgtttacggaacctcaaccacagcatcactcccgcactggtcagtccgaacgggaaagccatccagactcccgtcagcccccaaccgaaaacgaaaccgcaaaggtaccctacgggcaaagatataataaaataggatataaatgcaataatcatcatcggtttcacatccgagatgccgcgcagggcattggcaaagttaatctgcaacccatcgccgaactggtaaatcaagaacgggaagaagagagcggcaaccatgccagacacttccgcattgtccgtaaaccatccccctacctgaccgcgaagtgcaaagacgatacccagcaacaccacctccatacacaggatgatgtgaaggccggcatacgccgagcggcgcacattctgcccgtctccctgccccttgaagttgctgacacgcacggcaaccgcagcgcccatgccataatacatcatgaaggtgaactgagagatagtaagcattatctgatgcgatgctagggcaagtgtccccagccagcccaccatgacgacgctcagactgaaggaagcggtctccatacccatctgcatacccacgggccagcccagtgcattgagcttcctgaacatcggcatcgaccaccccagccgcatgaagccgagcctgtaacggataaaccggcggccgcgaagcacaatcgccgcaaagaccaccaccatcacaatgcgggagaacaaggtgctgatacccgcaccaagcagtcccatctccggaaagcccagctttccattgataagtatatagtttcctacgatgttaagcgcattccctccgagcagaatccacatggccgtcttggtatcggtgatgccgtccgtaaactgtttgaaaccgttgaacagcatgacaaagaccagtgaagcaagcaacaccagatagtaaggcttgattagaggcagcaattctccgggctgtcccagccgctccacattgaaatagagaacagccatgacaagagtcagcaacaaagccaccagcacattggcaaccaggctacaccgcaacgcctgccctgcctcggcaaagcggcggttaccgtagaagccccctacaaccggtgtcagcccgtagctgaagcccgtactgaaaataatgcaaagagtaaacagattgtttacgaaagaagcggcacccagttcctccgtgctgtgatgcccaatcatcagcgtatcggcaaaaccaagcacaatgactcccaactgccccaccacaatgggtagccccaggagaagcaatgctttatagtgctgcttatacgtatcaaataattttttcatactaaaggttttctttttggtaataaagcacaatcccgttttcatcgcggaaggtctgttgggcgaccctatgaagctgttctgccgtcacagagcggtaattgtccacttcacggtctatgtcttctgcctgtccggtcagttcaaaccaggcaagattcgtggcaacattcagataattgatgttgccgaatatctgtgtagactcaaacttgttctttactttctccaattcttgttctccaacaaacccggatttcaactcttccaactctttccggacagcagcctcggcttgctccaaagatacgcctgcagatggttttccactgatatgcagcaggccggcatcccgtgtaccggagatataggcatcgagactggaaaagaacttctgctcctgcactagcctgcgggtcaagcgactggaacgtccattgctcagaatatccgacagaatatcgaaggcataataatcggcatcctcacggctgcacatgtgataagccatgaacaaagcatccagaggaacattccgttccaccgtctgccggcgttctgccgtctgtacaacttcttgcggtaattgccttacgggcacattcctacggggaatgggagcaaaccatttttctgtcagcctaaccgtttcttcccacgaaatatttccggtaacggccagcactgcattattaggtgcataaaaacgaaaaaagaattcctttacctcgtccagcgtggcattggcaatgtgagagaggtctttcccgatagtaggccagcgataaggatgcgtttgataagccaaaggacgaagcagatgtcccacatcaccatacggctggttcaagcaacgttgtttaaattcctccatcactaccgcacgctgcacttcaagactttgctcactgaatgccagttccagcatgcggtcggactccagccagaagccgatttccacattcgattttggaaccgtcaggtagtaattggttatatcattattggtccatgcattattctccccgcctgctaattgcaaaggagcgtcataatcaggaatatgcaccgaacctccgaacatcagatgctcgaacagatgggcaaagcccgtatgctcgggatgttcgtcacgggcacccacgtcataaacaatattcaaggcaaccatctgcgtgctggtgtcctcattgtgcaccaaccgcagaccgttgtcaaatatctttttgtttatcttcataaaatggaatgacagaatctatcatcaatctatcactgtcacttttttaataaccacatcctcttcgggacggtcgttacggtcagtcttgaccttctgtattttatcaacaatatccataccttccagcacttcaccgaacacggtatatgcaccgtccaaatgtggagtaccgcccacggtagtataagccttcacctgctcgggggtaaacttgaactccggttccttggcaacctgagcctctgcctgcgcaatcaaggaatcttgcaaatccatcagaccgtcctggtcattattcttgcgcatcttgtagatttccttcatgtgtttctgcgccaacgcgttgaaagcattgttcaagcgcatctgattcatctgctgttccatccccagcaaggtagagtcattatacacttttccggtcacaatgtagaactggcagccggatgatgccttgtcagggttcacctcatcaccctggcgtgcagccgacaaagcaccttttttgtgaaaatactccggataaacaaattcggcaggaacggtataacccacgtcgcctgcccccagcatcttgcctttcggagccttcttcgattccgggtcacctgcttgtatcataaagtccttgatgacacggtggaacagcgtaccttcatacgtgccgtcttccaccagcttgataaagttatcacgatgtttcggggtttcattatacagtttcacggtgatgtcacccgcacttgtttcaatcttcagcttcgtttctttttccatatcttcctctttcttttgtcccggcttgcaagcagtcagactgcaaaccagtatagttaataatacaataagatttcttttcattttgttttttatttaatttaagtttgcaaatatactaaaatcagacaaaagcacttacctttgcctacataaaagagataaaaggctaaagcaatgacatccatattaattgtagaagatgatattacttacggcatgatgctaaaaacatggctcggcaaaaaaggtttccaagtaacctctgccagcaacattgcccgtgctcaaaaacatattgagtcggaaaccgtagacttgatattgtctgacctgcgcctgcccgacaaggatggcattgacttattgaaatggctgggcgaacacggcctgcaaataccgcttatcatcatgacaggatacgctgacatacagtcggccgtccaaaccatgaaactgggagcctgcgattacattgccaagcctgtgaacccggacgaattactgaaaaaaataggcgaagccttgaatgcatcatcctccgctttgaaacagatgatgcattcgtcccgaacagatgatgcgtttaccccaaacagaccatccgtttcacccaaacagacgatgcattccgacaagatgaaaaatcagcctctgaagggtgcagaaggctcattgtcctcctccgacttccttgagggagagagcgacgcagccaaacaactctacaattatgtgaaactggtttcacctaccaatatgtctgtactcatcaatggtgccagcggaacgggcaaagaatacgtagctcaccgcatccaccagctcagcaagcgtgccgaccagccgtttgtagccatcgattgcggttctattcccaaagaattggccgcttcggagttcttcgggcacataaagggcgcctttaccggcgcactgaccgacaaaacgggcgctttcgtcgaagccaacggcggtaccatcttcctggatgagataggcaatctgagctatgaagtgcaaatacagttgctgcgtgctttgcaagagcgcaagatacgtccggtaggttcaaacaaagagataagcgtggatgtacgtctggtatccgccaccaacgaaaatctggagcaagccatcgaaaaaggggcgttccgtgaagatttatatcaccgtatcaatgaattcaccctacgtatgccgcaactcaaagaccgccgtgaagacatcctgctctttgccaatttctttctggaccaggccaaccgcgaaatggacaagcaactgaccggctttgatgacaaggcatcccgcgccctattggaatatccctggcccggcaatctacgccaaatgaagaatatggtacgccgtgcaaccttgctggcacaaggcaaattcattactatcaacgaactgaatgaactgaaaggacccgcaccgggcatcatcggtatccctctccgcaatgaggaggcagagaagcatcaaatcatcgaagccttgcggcagacgggaaacaacaagagccgcgctgcacaactgttgggcattgaccgcaaaacgctgtacaacaagttgaagctttataacatatccgactaaagggtgtggaattattccacactcccctccacacattccacacttttccacactatgccacactttgcacagaaacatatatcactaactatcagaacattatccaacacacactctttctggcacaccatttgacctatattagacgtaagcaacaagcgctacaacaagcaagcacttagacttaacaataagatataccaacctaaaagcaaatgaattatgaaaaaattagtattagtagcagccctgtttatgtttgtttgtggcggaacgttcttggctcaagctaaggctccggtagaacagccgagtaagacaacaaccttgtctaacgacactgtggtaacggatactttgcagaaagccgagaacgtccaagacacagcaaaagtggcccaataacagtaagcacactacaacaaaaaagccgtttcctccttgtctattctgggaaacggctttttttattatcaattgttaattaaaacatcaccaatgtctttccggataaaggtcattccaccatgccggactatcctgcagccagcgggcaaaccaagccataattgaattgtgccacaattcacgttttgcataatcaagtacaaaatggttttcaccatctacggtaataaattccaccggcttacccaatatcttcagcgcattatacaattggatactttcaccgataggcacgtttgtatctaccgtgccatgcagcaacaacagaggggtattaatcttgtccgcattgaacaatgctccatgcttcgtaaacaaatcgggattattccaaggatagctatcggctgccgcaacagagttataggaatatccccaataaccctcgccccaatagctcgttacattgctgatgccagcatgcgaggcagcggcagcaaacatatccgtcttagtctgcagatacatcgtcatgaatcctccataagaggcacccaggcatccgatacgtttatcgttgacaaacggatgggctgcacagaatttcttcgtaccttcaatgatctcatcggccgtacgctcaccccatgcattgacatggcgtgcagagaactcctggccgtacccgatggcaccactgggctggataacataaaccacatagtcacgtgacgcaaacaactgtgcacagtacggggaagttataccgcgggttgtaggagtcgttcctccataatagtatacgataagcggatacttcttgttcgggtcaaaagacggcggcagacaaaccattccctttatctccgtaccgtccgaagctgtaaagttccactcttccatctgtcccagctcaatcttatcgaggatgggcttcatgggattggcaagcagggtagaaacttttttcttcgtgtcgtacgtataagctacgcccgtgctggtgtttcctccgcccacataggcagccacaaccggattgtcattggccagcgtgaaggaagtaatcacatcttcttcaagcggaagcatttcaaagccgcccgtcttcggaacataacggtagatatgcctgcaatccccatcagtcgtatcgaaatagatacatccgtccacacggttccactgcacgagagacaccgtaggattgaaatcgcgcgtgatagcctgcactttctttgtagccaaatccataatgaatgcttgggtatcaaagtcattggctatgggatgttcaccgcaattcttgccaatgcctccgaaagcagacggactgcccgtcaccagaagctgcttcccgtccggagagtaagaagcacttcccagataagcatcccaggcgaccagcgtatctgcctgcaaggtggtcaaatcaatctcgaaaagagaagagagggagaaagggcatcgagtgatgtccggcttggaagtgctgcacaacagtttcttgccatccggggaaatatcattcagatagacgttgtgactaccgtaggtcaggcgctcggaaagtcccgtcgccacatcgtatttcatgagataatagcggtcacgagaattggggatacggtcgtccggatgcaagagacgtttcaacgggccactcaccttttcgccctcgtccgtgagcatatagataagatagtcttctgtaggagaccagctgaaatatccttcgggaacattcttcagcagcacttcctcacgcatcgtggcgggatcgaacacaaccaggtcattctgctcctcgcccataaccgtataatagagcttgttgctgttgggcatccagttcatcttttcattggcattgggcaatatcacccggccggtctttacctcggtcagctcacaacgggtcctggaacgcttcacgtcgtaattgtccgaatagcgggtcagcagatacttgccgttgggcgaaagagaaaccctgctcgctcgggagccgaaattggtgttgaacaaagagaaacgtctcttcatgtccggtgccatccggcaggctacatcggcaaagtccttttccttttcaaattcgcatttcagcatcggctgcatcttgtcgtccgcgcttgaaagcaacttgatgacaatctcataatccgcttcggggtccatacgcagactgacagccgtaggacggacctgcgacaagctgtcctccgctgtctccttgacttgcttggattcaccgtttacaaacacctcaaaacgggcaggagaatatacattcagcttgcccttcatgaaacgctccgcacgcagattggtagcaaacagatagaacagattgtccttgtctgcctttgccacagttacatatccagccgtatcagcaaccatacgttcgtaccgacctccgtcgaagtcgagactgaccttcgtcttcagaagattgccggtagtaaacttgtctcccttgaagttgatactatcgccctggaggggagtgcgcaccgtaacggcaggacgcacattatactcagcaactctttcctgagcttgggcagccaatcccgcaaggagcagcaaacccgacaaaactgtgattttcttcattactgtaagattaaatcgtttcaaaaccattccataaatttccaggagggacgggagcctccacttctatcggttctttggacaccggatgcacaaaacggatataccgcgcatgcagacagatgctgccgtcgggattggagcggggcgaaccatacttcaaatctcccttgatgggacagcccatctttgccaactgacaacgtatctggtgatggcgtccggttttcaaatctatttccaacagataatagttctgcgaccgcccgatgagccggtaatgcaaaatcgctttcttgctgcccggcacctccttgtcgtatgcataactcttgttctgtttctcatttcgcaccagatagttcaccaattccccctcttcctcgcggggtaagttcttcactactgcccagtaagtcttcttcacctcgctattcttgaacatctcgttcagacgcgacagtgccttactggtcttggcaaaaacaacaagaccgctcacggggcggtccagccggtgggcgacaccgataaagacatttccaggcttgctgtacttctctttcaggtactgctttacagtttccgaaagcggtgtatcacccgttttgtctccctgaactatctcggaagcggtcttgttgactataatgatatgattgtcttcgtatacgacagtcatcggttgttaatgtttaatgattagtgattaatgattaatgactaacacccaacttctcattaaacattaatcactaatcattaatcattaaattacatattcatcccaccatctacctgaataacctgaccggatacataagaagacatatcagaagccaggaaagtagcgatatttgccacgtcttcgggtgtgccgccacgacgcaaaggaatcttcttgcaccattcagccttcacctcttcagacaaggcgtcggtcatggctgtcatgatgaagcccggagcaatggcattggcacggattccacgagaacccagctcctgagcgatagacttggccaaagcaatcataccggctttggaagcagaatagttggcctggccggcattgccgtgaacacctaccacagatgccatattgataatgctacccgccttctggcgcatcatgatgggtgtgcaggcatggataaagttaaatgccgatttcaggttgacattgataaccatatcccattgctgttcgctcatacgcatcatcagaccgtcacgtgtgataccggcattgtttaccagaatatcaatacgtccaaagtccttatggatttctgccactacattggcagtgtcttcaaagtttgctgcattggaggcataagcttttgcctttactcccaaagcttccaattcttttgccgtagcctcggcattttcatcaatcaccaagtcagtgaatgcaatatttgctccttcttgagcgaacttcaaagcgatagccttgccgatgccgcgtgcagcacctgtcacaatggctgtttttccatctaataatcccatattattttaaaattatttataaaatgtattcttacttctttcccaatgcaccaagtaccagacgggtcacgtaagtatcgcgtaccgcatcgtccagattggcccctatatggccgcggatataaggtgtttcaatacctttgacactgtaatgcacaatctcggcagtcatatccaagtcatctatctggaaaacacccttctccataccttcacgcagaacctccttgaaaagctgggtctctgtagcatcgaaacgtttgcgcactttctccactctccaaatatcccgaaagaaattggcacgaagagtaccattccgaaagacaacctcttttaccgcatccagatgagtgtaaatcatttccatcagtttctcgtccggctgaatatctttctctaccacgtgcttcatcatatccgaaagaatatccagctccgactcaacaacagccaagtagatatcttccttgctcttaaaataggtatagagcgttctcctacctttctttgaagcgagggcaatatcattcatcgtggtattttcaacacccatctttgcaaacagctgacgggcaacgtccactaatttagcttttgtcttcgatacggtcatagattaattgcacattgctttattatttgagcaaaagtaagacatttccgcatatcttacaagaaaacattcattttattaatgaacagccctaaaaaggaagaaaaaaagtaggcttattatcgttctatttatcaacatattactcattaaaatccacttaacctcaaaaatatcatgcattttatttgcatattaaataaaaagccgtacctttgcacccacaaaacaataacatcgcggagtggagcagttggtagctcgttgggctcataacccaaaggtcattcgttcgagtcggatctccgcaactacaatgaggataaaaggttttataaaccgttttatcctcatttttttaattcccatcaaggacagaaaaaaatgtttgcgcaaataatgtttgtgcaaattgcttccacacttccacctcctctccacatccctttattcatcggcattacagatgcggtggaagcaactcaaaagtgtggaagcaaaatttgcttccacaccgtttcacaaacagaaatactgacacacaagaagctaacatgaagtaacacaagttattaatttcttgtatcacatcttatttatatcgtacctgcacgaaatcaatatcctgcaaacacggtattaattccatctcctcccccttcaaatgcaatcagaacaaatgcgtacagccacacaaagccaagacttcaatactgttttcctctgtgctttattcagagaatgaaggtatttattacgtcggacataaggaatcaacagtatgcaacggccatgatgcaatcgcctaacggccatcaacaacccgcttaacagccgtcagcagatcgccgcacgaccattaggcgctgataaggcaatgagtaaaagggaacactcccctatacacaagtaaacaaagccctatatacaacggattgaaagcagcggtttcccttagaatatcctgatgaaaagcaaccccagcccgatggcaacgccagtcgaaacaagtccgggaagcatgaacgagtgattcagcacatacttgccgatacgggtagttccggtacggtcgaaattaatggccgctactacggtgggatagttgggaataaagaagtaaccgtttacggccgggaacagagcaaccagtatcataggcgaaatgcccaaagcgatgcccaaaggcatcagtgcgcgcacagtggcggcctggctataaagcagaatcgacatggcaaacaaggctatcccgaacagccacggcatttgcctcaccactccctcgatggactgggtcaactgaagcatgtttccctgaagaaaagtatctcccatccaggcaatgccgaatatggcaatcaccgcctgcatgcctgccgggaagacggaaccttgcgttgccttcatgccgtcggtgcgagtcagcagcaagatgagggcggcggcagagagcatcacgatttcgataatggcggacatgccgagtctcaccgtctcgccgtctatcacgaaggcaggacgcaaactgtcgaacgaaccaaagaacacgataaaaacagtggcaaggataaagataagcacggacaagacggcatgccgtttattgtgtatatcctttatctccaccttcttgacatcaagatagccttcggtcaacctctttctgtactccgggtcgtctgccagctccttgcccaccttcatggagaacaaggcgcccacaagtaccccgataatggtagcaggaatcgttattttcagaatatcgaacaaggtgacatcaaatcccgccagcaacccaagcagtgcgacggtggcagccgaaatgggacttgccgtaatagcctgctgcgaagcaatcaccgcaatgcccagtggcctctcgggacgaatcttggtctccgtggcaacctcggcaatcacgggaagcaccgaatatgccacatgtcccgtgccggcaacaaaagtaaacaaataggtcacaatagggctcaagatggtgacctgcgaaggattcttccgcaacaaccgttctgccagctttaccatataatccagtccgccagccgcctgcatgcaggatgcggcagaaatgacggcggctatcatcaacataacgtcaatgggaggtgatgtaggctgcaatccgaaaccaaacgtcagaattgccagacctatccctcccattacacccagtccaatgccgcccaagcgggcgcctataatgatagctaccaatacgaatgccaattgcaaggccatatactctacactttttgattcatgtgcaaagataagtcatttcgtattatggctactcacctacttctattttaactgcttgttttaactccacactcaaagaggcatcatcctttaacggtgtccagaacacccggcggcattcattcttctgcaaaagacaacgatgatagcgactgccggacagatgctccgtatcgatatggaaggaaccggtattgacatcccagtcggctatctcgtccagattcagataaaggttgcgcactgtgccgctgttgagatgcaagctctgcgcctgcgccgcaagcgcagtgacatggcaatcttccagccgggcaaggtatcgcgtgcggaaagagagcgtatcgcaacggagtccgtagaaattggcttccatatcttccacatctaccacaaccgcttgtacctccgcaggcaaccgcaattccatcccttctgaacgaacccttatccaaatgtcattctgaagatgctgttccagcttatcctccggaaagtcaaaggtgacgagcagggtatcgccaacggaagtcatcgacataaaagcctccatatcccctgcataggagaaactgccctgctgcaaagagtctccggcagttacctccaacggcacttccccgaacgagaacatacgctctgcctccacaataccttcttttttctgtttccacaccaccggaggctgtgtcagcttcaacaccctgcacgagggcagctgcaccgttttccgttctccgccgatttccataaaattatctttctgagtgacattgcggtccaccacatagaacatgagtccgcataccattgccacaccggtaaccagcattcctatcattatataagtcgttcgtttcataactgtcttcttttatttttgtttcttgataaactcctgatacatcccggacaactcctcggcagagatgcccagcgtgaaaatctgcttgaagaaataatccacttcctccttcagaaaatactctttcctcaacgaaagaatcagcttacgtgcacctaccgacacaaaatagccgataccccgcttgttgtaaatcactccttgcgtctgcaagtagtcgtacgaacgcatcaccgtattggcgttgacctctaccacagccgcatattcccgtaccgaaggaatacgttcttcctcctgatattgcccgagaagtacctcgtcgcaaatgcggtctgctatttgcaggtagatggctttgctttccttaaagttcatagttaccagcgattaatgatttcggactccttgaaacggaaataggcaagcacccagttgaaaagggcgaaaaacgaagttataaaaatcagccagtcactcgatgcttccctgttgatataaggctcggtcataaaaaaattattgggtagaatggtttccagacacaatacagctatcaggatatatgaaacgaagatgcagacaccggccgcaaaagtcttgataagtgcatttttgggccagaccgtactgcccagcaggaagaaagactgtagaaaaaagtagcagctcaggaatatacccaccacagccggtccgcttcctatcgtctcatagaaacggttcgtgttacagcagaattcccacaacggaaaggagtgaacgacatgcagctccgggtaggccagaagatagaagacgactcttgtcaagtccgccagcttgaaagctatcagaaagaccaagataaagccgcaggtagccaccagccagcgggcaaagaatttctcgaacatggtggcaggtgtcatgagcacaacggtacgactcgtcttgcttttcatcctttccatggtaaacgaggcgctaatgcatccccaaatgacaagtccccaaagaaagaatctggactcaaactcccagatagggtccatgcccacagctcccgcttccagattgtgatactgatagtatccattccagacaaagactatggccaacattccgtagaccatcaccgagcggagtatataggtcttccaattctccaccatctctttgcggcatacgttcacaaagcgatgcaaactaaaaaaggtatcgcgtatcattattcatttgttttagtgtgaaacatttccgctatcttcccaggctctgcaagtacggcgccaaacagcagttcaagattaatctccgattcctcaccttccgtattgggcagcatcaagaaattgccttgtacggagggaagcgtgtacaaggcagtcgcagccaactcccggtcgtcactctccaagaagaacagcttactgcaaatgctggcagtggattcgtccagcaatacgcggctgttgtccataatcagcacatggtccagtactttgtcaatgtcacgcacctgatgggtggaaatgacaatcgtcttgtcgtccgacatacccgaagccagaaatttgcggaactggctctttcccggaatatccagtccattggtaggctcatccatcagcagcagggaagtattggtggccagcgcaaaactcatgaagattttctttttctgccccatggacaaggctcccaaatcagcatccatatccatctcgaagaaatgtaggtacttcaccatgtcttccttgctgaaacggggatagaacttactgttcagttcaatatagctgaccaaggaaataggaggcagctcgaactcctcgggtaccagaaacatgtcctgcaacgtgacgggcaaccggcggcgcatgtcggtattatgatacatcactctcccacgtttgggagccaacaaaccgctcatcagatagagcaacgtagacttgccggctccgttcttacccaacagaccgtaaacccggccggcttccagcgaaagtgaaaaatcgctcaggacttctttccgccccttgcgataactaaatgaaatgttttctacttgtaacatacgcttggatgaattaaatatcttattgtttatgtgtattagtataatagtacaccgcaaaagtagacattcttttcaatacgacaagcgtttcaagaaaaaaaatgctcagaaaaaggaacaattctattctttggttcgaaattagcctcacacgcaagaagattaggacacttctgtatccatttaggactctatatttcctgccacttgctttacatttgcaaaggagctaaagacatgaatatgaaaaacgaagaaaagatttaccaacttaacacatacaatatagcagaatatacaagtacggactataccgacaacgatattgctatacttggagatttcaagaacttgcttttcaacaagtatttcaagttgaatgcaaacatctatgtggtctgtgtaaaaggaagactgcagataaacatcaatacccaaaaatatgctatctaccccggtgagatgctgatttgtatgcccaatatgattctgagcaattgcacaaccagttccgacttcaagggcgccatgttctgtctgtcgacccagattacacagaagtaccttcataaaagtagtgacatatggaacaaggctttctatatcagccagaatccggtagtacgcattgacaaggacagagtgcaactgttcgatttatactataaggtgatacgtgcccgaatgaaacaagcggagcagccctactacaaagaagtcatcaggtcgctgatacgcaccatgctgtatgagctgctggcagatttaaaccagttgagcacccctcccgaaagccaaatggtgaagcggagcaacattctattcaagagattcctcgacctgctggcctgcaccgaggtgaaaaaacgttctatttcctattatgcgggtaagctgtgtgttactcccaaatatctttccaccgtctgcaaaaaggtcagcggaaagacagccttcgagtggataaacgattatgtggtcgaagacatcaaatattttctgaagtattccaataagtctatcaaggagatttccgagcatcaggatttccccaacatctcctttttcgggaagtatgtgaagacacacttaggcacttcacccacggactaccgcaagcaatcactgcctccaagggggaccctgcaacaaaaaaggaggagctaagaatcactctccactcctcccgacacgacaaacaactaaaattattgctatttgatgccgtccaatgccttgtttgctgtggcattggtggggtcgatagccagaattttattccagtactctttcgaagtagcatagtcactcttcaacagatagtagtagcccagataactgtaacactctatcaatgcagagttgtacctcggttcgtttttggcaagcagtacgtccaccaccttctcgtaataaggtttcgccaatccctctgtagtttcggggtccatggcagagtgtgtgcgggcgcgccacatatctcccaaataactgtcgggagcttgttcggcaacaagtgcgaacacagagtcggcagcctgcaatgccgccatgcggtcggcagactgaacggagagagtgtccgaggacgtaccctctccgtagtacagacgccctaactggaataagttttcggacgtctttttatcttgtgccagcgagtcatagtactttttataagcagcaatggcttgggtatagtcgtttttcaattcataagcatcggcaatctcacgccacaaatccacctgactctcatccttctccaatgccttaccatattcctcaatggcctggtcatatttcttcagagcactcaacagagcaccgtgatagcggtaatccaagcatgaataatcggcattatccgaagcattgaagaaagcatcggcagccttctctgcctcgtcataacgcttgaggtcgacattgttgtacatcacaagccggttgaatgcggcatggcgggcattcttctgcaaacctttctgcgccaccgccaaggatttctcgaagtcgtggttcaggaatagtgcaaaagcatatttaaggatgtcatcttccgtagccacgggagtatcgatgaacttggcataggtgtcggcagccttgccaaaacggttggtggcgtaatacacttccgccagctccttgtctgcttccaggcaatccggagctatggccttcagctggttcagcttctctatggcctgcgaaggactggcagacttgtatgcctgcgcatatttcagatacgcatccttataattcgaatcaaaatagatggcttgctcataaagctggcatgcctttccgatatctttccgggcaaaagcgatgtcaccctcgagtacagaaactgccggagccttgttgtcggcctttcttgccatctccagataggtttccgcctctttcagctgtcctacatccagataggcacgggccacggaagtcacaagctccacatttttcttgttcttgcccttcagcagttctccggctgcgtcggaagcctgctccggattcgtctttatcagactttttactttatccacccccgcctgccattcgggcaccggcgtttgtgcggcgagcgtacctgcaaacagcatcgctcccaaacaaaatacaaatctacgtttcatgttagcattcattttagttattcatccttgacgttcaccacgcgcaccggttgggtggcggggaccaatcccgacttcaatataatccgctgtccccggtcggaagcgaggaaagaggcaaatccccacggaagtgcgctccgcggatcattcaacaaggcatagatgctgcgtgccaacggataatcaccgtaatacaaatacgcctgatagggtttgtaactgttgtccggcatggccttgtcagcagcactgacggacatcagccgcacctctttactgaaagagagccccgtactgtcattccggtcgctcagccagttcacgccgataataccgatggcatcaggcgtgcgggccacgtagtcaatcacctccctattggttttcaacgctttcaactgactggaaagcggtacacccttacagatggaatcgacagcaaaacgtacggtactggagttcttgttgtcaaacacaagactgatatcccccagacgggaagccggatagatatctttccactgcttcgcatcacccgtcaggatgcggcggatgtccttcacactaatcaatgaatccggattgccaagatgggttatcaatgccagcccgtccgtagcaatctttatctcctgcggaaaaaacttccggctattgaaggaattcatctcttcgggagtcagtctgcgactggttattgccaaccgcagactgtccttgagcaagaggttgacggcatcgacttccgtcacataacggggcacaattcctgccaaggggaacagtccttcgaacacgtcaatttcttcctgcacaataggctggaaactttcgtccgcagcaattgcaatcacaccggaggtatacgtatccgtttgtccgtccttgggcttgctttggcaggcagacagcagagtcagcagcaccagcaagcctgaaagctgaagttgtttcaccgttttcataacacacacacttattgtaatctaaacatcaccggtatcgtatatttcaccgatacggccttaccattctgcttgccgggaatccatttgggcatggacataatcacacggacagcttctttatccagataggggtctacacctctcagcactttcacatcacgcaccttgccgtcggcacctaccacaaactggcaggttacacgcccttgcgtaccgttttcctgggcaatggtcggatacttcatattcttgctgatgaactgcatcatctcggcctgaccaccggggaactggggcatctgctctaccatatcgaaaaccttttcaggttccggttcggcctgcgtcaccacttgtttcaagtcggcgatgtccttgccgtgttcctcgtcattacctttcacgtcggcaatggagatggcaactttcgtttccgtcagttctgtctggctttttatttcatcctcgtccctcacttcctcatcctttttgatgacgggagcggtaaacttaatggagcttttcaatgcaggcggcggtggggccacgggctctatccgcttcatctcttcctgcttcacttccggttcttccagctgcgaaagggtagtcacttcggtcatcacctctttctgtttgggggtagccatctttatcagcgtagggatactgaaacctatcaatgcaattacaattaccagtatcacggcaatgttgtgccgtctgggagaggtctcacgcatcttataggctccatatgctttgttcttaccactgaacacgaggtcacaccatgcttgggagcttaaatctactttagccatattctttcctttctttgggtgttacacatcattcagcaatgttctgggacaattcgcccttgctttcgtagttcttcatcaagaactcgtcggcttcggcaatatccgttatcacatacttacctatattacatatctgcatttcatcgagagcatcaatcagattcttgtacgaagacttatcggtagccttgatgatgactgtcggcgtatcctttccgctttttatctcggaaagctgtttccggtagtcatcctctgatatcttaagatccagtttctgctgcttcagtctgttcacctcgttcacagcaactctattacgttgcagaagcattgcccgcagaccatccgcctgataggtagtttccttcagtgaagtatagtccttgtagttaggttccccttcgtaataatacaacttgttgtcatcccccagcaacagcgtgatggcttgggaagccttgactttggtctgctgctcctcggtgatggtcttgtcattgctcggcatgcttatctccatggtctgaggtttgctcagtgaggtacaaagcataaagaaggtaatcagcaacatgttcatgtccaccataggtgtaaagtccaccctgacagtcattttcttctgcttgctttttccacctttcttgttgccgctttcttgtatttcagccataatgtttcctttcttgttctacttgtaactcgtagcttgtcactcttcacttgtggtcttcagagaagtaatcaggttgtaccggttctctctgaggtcctgaagtgagttcatcacattttttattacggaataaggagtattggcatctgccttgatggcaatgcgcaaatcactgttcactgcacgggcgttgcgtacccaggccttgaactgattgtcaatactgtctgtcggtatcccctcattcttcaatacagcatcttgctggtcttgcggcaagtcgaggtatttcttcatactcttcatcggcacaccaaaggtagacgccagcatgaattttttagtttcctccggagtgaaagtcactccatactcctgccccatagcttccagcacttcgcgcaagtcggactgcttgtccagactcataaatacttttccgctcggatcgaccaatatctggagtacatttgtctccggaatcttaatctcggatacagaggcgggagtcgttacttgtaccggctctttcttcacgaacgtagaagtcagcatgaagaaggtcagcagcagtacagttacgtcactcatcgccgtcatatcgatgaacgtacttttcttttttattttcgctctgcccataatcgtttcattgaaaattaaaattgagaattcattcgttgaatagataatagaagcctacgtcacagcgcagctccaactatcagcagtcaactatttatgggtagctgcaaaagtctgcacgatggagaaaccaacctcatcgaggctgtaagtcaacttgtcaatcttgtttgtataatagttgtaggagataacggccaatgcaccggtcaagataccgaaggcagtattaatcaaagcctcagaaataccttgcgacagagccatggagtcggctgaacctccggctgcaagggcggcaaatgaacggatcataccgataactgtaccgagcaatcccatcaatgtacctaaagtcgtgatggtaccaataataggaagattctgctccatcatcggcagttccagcgcagtggcttcttccaattccttctggatggcaagcagtttctggtctttggacagctctgtgtcattctccatctcggcatacttcttcaaagtggcatttaccacattggctacagaaccacgttgtgaatcgcagatttgttgtgccttcttcatatcaccttcagccaaggctgctttgatgttagctacgaatttcaccaatgaccccttaccaaaggcagcgccaatggcaatataacgttcaatactcagtgcgatgacagtcagcaaaagcgtttgaattacaggaacaatgaatccacctttatagatggtaccgaggaagttacccggcaacggatggttgttcgggtcgttgttcataaagttggagggatttcccaacacaaagtgaaaaataagcacggcgatgataaaacagattacgattacccaaccggcggatctgatgcctttaaaagaggctgcttttttttgagtagtttccatgatgaaaagtttaattgttggtatttaaatagagttttgaaaataaagcatagggatacgacttcccgcttacgaaccgacagggcgtaatcatccttgcaaccttaactaacatatatgtacactaaaggtcacctgccttcagtctcttcaagacaataaggagaaaaagggggaaatcaataagaagaaaagttggctaaatcaaaatccgccgaagcgtataaatatagtaatcactgcccgtcaatgcatagtacgggtctttatctgagtagtataatttagagcggccttgcacgagtagattctcgtggttggataacatcaaaagaatgtttctgaggaaaagattgtcttcaatcaccctgcgcaaacgctgttgatgagaagagtaagtttcggaaaccggtttgtttcccagttcgacatccgtagtccatgcgaacttggtattcgtgaacaatgaattcttcttgtcaatactattgtcggaagtagaagaacatgaagataaagaagcggaaacttcagcagttccggccattctgtcatccacctgcaccaggtcaatggctttaccgctaatgctgcaagtcaacatcagtagcatgcatatccagaatgtctttacagttgttttcatgtcgtctaatgattctacaataaataacagatgtctctcttatttgttttacagctatgttactttcttttgtaaaaagattaaattgttcactgattaaaggatttactataccttttaatacactgtaaaggtacgaagaatatatgaaatacgaaagtggaaataggatataaaatactgatttaaaagtttttaatcattcatttagcaccttaattcgggaattaatctgatgaatatatgatgaataattatatataataaggtatagtgattagcggtagaaacggaatgttagaggagaggtatataaaacgaacaaagcctccgtatccttatcagacacggaggcttcttctgaaaacggcgactacctactctcc

SEQ ID NO: 4409 - DNA, 42897 bp, Unknown
  gut microbiota DNA sequence
agaatcaagtgttactttgtatataagtgcccccatcaatatcatatcaggccttccatttttatcaatatcaccgatagcaactcctgccccttgattaatatgtcctagtccgctgacttgacgtgtaccagtagttgatggatataggcttatagaacatacttctttactctttatgtagttgtctatatatgctttgagagtttgcttttttgtggggtctgtaactaattcataaatggggataaatgattgtgaattattgtcgacatcaataaatttcggtgtggaagattttactgatgccatccatttacctatatctattgatggtgaattttctggatttaaagaaccttgcactcctacggcggggtcacctcctattgtgaaataatataaggactgctctttattagttatagctaaagattcatcatattggaattttccatccatcttgaaaaggctaaagagtgaagcgcctaacccagcgtttatactttctttttttgatgatgaggttgatttagccatataatacacttcgaattttgctcctaaatatatatcctttaacacatgagttccatactcttcaacaatttgttctggtgtatatgtagagagtctttcaataaactgttttgtgagacatgtctttaaaacattaatgtcagcttctgaaattcgatatctgctatctatatattgctgagtacagtatgcaaaagagtagtcagaattataatgagaattacctccgaatgctatatttaaagaggcgccacctatgacttttaggatgccgggggtgctcatttgtaatgaagatgacatgttggtggtaaaatcaatgacatctttccctgaagagtaacggaaccgagattcttctagtttgtagggggtaatcagtcctttttctaatagtttattagtatcaaatactattgcacgactggacttagtatctaaatatggcccagttatatcatagccgtaccctaaaatatcatatacaccatctcctgcagatcgggtatttacactttgtggaaatgacggggaattacgttcgatgatatcttcatcggcacaaccggataatataagcattacccaactcataaataggaataactttttcatggctctctatctttttaaataatgtattgtttgttgtatgattgttataatgagaaataaccatataaaagaacttcatcagactctattttaatcaaatagttaccactactgtatccttcatccaaagtgatgtcaatgtttgtgggttcattgtatgcttctgaatgaatgagtttactagttgattcattgatgagggttatggtgacgttaggtaatacctcgttgaagtcgacacatactgtgttattatataagtaggcgttggcggtttgaatgatactacgagatataggggtatctcctttactaatcggatcttttctttttgcttgggttagggcaatttctgtaaaaggattgttttctttttgtgcgtatgtcacaatattgcttaaaaagaatgtcgcaattaagatagacaatagttttttcatcattatacacttttttgattattgatgccgcaaaggtcggtttaatacggcaggataagtgtataatattgtataatttcggtgtataatggcgtataatattgtataattgttgtacttgctaatgattgttatgattggctagatgattggagattcttttttaaagcttccttaagagatatctctttgtgtgcaaagcccattttgttttctaatatgcggtctgcctttttgtaaatagtatcccgttcgcagctcaatatatggcaaaagtggcttatcgggaggtttgtcaggtacagacaacataagtagatttcgtcttctgtcaggtgatattttgattgtagttcccgggcaatattattccaacatttgttggtttctgcaattagttgtagccagtcaccttgatgcattatttctgattctgccttttctttatgagagcggatgattagagtcatcttgttgtatacctcagattgttcgaacagaacaagtcctgccttatacagcatttctttttcggttcggttattgggcttttgctttcttttcttataggataggatgattacagctacaatgagggttaatgtgattattgatatacttatgatagagtaatgggtgtgtttgctgattatgttttgcttgttgcttggcatcccttgttctgcgcagacaatggcatcgggctgtctggacttctgcatgctgtccaaataggcagagtagttgcgttccatctctaaggaagtagctaagtctccttgctctttggctatgtctgctagatacatgtaagccccggctttggtggcatagtctgttgtgaaaagggatttttgtaggtagtggcgggcagaatcatattgcaatattaggtaatatgcgcttccaagtagttcgaaagctttgtagcatgttgtgcggtctttctgtacgccaagattctgtttggcgaattctatagctttctctccgttttccatccagttgtatagttggcatagtgaggagaacacattttcttttaattgtatgttggactgtttttggacgatagcgagtgccttcaacatcattttttcggcttcgggatagaattcctctcctttttccattcggatgagtcctcgtcgtgacagaacttctgcttgaagaacagagtcctttagctgaatacctatttgttgtgccaattgatagctggaatcggcttgtgtatttaggttttgtgaatagtatagataacctatattcaggtagataagacttaatagacgtctttctcctgctttttcagccaagggctttgctatgaggtattgagtcatagattctgttcttctctgtgaatcccggtagacgcagccggaatagtaatgggcccttgcccgcttttctatgtcgtttgtgccgttgtagtaggtcagggccgattgtatcagggaatcattggtttggataatgtagttcttatctcttgcttctgtcattaataggccataataagcactgtcagcttgggtctgcaggctgtttgtcgggaatgcttcgagcatagatagggcagtgtccggttgctgaacgatgagcgagtcaattgcaatcaggtacttattatagttcactcgggtattgcaagcaatggacagaagtacgattaggacagatagggttgtgataatagcttttctcatgtggtgaacaaagttctcagttaagtcgggtgcaaaggtacatctttttcattatttactcatataattgcttgggcatattgaagtttgaagaaaattgtgtggaagttaggagtaaagatggaaaataaatgagccggctattattaagatgacaatgtatgagtgtacatggtgctggagaagtatgcaaggacacaaaagaaagtagagaatgtgggcatttaggcagaaataacctgaaacccttttccattccctcgttttcttgtatctttgcgacctcataattcacttaactacaagcaatgaaggaattcctacaactgatgcggcgctttgtgtcgccttacaagagatatatcggttgggcaatcgtgctcaatgtgctgtccgctatattcaatgtcttttcattcacactgctcattcctattctcaatatccttttcaagacaggggagaacacccaagtgtatcacttcatggagtggggaagcggtagcttgaaggaagtggcggtgaacaatttctattattacgtcactcagatgattgagacacacgggccacagatgacattgctgttcatggggctcttccttgctttcatgaccatgctgaagacctcctgctatttcggctcttctgccattatgattccccttcgtacgggagtggtacgcgatatccgcgtgatggtctattccaaagtgatgcacttgccgctcggctttttctctgaagaaaggaaaggggacatcattgcacgtatgagcggtgacgtaggcgaaattgagaactccattaccagttcactggatatgctgctcaagaatccgatcttgattctgctttatttttccactctgattgtaaccagctggcagctgactctgtttactgtcctggtattgccgggtatgggctggctgatgggaaaagtcggcaagaaactgaagcgtaagtcgttggaagcccaaggaaaatggagtgataccatgtcgcaattggaagagacgcttggcggactgcgtataatcaaggcttttatagcagaagacaagatggtggaccgttttaagcaatgcagcgacgagctgcgtgatgcaaccaacaaggtagccatccgtcagtcgttggcacatccgatgagtgaattcctcggtacgctgctcattgtattggtactgtggttcggtggtctgcttattctgggcgacggcacttccatggaagcatcaacgttcatcttctatatggtgattctgtacagtatcatcaatccgttgaaagactttgcaaaggcaggatacaacattccaaagggtctggcatccatggaacgtgtggacaaaatactgaaagccgagaatcccattaaggaaccggtaaacccgttgccgctgcacgggatgaatgaccggattgaatttaaggacctctccttcagttacgacggcaagcgcgaagtgttgaagcacgtcaatctgatggtgcccaaaggacaaaccattgcacttgtcggtcagtccggctccggcaagtctacattggtggatttgctgccgcgctatcacgatgtgcagttgggtgagattacaattgacggtgtgaatattaagaattttcgcatccacgacctgcgtgcgttgataggaaacgtgaaccaagaggccattctgttcaatgacaccttcttcaacaacattgccttcggtgtggaaaatgcaactatggagcaggtggtcgaagcggcaaagattgccaatgcccacgacttcatcatggagaccgaactcggttatcagaccaacattggcgaccgtggcggcaagctttccggcggacagcgccagcgtatcagtattgcccgtgccatcttgaagaatccgcctatcctgatactcgatgaggccacttcagcactcgataccgaaagcgaacgactggtgcaggaggctctggaacggctaatgaagacccgtaccacgattgccatcgcccaccgcctttccaccatcaagaatgcggatgagatttgtgtactctatgaaggtgaaatcgtggaacgtggtaagcacgaggaacttctcgagaagaacggctattataagagactgaatgatatgcagtctctctcatagcaataaaattctgcgtactttgcttccacccgcttgtgctaggctgttatgactaaataggaagttaatttcctgcaaacagcctattaattcttctttctcttctatatttcttacgcagaatctatgatgcaggtgggtgttgacggctgccggcagagtgtttcacggctgttaggcgatgatgaataaagagtgttcttttaccttttacgcttttttaatatctgcttgcttccattctatcactaattatcctatttttgcaaagaacacatacataaacattgcaaatatcatgaaaaaattatatccaacgtctacgacgacagctactatgactatcagtccaagtactcttaatcatgtaattcaattgaccccgataatactataactgtaaatatttaatattcgcctaccatgaaaataaaagttggtttgatagggttcggtagaatggggcaaatgtattgggaggaaatgcaaaaaagcggtcgatgggacatcgcatatatctgcgataccgatccggactcccgagaattggcaagaaacctttccccttcatccagaatcatatctgatgaacaagaaatctttgacgaccagagtgtagaagctgttggtctttttgcattggcaaattccagaaaagaacaaatagagaaagctgtccgaagccataagcacatcctgacggagaaacccattgccgataccattgacaaggaatgggaaattgtggacctgattgaaaagtatgaccgcattgctgctgtcaacctttatctgcgcaactcctggtatcaccaggctatgaagcagtttatcgatgaaggcgaaattggcgaactggccatcttgcgcatctgccacatgactccgggattggcgccgggcgagggacacgaatatgagggtcccgcctaccacgactgcggcatgcactacatagacattgcccgctggtatgccgacagtgaatacaagacctggcatgcgcaaggcatgcggatgtgggactataaggacccttggtgggtacagtgccacggtacgttcgagaacggcatcgccttcgatgtcacacaaggattcgtctacggacaactctccagaaaccagactcataatgcatatacggacattatcggtacaaaaggtatcgtgcgcatgacgcatgatttccggactgccgtggtggagcttcacggcgtgaaccgtacgcttcgcctggagaagccctttggcgggaagaacctggataagctatgcaatattatggccgactccatcgagagcgggaaacgtgatccgagattgccgcagatgcgagactcggccattgcttcccaatacggatggaccttcctggaggatgcgcgccgtcacgacctgcccggcataggcgacttgcagacgctggcggaaatcagggagcgccggaggcatatgaaggaaggttacggactgctccgtccgaagaagacggtagtctgatgcctattgtaataagaagtgttttaaaacttaattatattaaccgattttaaaatctaaagaaccatgtcgaaatttacaagaagagagtttcttaagaccggaggtttagctttggcgggtcttaccattgctccaagcagcattttgggtaagagtcacggacacgtacctcccagtgaccgtttgaacattgctgccgtaggtatcggtggtatgggacacactaacattaatcatgtgaaggctacggaaaatatcgtggcgctgtgtgacgtagactggcgctacgcgaaaggtgtgttcgatgagcttcccaatgcgaagaagtattgggattatcgtaagatgtacgatgagatgggcaaggacatcgatgccgttatcatcgctacggccgaccatacacatgccatcatcactgctgatgccatgacgatgggcaaacatgtatattgccagaaaccgttgacgcactccgtatacgagtcccgtctgcttactcgcctggccgcttctacgggagtagttactcagatgggtaaccagggttcttcggacgaaggtaccgacttggtgtgcgagtggatatggaacggcgaaatcggtgacgtgacaaaggtggaatgtgctaccgaccgtcccatctggccgcaaggattgaatgttcccgagaaggaagaccgcattcccaaaactctgaactgggatttgttcaccggtcctgccaagatgaatccgtataacgaaatctatcatccctggaactggcgcggatggtgggattatggtacgggtgctttgggcgatatggcttgtcacatcctgcaccagccgttcagagctttgaagttgttgtatcctaccaaggtagaaggttcgtctacattgttgctcaatgcctgcgctccgcaagcacagcacgtgaagctgactttccccgcacgtgaaaatatgccgaaggtggctatgcccgaagtggaagttcactggtatgatggcggcatgatgcccgaccgtccgaaaggcttccccgaaggaaagcaactgatgcagagcggtggcggtctgactatcttccacggaacgaaggatacgctgatttgcggttgctacggacagaacccgtggttactttctggtcgtgtgcccaatgcaccgaaggtttgccgccgtgtgccgaaggctatgaatggcggtcatgagatggactgggtacgtgcttgtaaggaaagtccttccagccgcgtaatgcctaagtctgacttctccgaagcaggaccgatgaacgaaatggtggcaatgggtgtattggctatccgtctgcagggcctgaacaagacactggaatgggacggagccaacatgcgctttaccaatattggcgacgacgagacattgcgtacagtcatcaaggacggcttcaagatacacaacggccatccaagcttcgacaagacatggacagatccggtaaatgccaaagcttttgcagaagagctcatcaagcataactaccgtgaaggctggaagttgcccgatatgcccagataaacattaaaaagagtatcggaaccaggttccgatgctcataaacgaatactaatcatttaatttttcagattatgaagaaaatatattattctttggcttgttgccttatcggaggtatgctcgcctcttgcggtggcggtgcaaagaaatcgaacgctacggaggaagctgcagctcctactactactgcggtgtcttattccaagtctctgaaagcgcctgaaacggacagcttgaacctgccgattgatgcggacggttatatcactatctttgatggaaagagcctggacggatggcgtggatacggtaaggacaaagtgccttccagatggattattgaggatggttgcctcaaattctgtggaaccggtaccggcgaaggacagaccggtgagggcggtgacttgattttcgcccataagttcaagaactttgagctggaactggaatggaagatttccaaaggtggtaactccggtatcttctatctggctcaggaagttacttcaaaggacaaggacggcaacgaagtgttggaacccatctatatctctgctcccgagttccaggtgctggataacgccaatcatccggatgccaaactgggtaaggacaacaaccgtcaggctgcttccttgtacgacatgataccggctgttccgcagaacgccaaacctttcggcgaatggaacaaggcaaagattatggtatacaaaggtactgtagttcacggacagaacgatgaaaacgtactggaatatcacttgtggactaagcaatggactgaaatgttgcaggcaagcaagttcagcgaagagaagtggcccttggctttcgaactgttgaacaactgtggcggcgaaaaccacgaaggctttatcggtgtgcaggatcatggcgacgatgtttggtaccgcaacatccgtgtaaaggttctcgactaattccttctaaaaagatagtactatgagaatcaaacatatgatgattttgtcggcactgtgcttatccatgatggccacaagctgcagcagccacagcacggaaacggcgccggaaacgacgaaaaaggaagtagccatccagctctattctgtaagagacttggtgaaggacggcagtaacctcgaccagattctgaaggatttggctgatatgggctataccagtgtggaggccgccaactacaatgacggtaagttctacggcaagactccccaggagttcaaacagatggtggaaaagagcggtatgaccgtgctttcttcgcacactacccacgggttgtcggacgaggaactggcttcgggcgactttacggaagccttgaaatggtgggatcagtgcattgctgcccataaggaggccggtatggagtatatcgtgactccgtatctctccgttcccaagacattgaaagacttgcagacctactgcgactattacaatgaagtgggcaagcgctgccaggctgccggtttgaaatacggttaccacaatcatgcccatgaattccagaaagtggaagacaaggagctgatgctggactacatgctgcaacacaccaatcccgaatatgtattcttccagatggacgtttactgggtagtgcgcggccagaacagcccggtggattacttcaacaagtatcccggacgcttcaccatgctccatatcaaggatcaccgcgagattgggcagagtggtatggtaggttatgatgctatcttcaagaatacggatactgctggcgtgcgccacatcgtagctgagattgagaaatacagctgccccgtagaagagagtgtgaagcagagtcttgactacttgcttgatgctcctttcgtgaaggcatcgtatagcaaataaaacatgatggcggctattcattcataagctcggccgcatcattttcttgacgcgggcacaaccggatgaagaatccggggtgcccgcgtttttttacttccttccgaagtcggccggaatttccccccattgctttgtctcccattttaggatgcgggtggtgtaggtgttttcgcgcaaccacttctccgcacgttctatcaggcggaaaagctcttcggtcttggcgtcgcgcggcagtttggtcttgcattttttctgttttatccagttgatggcgttcacgctgtcactgtagatgggcatgtcgaaacctttctgtttcaacaaggcaagtccgtggacaatggcaaggaactcgccgatattgttggttccgtacatcggcccgaagtggaagatttcctgacggctggcgacgtgtactccccggtactccatggcaccggggtttccgctgcaagccgcgtctacggcaaggctgttttccgcgacggcggtggggaggggagcgtcggtgccgggagtagtcttggcaggagagggagccgaccgtttgatgtacgcgtacggcgaagaggcaaaggctttttccgcttcctcgcgtgattcgaacgacttgtatttcgctccttcgtaacctttggtctgtagttggcagtctgtccaggaagtgtagatacccgggctgactcccgcccatacgacgtaatatttttctttcttcataactgcggacaaaggtaaaaaagaaaatccgaacaacttaactctttcatttgtttctttgtatggcggatataaaataaagaagagaagactcaataaaaaaagaaaggacaaaaaatgaagagaacatttgcagaagccatggcgcatcgccgtagttattactctatcggcagcgattcgccagtactggatgaagaaatagtacacattattcgtgaagccgtaaagaatgtgccgtcagctttcaattcacagtctacaagaattgtattgttgctgggcgacgaacataaaaaattgtggaacatcgtgaaggaaaccctgaaagcacgcatctctgccgaggcttttgccaagacggaagccaagattgacggctgttttgccagcggacacggtactgtgctctattttgaagatacttctgtagtcaagaagctgcaggaagcattcccttcctataaggataatttccccacttggtcacagcacacctccgctatgcaccagtttgccatctggactatgctggaagatatggggttgggagcctccctgcaacattataaccccttgattgacgacgaggtacgtcgcacctggaacctgcccgacgactggatgatgattgcacagatgcccttcggtacacccaccggtgaaccgggagaaaaggaattcgaagatttaagcaagcgtatcaaaatttttctctgatacagaggcgttttcagcttggaattgctacctttgcaggaaacctgtaactcgtagcagatatgatacgtattttcttgaccggctacatgggagccggtaaaactactttaggaaaggcttttgcccgcgaaatgaatgtgccgttcattgatttggactggtacatcgaagaacgttttcacaaatcaatccgtgaattgttcaccgagcggggagaagcctcttttcgtgaattggagcgaaacatgctgcatgaagtaggggaatttgaggatgtcgtggtctctaccggtggcggtactccttgtttttttgacaatatggagtatatgaacggttgcgggcagacggtgtttctggatgtacaccccgatattctgttccgccggctccgggtggcgaagcagcaacgccccatcctgcaaggcaagacggacgaagatttgcgcaccttcattgtggaggcgctggataagcgtgagcctttctactcgcaggcccgttatcgctttgatgccggttatctggaaagccgcagccagattagcgaatccgtgcaacggttacgccaacttttaggactttaatcccttgtaaatgtgtatttttcagtccgaggagctggatatattagatttatgtgtatttttgtcgccccctttataagacacactatagtgggaaaatagtaaattgtaaatagtctaatagtaaatgtactgatgagaaaatggcgtattgaagattcagaagagctgtacaacgtaactggttggggcacttcgtactttggtatcaatgacaaaggtcatgttgtggtgacaccgcgtaaggatggggttgccgtcgatttaaaagagttggtggacgagttgcagttgcgcgatgtagcggctccggtattggtgcgttttcccgatattctggacaaccgcatcgagaaggtgtcctgctgcttcagacaggcagccgacgagtacgggtataaaggagagaactttattatctatcccattaaagtgaatcagatgcgtcccgtggtagaagagatgattaaccatgggaagaagttcaatctggggctggaagcgggttcaaagccggagttgcatgctgtgataggggtcaatacagacccgggttccctcgtggtttgtaacggatataaggacgagagcttcattgaactggcactgttggcacagaaaatgggcaaacgcatttttcttgttgtagagaaacttaatgagttgaatcttattgccaagatggcgaagcaattgaaggtgaaacctaatatcggcattcgcattaaattggcttccagtggaagtggcaaatgggaagaaagcggaggagatgccagcaagttcggactgacatccagtgaactgctcgaagcgctggacttcttggagaaaaaagatatgaaggactgtctgaagctgatacatttccatatcggcagtcagataaccaagatacgccgcatcaagaatgctttgcgtgaagcttcgcaattctttgtgcagctgaacaagatgggcttcaacatcgaattcgtggatactggtggcggtatgggagttgattatgacggtacacgctcttcaagtagcgaaagctccgtcaactattccatccaggaatatgtcaacgatgtggtgtcgactttcgttgatgttgccgacaaacacgggttccctcatcccaatatcattaccgagacgggacgcagcctgactgcccatcactccgtgcttatcttcgaagtgctggaaacggcttccctgcccgaaatggacgacgactgggaaccgggagaggatgctcacgaactggtgaaggaactgtatgacatctgggataatctgagccagcgcagtatgctggaaccttggcacgatgcgcagcagatacgcgaagaggcactcgaccttttcagccatggcatcgtcgacctgaatacgcgtgcacaaatagagaaactctactggagtatctgccgcgaaatcaactccattgccagcggcatgaagcactgccccgaggaattccgcaagttgagcaagctgcttgccgacaagtatttctgtaacttctcgctgttccagtcattgcccgattcctgggctatcgaccagatgttccccatcatgcccatacaacggctggatgaaagacccgaccgcgaggctaccttgcaggatatgacttgcgactcggacggcaaaattgccaatttcgtcagctcgcgtgccgatacgaccaccctgccgctgcactcgttgcgcgacaaggaacactactatctggcggtttttctggtcggagcttatcaagagattctgggagatatgcacaatctgtttggtgatacgaatgccgtgcatgtgtctgtcaattccaaaggctacaccatcgaccaactgattgacggcgagacggtggctgaggtgttggactacgtgcaatataatcctaaaaaactggtacgtacgctggaaacttgggtgacgcagtccgtcaaggaagggcgtatctctgtggaagaagggaaggaattcttgtctaattaccgttccggactgtacggatatacttatttggaataaaatggagaaactgactgtaataaaggtgggtggcaagattgtagaagaggaagccaccctctataagttattggatgactttgcagccatcgaaggctacaaggtcttggtacacggaggcggacgctcggccacgaagctcgctgcccaactgggtattgaaagtaaaatggtgaatggccgccgcatcactgataccgaaacgctgaaggtggtgaccatggtgtatggcggactggtgaataagaatatcgttgccggcttgcaggcgcgtggtgtcaatgcactgggcttgacgggagccgatatggatgtaatccgttcggtaaagcgtcccgtgaaggaggtggattatgggtttgtgggcgatgtgaagcaggtgaatgatgctttcttggcagacctcattcataagggtgtggttcccgtgatggctccgttgacacacgatggagacgggcacatgctgaatacgaatgccgacaccattgccggagagaccgccaaggctttggcgggcttgttcgatgttactttggtattctgctttgagaagaaaggggtgctgcgtgacgagaacgacgatgatagcgtgattccacagataacgccggaggaattcaagcaatatgtggcagatggtgtgattcaaggtggcatgattccaaaattggagaactctttcgaggcgttgaatgcgggtgtgtccgaagtcgtaatcactttagcatcagccatcaacgggaacagtggaacccgtatccgaaaataattcaaaaaaaacggcaataggctgtaactttctgaatacttaaccgtcaatttattagagatgcaagaactcagctttcgcaatgacattctcccgctgaaggataagctttttcggttagccttgagaattacgtttgatagggcagaggcagaggatgtcgtgcaggaaacgctgataagggtttggaacaagcgtgacgagtggtcgcagtttggttctattgaggcctattgcctgacagtggcaagaaatctggcgatagaccgtagcgagcgaaaagactcccgtaccgtggagctgacccccgaaatggagcaggcctccgatgcatcgggcccttacgagaagctggtgaacaaggaacggatggcgttgatacaccggctgatgaacagacttcccgaaaagcagcggctgattatgcagcttagggatgtggaaggtaaaagctataaagaaatagcagcagtcctgaacttgaccgaggagcaggtaaaagtgaacctcttcagggcgcggcaaaaagtgaaacaaacgtttattgatatagaaggttatggactctaaatatatagaacaactcctggagcgctactggcagtgcgaaacttctttggaagatgaggctgaattgcgtgctttctttagcggaagcgatgtgcccaagcacttgcttcgctacaaggatttgttcgtatatcagcagcttcagcaggaagtgcatctgggtgaggattttgatgcccgggtgcttgccgaagtggaagttccggtggtcaaggcaaagcgcctgacactggccgcacgcttcatgccgctgttcaaagccgccgcagtagtggcagtggttctttcgctgggaaatgtgatgcagcattcattcttttcggatgtagaggaagtagccgcaaccgatactatcggtaaacagatttccgcaccgtcggtagctctttcgggagatgtgcccgtgtctcatgagaagcaggtgatggacagcctgcgccgggtgaacaaggagctggaaatcaaggaatagatattttcatttgcttttaaaataacattttcatttgctttaaacataataatagttagtgtgctttattaaaacaacttgaggctgtgaagtttcaattctctcaaaatcttataaaaactaactaaaatagaagggacgccgcgtgatgcagcgtccctttgttgttcttgcctgtgggttacaaggctttttatttaagggagttattatttacagtatatatagtttggagtctgccgttttttttctcaactttactcactgcaaatatatacaatggagaagatgagaaacatactatacatctgtattatgcttttaggcattatgtgctttgtaggctgtaatgactgtcatggcaacaaaaaacttttggcgcagaccgactctttgttgcagagccgtccggacagtgcgctgaagttgcttaattccatagaaaaggatgtcgggttttcagaagcggagtggatgcagttcgtttggaactgtgcgcaggcccgctaccgtatgggtatgtcattggcggaagattcgctgcttcctgaagcgatacactactatcgtgagcggaaagactcttcccgtatgcttgatggctacctgcttgaagcctcctattataaatggatgaagcaggaggaacgcatggatgaagcgattgagaatggcttggactatgccatagcccggaaagacaccttctggcttcttcttttttatcggggaaaggcagagatagcttatctgagaaatgaccactcccaggcgatagagttgatggaaaagatattgcaatatgctgataagctatctgtccgggaacattgctccatactctatgacctgggactcaatatggcgcttgccaaccacccttcttcttcggattacctggaacagagtattgacatggcattggcggcagccgatacagcttcggcctgtcactatctgaggaattatgccgcttttcttgccaacagccatgaatataccaagtccaatgaactgcttcaccgggttagacggctgatgcctatgaccgacaactatcccattctgcaggtaatctttgctgaaaacttcctgaaccttcatcagttggattctgcccgttactattgggagcaggcgtggaacaatgaattgaagcaggaagaaaagagagccgagggcttttctgtacgcagtgcgctggcacagttgaaaacaattctggactatacttccggggcacctttggacattgtcactttcggtaggtttgctgattctgtcaggaatgagatgagggaccagaatagcgtgatagagcaacagctggtgaccaggaacaagcttcaacagttgaactatgagttgataatcaaacggcagaagacacggatgtattcgatgctggttgttgttgtgtttgtcggggtacttgtttcccttaccttttatatccgtaacagacggaagcgccttgccgaagccgaggaacgtattgatgcactgacccgcctgctggaagatgcccagaaggtatcggacaatcaggaagagaatagcggtgctttcttcaagaagctgcttcttcagcagctgggtatcatacggcttgttgccaatacgcctacctcacagaaccaggcgttgctgaaacttatttcgggcatcggcaataaggagattccggtggaaggacttcttgcctgggcagacctttatccggtaattgataaactatacgatggcttttattcccgcatgatggaaaagttcggacaggtattgtctgataaggaagtgcagatatgctgtctgctctgtgccggtttctccacgaaagaaatcggtgtggtcacccaacagacaagtgcaaccatctacgtgcgtaagacttccatccgaaagaagataaatgcaggcgaaaaacaggatattgtggagtgcataagaggcatttagaccggaagaggccggattaagacttttataatatgtcattgttgataatcagtgctttatgtgctaagtattaagacttttaatagtgcgatttagtaggagttaagagacttcttgccttaactttgcatcaaatcaaaaaacagaaagtcttatgaaaagtacattcagaacaatggcaatcgcagcgtgtttcgcacttgtatctcttacttcatgttacttccccggaagcgaccagtataaaataaagtcggcaactaaggaatatgttaagtcgcagttaggcgaaggtgagaaattccgttacggatacctggagcgtaaatgtggtcgtaacgtagacggcaaattttgcaagtatgccgaagtgcactatgaggtaataagcgcgtcgggcgaaacttcagagaaaatgctctttctgctgatgtcggaacattgcgattccgtattggatatctcggaggagagagacaaggagtggaccaataaagaaactctttcgtcagaagagataaaggcaatcatcgagtcagctttaaaagacaaactctaaacaccggcatttatgaaaaagattcttgttatagctatcgtatgcctgttgggtagctttgccgcagcggcacaaacagtgaaagtaaacggtacaattgtagatgaacagaaccgtccggtggaatttgtcaatgtagccctgatttccttgcccgactcttcattcgttacggaaagcaccactgatggcaaaggtaaatttgctttgagagccactgccggttcggatttcctgttaagactctcttatatcggttacgtcggcgaacagattgtcatcaggactccccaaggcactgtgcagatgggagacattatcttgaaagaacagtcggtagcactggacgaggtggtaatatcgggcagcaatatcacgcagaaggtagaccgcatggttgtagtacccaccgctactgccatgaagaattcctataatccctacgacctgatgctgaaccttgccattccgcacttgaaggtggatgctcttggtaaaggcctggaagccaatggcggcagcgtacagacacgtatcaacggtattgtggctacctccaccgaagtggcagccctcctgcccaaggagattgtaagaatagaattcatcgaaaatccgggagaacgctatggcgacagcagcctgggcgctgtggtggacatcattgtccgccgccgcgaaacgggtggactggtcaatatacaagccactaatgctccccacatgttgtttagcgaggacaatgtggtggcaaagttcaatcataacaagtcacaatggggattgttctataacttgtctgcccgtaacttcaaaaaaacatatacggatatagacgagacatatgtgttggaaaataagacgatacatcgtgtgcaggaggggcttcacgaccaaaacaagcactttacccacaatatcgacctctcttacaatctgacggagcaggataagtacgtattcaacgtcgtgttccgcaacagtgtctatgatgccccttgcctgaaccagtcgaacaagttgtatgatgctgcggatgccgataactatatcttctccagactgaagaacaagcagtccagctacactccttcgctcgacctttattaccagcgtacattaccgaagaatcagatgcttacgatgagcgtgaccggtacgctgatgcacaccgacaataataggctctaccacgaatatacgcctcaagccgaagacctggcgatgattgaaacagatgtgacggggaataagcgttccattatcggtgaagccatctacgacaagcgtttcaagttcctcgtattcagcgccggattgcgccactaccagatgtatgccaggaacgagtatgcaggctcttcacccgtcgtatcggaaatgaaccaggcaaagacagcggcgtttgccgaggtgcagggtaatatcaggaaagtgagctatggtgtgagtgccggactgacccgctcttatttcaaggaaggaggggaggaacatacctactatacctttactcccactgtccgtctgaacttctctccgcacaagaacggcaacatcaactatcggttcaatgtcgaacccaagattccttcgctcagtgcattgaccaatgtggagcaggcgatagataccatccagatagtacgcggtaacccggcattggagacttacagcgttttcaacaatacgttgaactattcctatatgaagaagaagttcgtcttcatgctgaatgtgacacatggctatcacaagaatatcatcatggagagtgtgtttgccgagggagacaagttggtttcgatgaacgagaaccagcgttctgcacagtttctgcgctttggcccttctttcacattccgcggactgaacattggtagtctgaagaatttcctgacgctgagtatagatggtggatttacacgttactggtctaacggcaatacctatacccatacgtataatgatttctattacaacctgggtgccgtgttcaattataagcagttctctctgttgggacaattcagtaaaagggcgaacgagctgatgggcgaaacgatttataagggtgaaaaccaggctgctgttttagccacttatacccacaagcggctgcaattaggagcagggatgatgttcccgttcaccaacaactacaagacgggcaaggaacgggtgagcaaagtggcgccctatacctcgtggagtcatgcgaaagaaataggacagatggcggttatcaagctgagttataacttcgagtttggtaagcgttacaaatcatccggcagacgcatcaataacagcgacaatgaatcgggcattctgaatatagataaatgacaactgttcccgtgcttcggaggtgtggggtgataaaagaacgaagggcttcctcgcgggagtccttcgttctttttgcaggtaattatttgagagagaatttagtttaggtttatagtcatcaatctgagaatctatgttttctatgttagagtttatacagtcctttcttgggatagtccagttccggattacccttgtagcctacactgccgcttccgctggtgcgtactttcaggaaatctgtggcatggcacttgatgtcgcctgaaccggcaacactggcagatgctttcttggcaacgaaatcggaagcaagcaaatcacccgaacctgccacgctgtattcagcttcttgggtactgccgctcaggatggcggtacccgaaccggcaacggatgctctggtgaagttggcggttacgttattcagcttcatgtcacctgaacctgcaacggatacttggaggtcattgcaagtgatgttgctgctattgatgtctcccgagcctgcgatggaaatatcgaggtctgtgcaggagatgttgtttccactgatgtcacccgaaccagccacagagattttgatgtcatccgtcttcagtccgtttttcagttccacgtctcccgaacctgccacggcaatgccgttcagcttttctgcggacacacgtacttccagtttattataggatacgctgacgttcttcttgaagccgatgtagagggtattgtccttgacacggatatccagtaagtctacaatgttgtccgaggtgtatacttccactgtcggtttgccggacttctgcgtgtaggtcacgtcggggctgccggctacactcagcttggtgaagttgtccacttttatgtctttggttacataattcttgcttgccttgaccgtcttgctgccgaagcctccggaacggtatgtgtgttgttgtgaacaagcggttgtactgaatgccaataaggcgattgcgataaatgttgttagagctttcatattcttttgttttttgtgattcagtatttattagttagacgtgatctgccttgaaaaagttgcatataaaaatgcttttttcaaaggacgctcggtcatcatactttaatcaattattgtgccataagtgtaaaatgttgattattaaaggataatcgcttttgtgtagtgttcattatcggacactccgtccgcttttgtcaggtatttgcttgcgtttttggacgattctttgttcatttgcaaagcctcttcccgcccctttcctatgggagaggctttgatttatgacagtaaaccgcattatagaagataaagagcttggtcctttgtttgtccgggtcaatgcccgggcacggcgcctcactttccgtacaaaggaggacggaatttacgtgactgtgcctccccggacttcccttgccgagatagagaatgccatcgagcagcttcgtccgcgtctgaaggctgccatacagaagcaggtcagaaagctgattgatttggattaccgcattgatacggagttctttaaactgacattggtcagcggacaacgggaacggttcttgtcccgttcggaattgggggaaatgcagataatctgtcctcctgatgccgatttctcggatgagaagctgcaggcttggctgcgcaatgtaattgaggaagctttacggcgaaatgcgaaaattgttcttccgccccgtctgtatatgctttccatgcagcacaaccttccttacaagagtgtgaagataaattccagcagcgggcgttggggaagctgttcggcacaaggcaatatcaacctttcctattatctggtacttcttcccaagcatctgatagactacgtgctactgcacgaactggcacatacccgcgagatgaatcacggggagcgtttctgggatttgctcgaccggatgactgatggaaaggcacaagcattgagagcggagcttcggaaatatcaaacgaaaataaatggttagagattagtatggacggtaagtagttccttgttttacagacagtgatactgcaaaactactgcatacctcttgcactgtcactgcactccttttgcagtgctgctgcaacacctttgcagtgacactgcaactgttttgcagtaacgctgcaaaaggagtgcagtatcgctgcagtgtcactgcaggagttgtgtaatgtctttgcagtagcactgcaaaagttatgtgatgtctttgtagtggctgttggtaagccaggaaaaagcttgttgactccgaaatatgagagcaaaatgcttcacaactttttatccctaattttttgccagctgcttcacctcttccccttccttctcgaaccggtattcgccccctttttcgcttagctcaaataaggaaagcttttcagttgcattgtttacaatcatgagtgcgttttgctcggcaaagcgtttcacttcgatggtgaaaggttcttctgcaatggtgcggttcaccagcaggctgtcgttgatgaatatggaagtggaatctccggcaaatcctttcgtcagtgtgatggtgtatgtctcgatgaagttgcgttctccttctttccgttgttgcagcctcatgctcatgtagacaaagatgacaactacaaaaatcacggcgaaagcaaggatgccgttgcctatcataaactgcttgttggtattcagtcggtgtgccatggataaaaagtttttttaagaatggtacaaatgtaatgaataaatttgaaccgactggttttttacttgctgtattcgctcggcgtcgccccgaattgtttcttgaagctggtcgagaaatgggacagtgtactgaatcccgtcatgtccgctatctctgagatggtatatttcccttcctttatcaatttggcggcacggttcagcttgtaggtcttgaagaatacgctggggttctcacccgtcagcccctttaccttgtaatagaatttggtgcgggagattttcagcagctcggtcatgcgcgccacgtccagttccggattggagagttcgttttccatcaggtggtaaagttcggtcatgaaggtgttgtcttgcggggagagcacgttctcctcaatctcatccgtttgggtggaacggctcaggagactgcgcactttctcacggttcttcagctgggatttgataagcgccagcaggtagttgggctcgaaaggtttcgttacgtaggcatctgcaccggtattcagaccttccacctggttctctacagtagctttggctgttaccagtatcacggggatgtggcatagttgcaagtcttcctttatctgtcggcagaggtcgtaaccgtttcttccgggcatcactacatcgctcagtacgaggtcgggagcttcttcgctcatggctttgaaggcgctgtcggcatcgaagcggcagacaacgttgtagacgggagaaagcagggccttcaggtagtgggccacttccgtatcatcgtctaccaccagcagggtttgcttttgttgccggatgctctctgtgttttccagttgatactgttcttccgtttgtatcggaaacgccttgttctgttcttcttcggggagggtacattcttcgggggtataggagaggtcattcaccggcagcagcagggtgaagacggctccgcttccttcggtacggttaccggctttcaggtagccgtgatgcagcagcgccaggctgcgggcgtagtacaagccgatgccggttccccagttataggtgcctttggattgattgtccagttggtagtagcgttcgaataccttctccaactgttcctcggggattccgttcccgctgtcggccacggcaactttgacgtattgcgtgtcgatgtctttgtcggtcagcgtaaagagacgcgcagcctcttcgcgggtaatgacgtcgaagcacagttccactttcccaccgttcggagtgaacttcaaggcgtttgaaagcaggtttcctacaatcttgtccagcttgtccacgtccagccacatgaggaaagtatcctccaggccataagtgttcagtgcgatgcctttctcgttggcgttgatgcggaaaatatctacaaagcgttgcagttgcgagatgatgtcagtccgtttcactcgcagcttcagggtgtcattctccagtttgttgaagtccatcagctggttcaccagacggagcatgcgccccacactgcgttgtacgatgtaaagcagttgtttgttttctccctctatcttgggactttcgcaaagttgtgtcaccgggcccgaaatcatggtgagcggggtgcggaactcgtgcgagatgttggcaaagaaactcatgttcatgcggttcacccgttgttcctgctccttctcaagtttggcacgccgggtggtttctttttcctgcttgatacgtagccaggcacggatgaagataccgatgatggcggcggcaataagcagatagatacaccatgcccaccacgtttgccaaggggcgggctttacgatgacgcgtatggaattctccctttctacaatgctcttgtcgttattggttattttaactttgaaggtgtaggtaccggcaggcagattggcatagtaggcctcgcggttgttgcgggcatcaatccaatatttgtcgaaaccgtccatcttgtaataataatgtacgcgttcatattcgcagtagtccagtgcggcaaaggagatgctgaaaccattctgattgtggtccaggcagatgtccggtcggtaggagaggtgcttgtctatactttcgctgtcttgtgggcgtgccaaccggttgtgtatcttcaaatcctcgaagagcagtggaatttcccgtttggtacttacgtccatagggttgaagaaagtcagcccgtgcgtaccgccaaaaacaagtgtcccgtcgggcaggcggcatgaagaacggtcgtaaaactgattgccgcctatgccgtcggcggcatagtagttggtaaatttccctacggtgcggtcatatttgcccagcccgtattgtgtgcctgcccatatattgccttgtgcatcttcctcaatgcaagagatgtcccggcagggtgtaccctctatggtctcgatttttccggtggcggcagaatagtgcagcagtccgttgctgacggtcccaatccatacatctccacgactgtcttcgaagatgtcggtagggatgaatactgaacgttggatacaagcttgccagtcggtgttctcgaatggtacttcagcgctttcccaattgtcgggattgatttgcatgactgggttcatgaaggcagtggtccacatctttccgttgttgcgtggaaggagtccgggtatgaaggttcccgtccaggaaaatacttttgtttggacaaattctttttctttacgctttttggcataaagtttagggctgtatgtacccacccaaattgttccacaacgatcttgtgcaaacgacagtggtaggaagatgtcatgaatagactctgtcttcagtatgccgtttttatagctgcatttcatcaccttgctcgcatagagggccgccagccagatgtagccctcatcatctacgaatacgcgtgtgatgtccggtttgtcggtagcgctttttcccggaagtccagccgagtccacttctttcacttcgtggctgtccatgttgtaaacgtacagcccgtctatcatggtggccatccagagatttcgctccttgtccactgccacggacagcactgactttcggttcaggtatgagctgagatgattattggtgttgaaacgttctttatagttgtaacgcacgacatagccttggtctacagagcctatccacaggtttttctgtgagtcggtaaacatggtgcttatcttgaagtgaggcacttcgaagggaaaaccgttttcgctctgatgtatcacgtatccttccacgtagttgtagagaaacattccttgttggtcggtattcagcagcaggctgttgctgccgtaagggtggatgtagttgacgttggcatgcagcagcaacggatggctccgaagggcttggggtgtttccttgaatttgtgcgtatgtgtgtcgaacaatgttatctggcggtttcccgccagccataggattccgttggtgtgcatgaagaagtgggtgggaaaaatgccttgcattggaatggagtcttccagcgctagtgtggaggagttgtagcggcgcagagacagtggggtcactgcccacagtttgttgctctggtctatgaagcagcggttgttgaaggtatagtttgggtcaaatatcttgatgggtacgtcaaatttgtgtgtttgtggattatatacggcaaggttgtgcatcatgttcagaaaaatctttccgtctttgttctcgagtatttggatgccgtttttattggggaagtccagtgggatattttggaaattatctttgtctgtgtataggctggttccatttacggtgactacccacaaccggccttgtgaatcacggaagaggtcgttgatttgattatcgggtatatccagcgagtcatccgtacagtaatactgatgatattcgtgtacattatatttgtttacccctcgtgaagttcctatccaaatgtgtccttgtgcatcttcggcaaaggcggtgaccttctgattggagaggtcattggtgatgacggggctttcgatgctgccttccggtgtgggctttgtgtccgacggattgcacgcggtgattaaacacaatagaagtaagtatttaatgtatttcataatatatagtgtagactaaaagcattggcatgtcatccatttgttttgttcaacgaatctctgcattacgatgcgaaaatactcataaaaattgagagagagactgccggagagcatgttttgaacaaatctgcaaacatttgaacattggagaaagctgttttgaacatcggggaaagccgtttggataacgtagaaaatccttctggggagaatgtgctaatattgcaatcataaaaacataaaactaatacataatatgaaaaagcaattcttgtcagtgttagcattctccgccatcctactttcctcgtgcggagggacagctaaaatagagaaagcatctgcttgtgggcaggagggggagattacggcttcttcggcaaccgccattgccgagaccgaatcaggaaaagtagccggatatgtggaaaatggtatctatatatataaaggtatcccatatgccaaagccgaacgttttatgccgcccgtggccgctgataaatgggaaggcgtccgcagcagccgtgcctatggccctacttgtccgcaaggcaagcgcatgggatggtacagcgacgagcaggcgtttgccttcaactgggatgacggttatcctgacgagaattgtctgcgggtgaatatctggacaccgggactgaaagacgggaagaaacgccccgtcatggtgtggctgcatggtggaggttattccgccggcagtggtcaggagcttccctcgtatgacggaacaaatctggcaaagaaaggggatgcagtggttgtgacgctgaatcatcgtctcaacgtcctgggttttctcgacctttccgcctatggcgataaatatgcaaaatcgggcaatgccggactgcttgatctggtggcggcactgcaatgggtgaataagaatatagaatccttcggtggagatgctcggaatgttaccattttcggtcaatccggtggaggaggcaaggtctctacgctacttgccacgccatcggcgagaggcttgttccataaagccattgtacaaagcggatctatgcttcgcacgatggagcaaaagtattctcgtcgcattggcagtgccgtgatggaagaacttggtctgaaggcttcgcagatagacgaactctgcaagatgccgtatgacaaggtgcttgccgccggtgacaaggcgatagccaaagtgcgtgcagaggcagagaaggagggggtgtcttccttcatttttggctgggcgcctacggtggacggcgatgtactgcccgtacagcctttcgaccctcaagctccagcacaaagcaagggcattccggtaatgattggcactactctgcacgaatttaccatgagtacttatgtccccgcttttcgtaccattaccaaagaaaaagcggtggaattcctgcaaaagaaatacggcgaacgtacggacgagttccttaccgctttcgagaaagcctaccccggctatcagcctaaagatttggtggatgtggacttcgtgttccgtcccggtgctgtggagcaggctaaactgaaagctgcgcagcagggtgctccggtctatatgtacatgttcgcgtgggaatcgcccgtacttgacggcatgtttcgcagcacgcactgcatggacattccctttgccttcaacaatgtagtgcgccacgcttccatgaccgggggtggcgctgaagcacaagctttgggcgaaaagatgagcagcgcgtggttgaactttgcccgtacgggcaatcccaatgccgaagggttacccgagtgggaaccttataccgcagaaaagggagcaacgatgattttcaataacgattgccaagtgaagtataaccatgacaaggaactgctggaggtagtgatggcatttcctacacgtgggttctgacactttcttaagaaaccttttattattaacataaatctaatttaatcaaatgaaacaaaatctgaagcaaacagctcggaagagacttgcagctatggcactcttcctattgatctgtcttcctttcagtctggcacaagcccagactataaaggtgaacggtagggttactgacgacctgaatgaaccgatgattggcgtgagtatctttgagaaaggcactaccaacggtgtcattacggatatggacggcaactactctttgtctgtgaaagaaggagcgacgattgtctattcctacatcggctacctgacacaagaaaagaaagcagtggcaggagtaatgaatgtgatattgaaagaagacactaaaacgctggatgaagtggtggtggtaggttatggcgtgcagaagaaaagttcactgaccggtgccgtatcttcggtaaaatcagaagatatggaagcacgtaccattacccgtgctgagcaggcattgcagggtaaaactgctggtgtgcaagtgctcagtgcatctgctaaaccgggtgcttctccacaggtgcgtatccgtggaataagttctaacggctcttgcgatccgctgtatgtagtggatggacgtattgccagcgatattggtggtattgaccctaatgacattgagtctatggaagttttgaaggatggtgcttctgcagctatctatggcgctgctgccggtaacggtgtagtattgattactacaaagaaaggaaaaggaaacggtaaaatcacatacgattttcaatatacttcacagagtttgggtaaagtacccgaagtaatgaatgctgcgcagtataaggaattcttcttggaaaacaagaagcttacccagagtgcttttgatacctattgggatggaaaaaccgatacggattgggtcgatgaggcttttgaaaacagttcgatggtacgtcataatgtgactttccaaggtggtagcgacagaggttctttctatctgtcattgtcccaccttgataacgacggtatgattgtcggcaatgccgatacttatgaacgactcacgggaatggtaaatgccagctggaaaatcaaaccttggctggaggtaggtaccaataatcagattgagcactacaaaactcagtccgtagccgagggcaatgagtatggtagcatgatgctttctgtattacaattagaccctctgaccaagcctctttatcctattgatgacttgccgttgaatatggctaccatctataaggatcataagaatatgttgggcgatggaaacggcaacctttatggtgtatcagctttcactggcaatgccgaagctatcaatccttttgccatgcgtgacaactcttataccaagaacagaggctttaatatcaatggttctacttatttgaattttatgcctatcaaggggcttaccgttacttctcgtctttcttatcgtttggcttcaacttcctcttatggcgtggggcaatcttattactatactgacaaggctaaacgtgattgggtggaggtttcggcttcggattatagcccaacctattatcagtgggagaactttttgaactacacccgttcttttggcaaacacaacgcaacattgatgttgggaacttcttatagtcagagccgttcttatggcgttagcggaagtaagaagggatataatgaagatactacagatatgtggggaaatgtgattaacagagtttcgcatttgggtttcttgcagaatgatcctaatttcttctactttgcctatgctacatctgatgctgtaaaggatgtaagtggtggtgagcctacctatactcgtaaattatcttacttcggacgtttgaattatgactatgccggaaagtacatggctcagttctcactgcgtgccgatgctgctgacctctctgtgttgccaaagaacaaacgttggggctatttcccggcagtttctttgggttgggttctttcagaggaaaattttatgaaaggaactgaagactggctgtcacaattaaagctccgtgccagttggggacagaatggttctactgcatcattgggcggttataaatggaatgtatcaattggtgctaccgggcatttggctgtaggtgataataataatttctcttacatcaatggttatgctccctctgctaccggtaatgacggacttaaatgggaaacttctgaacaaaccaatataggtattgatgcccgtttcttgaatagccgtttgactgttacagccgattatttccataaaaagacaaaagacctgattgtttcgggcattaaggcttcaactgtagtaggtaacagtttctcgccagttaatgccggtaatattacgaacaaggggtttgaattggaactgggatggcaagatcgtattggtgactttgcttatggtgtccgtgccaacgttgctacattgaagaataaagtgaccaagatgcatgagtctttatcaagtattgatggggctacttatgtgacttatggagccattacccgttttgaggtaggtaagcccgcgtggtatttttatggttatgatttcatgggtgtggattcaaaaaccggtgagccaatctttagagatattgatggtgtagaaggtattacggataatgataagacagaaattggtaagggaattgccgactatacttatggtattaccttgaatgcagcttggaagggatttgattttatcttgtttggtacgggttctcaaggtaacgatgtgttctgtggcttgaaccgtgtggattacaatttgaatcagctgacttattttacaaaaaaccgttggacagaaagcaatcgcaatgggaagactcctgcatcaggcgctacagattataccaagtatctgacttcttccggttgtgtatttgacggttcttattttaaaattaaacagattcagttaggttattctttcccgaagcaactgattaagaaggtagcaattgaaaatctacgtatatatggctcacttgaggacttctttacttttacagactatcctggttttgaccctgaagttaccggtgtcggaaattcattaggtgtggataaaggtagttatcctaattcaaagaaggttgttcttggtttgagtgtgacattctgatttttatgaacttattaaaatgaaaaacatatgaaattaagatattctttaatgctcggagcgctccttatattggctggcacttcgtgtgaagacaaattggatatacctcaaaaaggtgtattggacttttccacttattataaaactgacgaacaagctcaagcagcagctgatgcgctttatatacaactcaagggtacatactataactatacgatgatgaagaatgccctttcggacgatgtttgggcaggtggtggtggtcgtaatgacaatgcagagctggaaggctgtaatgaatattcatttggctcagaccaaagttttatcggaggcgtatgggaaagctactatcagcttatttataaggcgaatgtgattctgggacgtgttgagcctgatactgatttgaagaagaaggcttgtgctgaagccaagtttttccgtgcttttgcttattttgatttagtttctatgtggggtgatgtaccattggtagaccatgagcttgataaatccgaatatcagttggctcgttcgcctaaggctgatatttgggcgttgatagagcaggacctgactgaagctatcaactcaggactcttggaggaaaagaagagtgtagatgataaaacgacatggcgtgttaccaagcagttggcacaagctatattgggtaaagcttatttatggcaagaaaaattccatgaagctgctgttgtcttgaatgaagttagagctagcggtaagtataaactttatgatggaaattatgaggatatcttgacctacaaggctgagtataattgtgaaagtatgctcgaaagtaaccgtatttttgatgcaagtaattccatggatgagttcagtttctttgaggtgatgaatcattggcgcactgataagttggatatgtctggctctaacaatcagtttaatggtaccggatggggatttatggttcctcagaaaaagttgtatgatgcatttgttcaggaagagggtgtagatggttatcggttgaatcagacaatgaaaacctatgaccaaatttctcaattgggtgtcaaggttgccaaagggcagagtttgattaatgaaggttatttcatgtggaagcgtcgcttctcgaatgtagaatctcctgctgggttctggtgttcatataataactatcgttggatgcgttatgctgaagtcttgttactggcagctgaagcaaacctgaaggatggcaatcaatccgaagctgatgcttgcttgaatgaggtgcgtcagcgtgcaagattggatgcaaagacggctaccttggatgccattaaattggaaaagagactggaactctgttctgaatatacccgttatcaggatattatccgttggaaagatgcggaggctttgcttaaggatcagggtgaaagaacacctatcttgtcaaataaggcaggaaaagatgagccggataatgtagcggtagaatacattcagtataacaaggataaaacgcgttatggtttcaaggaaagacattatttgttgcctattccggcaaaggaaatccgcttgaatccgaatatggaacaaaatgcaggttggtaaagcgcataaagaatcaaaatctaacttcgtcatctgatgcagatagacaaaattagatttttctaactgattaattgtttgtagaagaagtcccccgtggaaatcatctaattgtacgggggcttcttttgtggctttttaaatataatatatatgagaagattgtcaattactttattttcactctgtctggcatctgccttgactgcacagacgaccggttcgaatcagtcagtcagactgcgtgccgataatatcgacgaagtagtcagtgccatgaccctcgaagagaaggtacacctcgtcatcggttgtgggatgtcgatgggaagtgataccaagtttcccggaacagcgggacgtacttacgacattccccgactgggtatcccttccgcctatcttgccgacggaccgcaccggttggcgatggctgccaagcgggaattcgacagccgtacttatcatgctacggaatttccttccagcaccacggtggcagcaactttcaatccggatgcagcccacaaggtgggacgtactttgggtacggaggtgaaggattatggtttggatgtgttgctggcaccgggtgtcaacctgatgcgaaatgtgctctgcggacgtaaccatgaatattattcggaagatccggtgctgaccggcaaaatggctgctgcttatatcaacggaatccagagccgggggacaggtacctgcctgaaacactttgccgtaaacaaccaggagaccaaccgcaataacaacgactctcgcctgacacaacgccccttgcgcgagctgtatttgaagtgctttgagattgctgtcaaagagtctcagccctggagcgtgatgaccgcctacaataaggtgaacggcaaatatacctgcgaggaccgtgaactgacagaagacatcctccgcgacgaatggggattcaagggactggtgatgtccgactggaatgccggaaaagatgccgtgacctccatcgtagcaggaaacgatatgcttcaaccggggcaggaccgccagtataaagctattttgaaagccgtagagagtggtacactggatttggcactcctcgaccgcagcgtgaagcgtgtgctggagtttgtggtcaagagccatacctttgccggctacgagtatcccaataaaaccgacttggaggctcatgcgcaagtagaccgtgagataggtgcggaaggtatcgtgctgctggataacaagcaggcgctacccatggctgccggcatcaaaaaagtggccctttatggaactacttcctatgacatggttcctgccggcatgggctttggcagtacgggcatcggttattacacggtttctatggtagaaggtttgcgcaatgcgggctacaccgtggacaaagaattgctgaaccgctacaagaagcatatggccgacgagcagaaacggctttttcctcacggaaaaccacctttcgcctttactccgctgccccgtgccgaggagttcctgcccactgccgaggaactggctgcacaagtgaaagccaacgacattgccgtgcttacgctggggcgtgtcagtggcgagggctgtgaccgccgtgtggaagatttccttctgaaggagaacgaattggctctgattaagcaggtgtctgccgcttatcatgctgcaggcaagaaactggtggtggttctcaacatctgcagcccggtggaaactgcttcttggaagggactggcagatgcagtggtttgtgccttccagccgggacaagaggtgggcaattgtatcacggatatcctgaccggagaggtgaatccttcgggcaagttacccatgacgtttgccgtgaaatatggcgatgcgccgtcggatgctaacttcccttttgattacgagttcaagatgccgtcgtttgctatgggtaccggcatgaacttcaagtccgaaaagaaagaggagaaaccgaaggaaccggagaaaaatgtggatttcaccaactatgaagagggaatctatgtgggttatcgctatttcgacactttcggtaaagaggtttcctatccgttcggtcatggtttgagctatactgcttttgactatgcggtagagaacgccaaaatggatgccgaccgctgtgagttgaaagtgagcgtgaagaacatcggcaaggtggcagggcgtgaagctgtacaactctatgtgaaagctccgaatgggggacttgacaagcctgccaaggagttgaaggccttcggcaaaactgccttgctccagccgggcgagagccagacactgattctgacttggaacgtgatggacatggcttcctttaatgagaaaaacagctcttgggagttggctaagggtgaatatcagtggatggttgccgcatcttcggccgatgtgcgttgcacagcggtacagagggtgacaaaggcacgcaagcagaaagtgcatgatgccatgcgggcgcaagtgcctgtggctgtgtatccgatggtgaagagatgagggggatatgcgtgaaaaaactgatatatatcaattagttttagaatggaaaacgcttattttgtagtacatttttaaatcgataccatgaaaagattgatactctctctcttagccgtctgcttgctgtggatggcaaatgcacaaaatcctgcatggggaccgcaaagcaaggtagtgaccgacagcatctacagccaggtattgaaagcacaccgtgcctacaccatctatctgccgcaaagctatagcaatgaaacggataggaaatatcctatcctctatttgttgcacggcatgtcgggggtgaataccagttggtttacagaccaacgtgtgaaggacgtgatggaccagttggtggcatcgggcgaggcttgcgagatgattatcgtcagccccaatgcaggaggcaatccggctacttgctggaacggctacttcaacatgccgggctgggcttacgaagatttcttctataaggagttccttccttatatagagaagacttaccgggtgaaaggtgataagcggcatcgtgccattgccggactttctatgggcggaggtggaacgacgagctatgcacaacgctatccggatatgtattgtgctgcctatgccatgagtgctttgatgaacatccccgtcagtggtgaggaggtgggaaaagatcccgaccccacaaacaagatggctgtgctgacgcgttctgtgcaggaacatagttgcatcaggtatgtggttgaggcagatgatgcgcgtaaggcacagcttcgtacagtacagtggtttgtggattgcggagatgatgactttctgctggaccgtaatatagagtttttccaagcgatgcgtaatgccggtatcccttgccagttccgtgtgcgggatggcggacataccagcgaatattggcattcggcactttatatgtgcctgccttttgtaagtcgcagctttgctaaataacaaaaagctaattcatttaatataagaaattatgaaaagattattaagttcggcagcgatgctgctggtctgctgtgtcaccctttttgcacagcaagctctttggggaggtgcggcggttgtctctcctgatattcatgatgacaacacggttacttttcgcttgaaagctcctaaggctgtaagggtgcagattactggtgattttctgcctccacaaactattaagactcctcgtggcgattatgatgcaccgggcattgccgatttgacagaggggaaggatggcgtttgggaatttactactcccgaaccattgaagccggaactttatggatactcctttattgtggatggattgagaatgatggacccgagcaatgtttacatgattcgggatgtggctaccgtgaccaatgtatttatcatcggtggtgaccgtgccgatttgtataaagtgaataaggtaccccatggaacggtaagtcgcatgtggtacaatagtccttcgctgggaatggaccgccgtctgacgatttacactccggctggttatgaaaccagcggcaagcgttatccggtattttatctgcttcatggtgcaggtggtgatgaggaagcttggattgctcttggccgtacttcgcagatattggataatctcattgcacaaggcaaggctaaacctatgattgtggtgatgactaacggcaatgcttggcaagatgctgctgcaggtgaatctcccaagggttttgttgccccctccatgcgtcccgacgaaagagcgaaggtggcggaaggtgcttttgaactctcgtttcccgaaattgtgaagttcgtggagaagaatttccgcactcttgccaataagaagaaccgtgctattgccgggctttctatgggtagtttccactcttgcaatatttccaagtattacccggacatgttcgactatgtaggtcttttctccggtgcaagtaccggaaacgataaatcgacttgtccggtctataccgacttcgaaggtaagctgaagactcagtttgccaagaaaccggctctttacttcatcgcatgcggcaagacggactttgtttataaaggtgtggccgactttcgcaagttgcttgacgacaatggttataagtacgagtatcttgaaacgggcgagggacatatctggaggaactggcgaatctatctgacggagttcgcgccgaagttgttcaaataagaggatttggtataactaatttaataacaaaataacatacgtatcatgaaaagaatttctattttgtcagctctgttgctgatgtgtgcgatgactttcgcgcaacaagctctctggggcggtgcccccgtggtatcacctgagatacacgacaacaatacggtaactttccgcctaaaagcgccgaaagccgtaaaggtgcaagtgaccggcgacttcctgcccacgcagaaaatcaagactcccttcggcgagttcgacggaccgggtgtggccgacttgaaagagaacaaggacggtgtgtgggaattcactactcccgaaccgctgaaaccggaactctatagctacactttcctggtagatggcctgaaaatcaacgacccctccaacgtttatatgattcgcgacgtggcaagcgtgacgaacgtgttcatcatcggcggtgacgagcgcatcgacctctacaaggtgaataaggttccccacggaacggtatctaaggtatggtacaacagccccacgctgggtatggaccgccgcctgactgtctatacgcctgccggatatgagacaagcggcaagcgctaccccgtcttctacctgctgcacggcatgggtggcgacgagaacgcatggagcgaactgggacgtacggcacagattctggataacctcatcgcccaaggcaaggccaagccgatgattgtagtaatgaccaacggcaacgccgcattggaagcagctccgggtgaatcttcactgggctttgccgctcccaacatgaatctgcccaagacgatggaaggctctttcgagaccgctttccccgacgtggtgaaattcatcgacaagacttaccgcacacaggccaataagaaggggcgtgccattgccggtctctctatgggtggttaccactccatgcacatctccaagcaatatccggatatgttcgactatgtagggctgttctccgctgccatcatgcccaacaaggatgtgaagtctccgatttacgacaacctcgaagctaaactgaaaacccagtttgccaagaagccggcactctattatatcgccatcggtgacaaagacttcttgttccaagccaacaacgagtatcgcaagatgctggacgagaagggttacaagtatgaatattatgaaacaggagaaggtcacatctggaagaactggcgtatctatctgacagaattcgcaccgaagatatttaaataagattatgaagaagaatatcatatccatggcagcagcaatggctgtcttgtcggcttgcggaccgggtgtgccgcagctgggaaaggcatcgttggatgaggtgattggtgctatgaccttggaagagaaggcgcatctggtagtaggtaccggtatggcgggtttctcgggcgacagtgccgttatcggtgccacgaagaaactggtgccgggcgcggcaggaaccacatacccgattgagcgtctcggcattcccgccgtggtgctggccgatggtcccgccggactgcgtatcgaccccacacgtgaaggggattcggctacgtattattgcacccatttccctatcgggactttgctcgcttctacttgggaccaggaattggtggaaagtgtaggtcagtccatcggtaacgaagtgctggaatacggtgcggatgtgctgttggctccggcactgaacattcaccgtaacccgctttgcggacgtaacttcgagtattattccgaagacccggtggtttcgggtaagattgccgcagcttatgtacgtggtgtgcagagtaacggcgtgggtaccagcatcaagcattttgccgtgaacaatcaggaaaccaaccgtatggctacggatgcacacgtgtctccacgcgccctgcgcgaaatctacctgaaaggattcgagattgccgtgaaggaatcggctccctggaccgtgatgtcctcatacaactacctgaacggtgtctatacttcggaaaacaaagagttgcagacaacgatgctgcgcgacgaatggggtttcaagggcatggtgatgaccgactggttcggcggcaaggatgccgtggcgcagatggtggcaggcaacgacatgctgcagcccggtctgcccaagcagtacgaagccatcgtgaagggtgtgcaggacggagcgttggacgaagccattctcaatcagaatgtgaagcgcattctggaaatgattctccagactccccatttcaagggatataaatattccaacaagcctgatttgaaagcacatgctgccgttacccgccagtcggcgacagaaggcatggtattgctgaagaacgataatgcttctctgccgttggcagccgacgtgaagaacgtggcactcttcggttgtacttcctacgacttcattgccggaggtacaggctcgggcaatgtgaatcgtgcttacaccgtttcgctgctggacggcttgaagaatgccggctatgtggtggatgaagcgctgaagaatagctatgaagcttacctgaaagcagagaaaggacgtctgtccaaagataagaaagagtggtttatgcccgacgagcgtcctgccgagatggctgtgtccgcagaggtcatccgtgagcaggcagccaaggccgatgtggcattggtaactctgggtcgtacttccggtgagttcctcgaccgtatggtagcagacttcaacctcaccaaagaggagctggacatgctgaaagccgtgtccgatgctttccatgctgccggaaagagggtagtggtggtactcaacatcggtggtgtgattgaaaccgcttcttggaaatctgttcccgatgccattctttgtgcatggcaggcaggccaggagggaggaaacagtgtggccgacgtgttgagtggcaaggcttcccccagcggcaagctgacaatgactttcccggtgaagtttgaagatgccgcttcttctgccaacttcccgatagacatgcgcgtaagcatcgacctcgtgaacaagggcgggaagaagaacgacgtgaagaatgtggattataccaattacgaagaggacatctacgtgggctaccgttacttcgacaccttcggcaagcaggtttcctatcctttcggttacggtctttcctataccacttttgcttacgacaaggctgctgtcaaggctgacaacggcgtctataccgtatctgtagaagtgaagaacaccggtaaggtagcaggcaaggaagtggttcagctttatgtatccgctcccgatgctgcagacgccaacaagcccgaaaaggagctgaaagcctttgccaaaaccaaggaactgaaaccgggcgaagctactgtggtaacgttgaaagtgagtgctgccgacctggcttcctatgatgaggctgcatctgcatgggtggtagctcctggaaactataagttccttgttggagcttcctctcgcgatatcaaagctacactggaggctgaagt

SEQ ID NO: 4410 - DNA, 89114 bp, Unknown
  gut microbiota DNA sequence
actattctattattttctttaccacacttagaagtatctaatgttttcaaataaaattgcatataccccagaagaagtataatcacatagacaaattgtttattagttttcttctggaaatctcgctctttcacatctccgtttcctactatccgccacgctgcctcatagtgtttttcttttgttaagtatccactttcagtggccttttccagcagcttctcaaacaattttttatttgtcttcccctttccctttttcgacattcggcctatcttttcaagcagttcctgatatgcctcttttgtaaagttaacatcagcagagaaacgtatcttatcctctttttgagactctttccgggagtcagaacgttttctcagagcctcaacatcttcattttcaagatacccctcatatacacttcttataagacgaaccgcccttgcacccacctccacaatatcctcatcttcatgaagagtaatccaaaagggccaataagtatggttgttcgcattatttgtaggcttaaagcggtgagtgaaaaatttccccggaaatgtattttcaagaacagcagtaacataataacgaatatcttcccattcttcattgaacatggccatcccatctttatcattctcatcaagaatcagtcccttacacccataataaataccgacaaccggttcatacacatcatattctatcagaaattcataccctctgcatccatccttactatacaatgtctccagcttatacatcatgtgatgtggagccttgttcccatgaaaagaagcatccgctttaaaatcctccacttcatccagcagcctcatcttctttttataaaactctgaagcttcgtcatttaaccttttccaatgctcccggttcctctctctgattttatctttctccatctcagagacaacctcctgacagttcacatcacattcggccccatcaaaatcaatgctaacactggaaaagtattcaagggctgcctgcacttctttctttttagcatagacctgcctcgctataaagatgcaagcctcccgcgtaaggtgatagttttccacgctcctacgcgcaccagagcctaccccaaccatttcaaccatcaggttaaaatgctcatccacatttataccatccgcttcggcagacctcatggcttttgccaatggaacggaaaatttctggtacgtactataccccaaagcagcgcacaattccctcgaagtccagtatgaccgtccttgcccatcaaacttccttattttctcaaaaggtgatttatcactgattttcaattctttattcataaagacagaaacaaattacatgatataaaaatcctcatctataatgacgaacactcaacaacactaatatcaagcatgaagatagcaataaaaaaacatcccgtcacataattggaaacattttgtatacagagagacgggagcaatgccctatatttgcaaccggtcaatcaatcaccggccatgaaaaacaggtagtttatgagaaatttcattgtattatgcttattggcatgtctggcatcatgtacagacaaaaaagaattccagacaataagagaacgaatcgatttatcaggaaattggaacagttcattagggaactgcacattgcccggtacgacggatgaaaacaagttgggagacggcaggcatcccaccaatgtaacctcccagttgacacggacttatccctactccggcatcgtagaatatgaaaaagatgttgaaattcccgtacagatggaagggaaacgcctgatactcttcatggaacgtacaaagcccagtactctctggatagacggggacagcgtcggcacgttgggacatatctatgcacctcactgctatagcctgccggccttggcacccggcagccaccatataaagatacgcattgacaattcccccagctccgtaccagccgaaatccaaagctcgcatgcctggaccgacggcacacaaaccaactggaacggcattctgggcgatttctacatcgaagcgaccccacacacctatctcgagcaggtacaagtctacccgtctgtaaaggagaaaaaggcccgcatccatgtaaacatatacagcgattcggagcaatcgggcgtagtgaccctttctgccaagacgtggaacacccaacaagaacacctgttactggacatggaaaaacaagtcggcttaagcaaaggtgaaaataagatagaactgacgctcgacatgggcaaccggatgcagacatggagcgaattccaccccacactttatgcactgaacgtgacccttgccacaaacgagggtaaagacaatataataacagatttcggtatgcgcgactttgccaccgaaggtactcagttcaccataaacggcttcaagaccttcttgcgcggcaaacacgacgcttgcgtattcccacttaccggatatgcgccgatggatgtaaagtcctggcgaaaagtttttcagacagccaagagttatggcatcaactactaccgttgccattcctacaccccgccccgcgccgcttttgccgctgccgacatcgagggtatctatttccaggccgagttgcctttatggggaagcatttcaccggacaaccatcgcctgaatgacttcttgctgaacgaagcctatatgaccctcgactacatgggcaatcacccctcattcaccatgttgggactgggcaacgagttgggtggcgacgttgacctgatgcgcaattggctggacggattcagaaaacatgacaaccgccatctctattcgctcggttccaacaacttcctgggttggggaggtgccatagacggtgaagattatctgacaacctgccgggtaggaggaggcgaaggctatacaacgcacgtacgcagttcgtttgcctttgtcgatgccgaaaagggaggtatcttgaacaacacccgtcccaatacccgtgcggattatactgctgccatagcgaaatctccccgaccggtcatcagtcacgaaaccggacagttccaaatttatcccgactacaaggagttggagaaatacaccggcgtattgcatccatataacttggagatattccgtgaccggctcaatgaaaatggactgcagaaccagattgacgcattccatcaggccaccggccggtttgccgtcgaatgctacaaggctgatattgaatacggcctgcgcactgccggtttaggtggattccagatgctcgaccttcaagactttcccggacaaggctcggcactggtaggcattctggatgctttcatggacagcaaaggcattgtcactcccgaaacattccgcggcttttgtgctccggtggtaccgctggcgcttatggacacctactgttacagcaacaaagaagagctgaacataggactcgccctgacaaattacgaagagcaaccatggtctgatgcattatgctggcgtctggaaagcctgagtgacagcgtaacttttgttcgcgaaggcaaagtccccgcccatgtagagcaaggaaaagtaatgcaggtgggcgagttgaaaagcacccttaccgaaatagacaagcctgcccaattgcgactgacactgaccaccgggaattatcataactattataacttatgggtataccccgaccggacaccggaaagcgaagcggacatcttcatctgtcagtccttggatgacgaggcgcgaaagagactgagccaaggagggaagatactgcttatacccgaccacaaagccattgaagaacagagtgtaggtggactttttactcctgactactggaactatgccatgttcaaaagcatttcggaaaacgccggccgcgaagtttcgccgggcaccctctccttgctgatggacgagaaacatcccttgttccggcagttccccaccgagtgccatagcaactggcaatggtggagcatcgtacgccatgcccgcccctttattctgaacgctacacgccacgaatacaagccgcttatccaagtagtagacaatgtggaacggaaccacaagttaggcttgctgttcgaatttgccgtagacaacggtaaggtattggtttgtatgagcaacctcgaagcaattcgccacactccggaaggaggtcagctgcgcaatgccattttaagctatatgaagtcggctgagttctctcccaccgagacgctgacctcacagcagttgcagcacatattaacaaccgaggtgaggaagcaagacattgtcggcgtgaaaaaccagtcggattacgacgtacagccggaataaatatgagaagtttcatcataattccacttttcctcggctgtcccgtcatttttcagtagctttgcggactttaatacagcaagcaccccatgaaacttacccttatacgcaccgctcgtgaaaccggcaaagagacattcagcacatggcccagcgacaccttgatggagaagatgaaaaccgagaacaaagccggacacatatccgccttgcgcagcctcattccccacatcaccggaagcaacggacactacccctgcatagacaaactgccacgcatctgccctgccgcagaatatgcccgcagcaaagagggggaaagatacctgaaaacctacaacggactggtacagattgaagtcaaccacctggccaatgccgtggaagtggagcaagtaaagcgccaggcggccctgctgccacaaacttttgccgccttttgcggaagcagcggacgaagcgtaaaaatatgggtactgtttgccacccccgacggttcgcgccccaggcaggaagaaaaaatcaggctgtttcataccgctgcctaccggctcgccgtaaactgttatcagcccctgctcccctaccccgtcacactgaaagaacctgccgtggagcaaagctgccgcatgacgctcgatgaccgtccctattacaatccgtctgccgtccctttctgtctggaacagcctttgtccgtgcccgacgagcccaccttcggccaacggaaacagaccgaagcaaacccgctgatgcgcattgcccccggctatccggcctcccaaaccttctccatcctcttcgaagccgccctgaaccgtaccttcgaagagctggaaaactggaaacggggcgatgaccttcgccccctgctctacctgcttgccaggcattgctacaaagccggcattcccgaagaagaggcagtacgtcaagtcatgatgcactactaccgcgaagcggatgaacaactggtgcgcatgaccctgcacaacctctaccgcgaatgcaaaggcttcggcacccgcagcagcatgacccgcgaccaaatcaccgccttccgcctggaagaattcatgaacagacgctatgagttccgctggaacaccgtgctgggagaattggaattccgccaacgggactccatacacttccatttccgccctgccgaccagcgggtaagaagcagtatcggacagaatgccctgaaagaaggaatcagcgtatgggacagagatgtggcacgctacctcaactcggacgccattcccttgtacaaccccatcgaagaatatctgaacagcaccggacattgggacggcaaggaccgtatccgcgcattggccgacctcgtcccctgcaacaatccgtactggcgggaactcttctaccgctggtttctcagcatgacggcgcactggcaaaacatcgaccgtcagcatggaaacaacacgtctcccctactggtcggagcccaaggctatcgtaaaagtaccttctgccgcatcctgctgccacccgaactgcgcttcggatataccgacagtatcgacttcaaaagcaagcaggacgcagagcggagcctcggccgctttttcctgataaacatcgacgaattcgaccaaatcagcgtcaatcagcaaggttttctaaagcatctgctgcagaaacccgtggcaaacctgcgcaagccttacggcaccgccatccaggaaataagacgctacgcctcctttatagccaccagcaaccagaaagacctgctgacagaccccagcggcagccgccgtttcatctgcatcgaagtcaccggccccatccataccaatgtcaccatcaactaccggcaactctacgcacaagccatggatgccatagccaaaggtgaacgctactggctggacgattccgacgaagccatcttgaaacagaccaaccgggagtttgaacagcccacaccgttggaacagctcttcctctgccacttccatcccgccgaaaatgaagaggaaggagactggatgacccctatggagattctctccttcttgcaaaccaagaccaaagaccggctgtccatcaataaagtggctctgttcggacgtgcactccacaaactgggcatcagcagccgccggaagacaagaggaacagaatatcatgtagtgaaaaaagaataatcctgccaattaatttgcttctactttcggtttgcgctatctttgcgtttcaaatcaagaagatatgaaaaaagaaagtcaagtgatattcgaccggaatgccgtagagtttgtgaccgtagccgccgagttttgcaagtttctggaacaagcggaaggggtgaaacgttccgcgttcgtcgatacctccttaaaaatacttccgctgctctacctgaaggcctccatgctgcccgagtgcgaaaccataggagacgaggcgccggaaacattcgtcaccgaagagacctatgaggtactccgcatgaacctcgccaatatcctggccgagaaagacgactacctggacgtattcgtatctgacatgaagtatagtgaccagcccatcaccaggaacatttccgaagacttggccgacatataccaggacatcaaggactttatcttcgtattccagctgggtttcaacgagacgatgaacgattcgcttgccatctgccaggaaaacttccgcctccattggggacaaaagcttgtcaacaccctgcgtgccctgcacgaggtgaagtatgcgcaaggcgaggatgaagaggaggaaaccgcagactttgaatattaaattatggttatcaaaagaacaatagataaagaaacagtgaaagacctgcccaaagccgcctttccgggacagatacatgtcgtacagacaccgtgggaagcggagaaggcagtcgcctatctgaagtcctgcccgttgctgggcatagacagcgaaacccgtccatcgttcacaaaaggacagatacacaaggtggccctgctgcagatttcctcagaggaacattgctttctgttccgcctcaacctgacgggactgactctgccggttatcacattgctggaaaacccaagcgtaacgaaagtaggcctttccttgcgggacgacttcatgatgctgcacaaacgcgcgcccttcgaacagcatgcctgcatcgaattgcaggaatatgtccgcgctttcggcatccaggacaaaagcctgcagaagatatacgccatcctcttcggggaaaagatttcgaaaagccagcgcctttccaactgggaagccgaaaccttgaccgaaccgcagaaactgtatgccgccaccgatgcttgggcatgcctcaacatctacaacaggctgcaagaactgaaacggacaggagattttgagatagaagccaataataatgtggtaatgtgatgcacattatcagattaccacattaatcacattatatatatatatatgtacaaagtataccttaaacccaataaagaggagtcattaaagcgttttcacccgtgggtgttttccggcgccatcgcacatttcgacggagagcccgaagaaggggaagttgttgaaatctacacgtccaaaaaggaattcatagccaaagggcattttcagattggcagtatcgccgtacgcgtactgaccttccgtcaagaagaagaaatcaatgcggacttctggaaacgcaaactcagcatagcatacgacatgcgccgcagtatcggcatagccggaaacccgacaaacaacacctatcgcctggtgcacggggagggagacaacctgccggggctggttatcgacatttatgcccgtaccgcagtgatgcaggcacattctgccggcatgcacctcgaccgcatggccattgccgatgcccttaccgaagtgatgggcagccagattgacaatatctattacaaatcggagacgacccttcccttcaaggccgacctctatccggagaatggtttcttgaaaggcggcagcacggacaatgtagccatggagtacggcctaaagttccacatcgactggctgaaaggccaaaaaaccggtttcttcgtagaccaacgcgagaaccgttcgctactggaacgctatgccaaaggccgcagcgtactgaatatgttctgctataccggcggcttctccgtatatgctatgcgtggagacgccaaactggtacattccgtggacagctccgccaaagccatcgacttgaccaacaagaacatcgaactgaacttcccgggtgacacccgccatgccgcctatgcagaagatgccttcaaataccttgaccgcatgggcgaccaatacgacctgatagttcttgaccctcctgcttttgccaagcaccgcgatgctctgcgcaatgccctgcaaggctaccgcaaactgaacgtcaaggctttcgagaaaatcaagcccggcggcatcctcttcacattctcgtgttcgcaagccgtcagcaaagaaaacttccgcaccgccgtgttcacagccgctgccatgtccggccgcagcgtacgcatcctgcaccaactgacgcaacctgccgaccacccggtcagcatctatcatccggaaggggaatacctgaaaggactggttctatatgtagaataaaggaaaaagcaggctttgttagcctgcttttcttaaatagagttaataaaaagcagaaatacgccaaaacagcatgttatataacataaaccgtgtatatttgcactgtgtttttcatggtattagatttaaggttaataaagattgggtgtctgggatagatacccttctttttttataatacattccttcccaaaatccatccctcattaatctctttcgttgaagaaaaagccgtacagaacttgtttttctcctagtctcattgtacatttgcatctattacataatttaaaatataaaaagctaatattatgagcatcaaattccgactcactgccatgcaattcctgcaattcttcgtttggggagcatggctgatttcattaggtggttacatgggcggtacgttacattttgaaggcggacaaatcggagcaatctttgcaaccatgggtatagcctcactgataatgcccggactgaccggtatcatcgccgacaaatggataaacgccgaacgcctttatggcatactccacctcatcggtgccggtgctctgatttatgcttcaactgccaccacatacaaccacatgtactgggccatgctgctcaacatgcttgtttacatgcctacactatctctggccaacaccgtatcctacaatgcattggaaaaatataagatggatttgataaaagacttccctcccatccgtgtatggggaacggtaggctttatctgtgccatgtgggctgtggaccttaccgggttcaaggcaagttcggcacagctctatgtggcagccatctcggcagccatgctggggctttacgccttcaccctgcctgcctgcccccccatgcgcagcgaaggaaaaacgatgctctccgctttcggactggacgcactggtgctgttcaagcgcaagaagatggctatcttcttcctattctccatgttgctgggagccgcccttcaaataacaaacacctatggtgaccttttcctgggttcgtttgcttccataccggaatatgcagattcgttcggtgtgaaacactccgtcatcctgctctccatctcgcaaatgagtgagacgttgtttatccttgccatccccttcttcctaaaacatttcggaatcaagcgtgttatgttaattagtatgtttgcatgggtattccgtttcgggctcttcgccctcggagacccgggaagcggactctggatgctcattctctcaatgattgtctacggtatggcatttgactttttcaatgtatcgggctcgctgtttacagaaatggaggcacatcccagtatccgcgccagcgcacaaggcttgttctttatgatgacgaacggtgtgggagccatcatcggaggctatgccagcggagccgtggtagatgccttctcggtatatgccgaaggtggaggactggtaagccgcgactggacaccggtatggtttatctttgcaggatatgccttagtcattggtctgttatttggaatagtattccgctataaacataatccggagaaaatagagaaaaactgattgagaatcaggttgatttaataggtatgaataagaaaaagatagaactacaagtactaaacatttccaacagccaggcgcaagcgggtgcctatgccttggtactgggtgaagtgggtggcgaacgccagcttccgattattataggtgccaccgaagcacaagctatggtcatcgagatgaaaggtattgtaccgccccgtccgctgacccataacctatttgcttccgtccttgaagtgctgggtgtaaaactgatgcgtattcttatctataaagtagacaacggagtattttactcttacctttatatgaaagccgaagaaaccattctccggattgacgcgcgtaccagcgacgcagttgccctggcattgcgcatgaatgcccctatctttgtctacgaagacatcctcgaagcagaatgtctgaaaaccgtcgaaggttccatcgacccgatggaaggcagcgaaccggacaaagacgaactgctgcaggaagacacgataggcatactgaaaacggccctgcaaaaagcagtcgatgaagaggactatgaacgtgccgcacagctaagagaccagattaaccaactcaagaacaatttgtaatatgcacgtattctatacccccgacatacaagcccacgcagagctgcccgaagaggaagccgcacacgccgtacgcgtcttgcgcttgcaggctggagacgaggtcatgttgacagacggaaaaggctgcttttatcgtgccgaaatcagtacggctacaaacaagcgctgtctggtgaatatcctggaaacccttccgcaagcccccttgtggaaaggtcatctgcacattgccatggcgcctaccaagaatatggaccgcacagagtggtttgccgagaaagcgacggaaattgggtttgacgaactgacattcctgaactgccgtttctcggaacggaaagtcatcaagacggagcgcatctccaaaattctggtttccgccatcaagcagtcgctcaaggcacgcctgccccaactgaatgaaatgacagacttcaacaagttcatcacacagccttttccgggtcagaaattcatcgcccactgttatgaaggcgaaaaaccgcttttgaaggatatggtacatcccggagaggatgccctcgtactaatcggtcctgaaggagacttcagcgaagaggaagtccggaaggcgacggaaaacggttttatccccatcagcttgggaaaatcaaggttgcgtacagagacggcggcactggttgcctgccacatcctcaatttacagaatcaatgatactcactaaaacaaaaactatatgaaaaagaacctattcttccacttctcagtactggcaatgctcatcgtgctgataagcgcttgttcgtccaaaaagccagaatacaccaacgttattccttccgatgcctcgcaagtcatcgctgtcaatttaaaatcattggcagacaaggccggtaccaaagataaagagactaaagaagcactgcaaaagctgacagatgccttgaaaagcgatatgaatgcagctactttccaacaattggaggctgtactgaaagaccctgccaaatcgggagtggacgtcaatgcgccgatttatgtcttcaacgctccctcgttcccctacaccaccatggtagccaaggttcaaagtgaggatgatttgctgaagcttctggaagttacggagaaagaacagataatcagccatgtggcagaagcggacggttacagttttgcacaaatcaacaagcgggcattgctcgctttcactcctaccacgcttatggtggtgaactacaccggcacatcacaactggaaaaagtcaaagaaggaattcccgccttgctgaaacagaccggagaaaacagcatcaacagcaacaccgctttcaagaaaatgcaaaagcaggatggagacatcaatatgctcatctctccttccagcctgctgagtgcatatgccaatccgctgaattacggaatatcccacaatatcgacctgaaagacttgaagatgctgggaagtctctccttcgaaaaagggaaaatagaactgaaagtagagagctataccgagaacacagaattgaaagcacttttcgaaaagcaaatcaaaagtacttgtcccatcgaaaacacgttcttgaagtatttcccaaaatctaccctggcgctattcagcataggtatcaatggagaagagttctacaatgtgctgcaagagaatgagcagttccgcaacgatttctccattaccaaagccgctgaagtaaaagacttgttcagtgctttccacaacgacctgaccataggccttatcaatgtaaccatgaacagcaatccttctttcctggcctatgccagcgtaaagaacgacgctcccttgaaagccctttatgagaaaaagtccgaactgggactgaaacgcggcgaagacatcgtgaaattgaatgagaatgaatatgtctataaatcacgcgctatcaacatattcttcggcatacgagacaaacagatgtacgccaccaatgacgaactgctgtataagaatgcatgcaagaccgctgacccgtctgccaaagagacggacttcgcttccagtctgaaaggcaagcgcacagcctttgtcatcaatgcggaagccgtacttgacctgcccgttgtaaaaatgctagctggatttggcggacaagagtatagcacctattactcgctgctcggcaatatctcgtatctggaagctgtcggcaacgaggacaaggcaaccgtcaccctgcagctgaagaacaagaatgttaatgcactgaaacagattgtggactttatcaagcagtttgcaggaatgtaatttaaggattaaggattagagattaaggattaataccactcatgaataggattcacctacggcaaacactacctcaagtgtttgccgaccgtgatgccattacctcagacgtatggcatcgggacattacgttccacaaagggaaacgttatctcatagaagccgcttcgggcaccggaaaatcatcgctttgcagctatgtttacggttaccgcaacgattatcagggaatcatcaactttgatgagcgcaatatccgttcactctccgtcaatgactggatagatatacgcaaacactccctcagcattctttttcaggagttgcgtatctttcccgaacttaccgccatcgagaacatacaactgaagaaccggcttaccaacttcaaaaaaaggaaagaagtccttaccctattcgaggcaatcggcattgccgacaaggtaaacgaaaaagccgggaagctatctttcggccagcaacaaagagtcgcttttatccgcagcctctgccagcctttcgacttcatcttcctggacgaacccgtcagccatctggatgacgagaacggaacaatcatgggcaggctgctgacagaagaagccagccgccaaggagcgggaatcatagtgacttccatcggcaaacatctggaattggattatgatgaaatttatcaattataaatgtggctaatatgaaccgacttgtttggaaacttctccgccagcacatcagtgtcggacagttggcaggctttttcctcgccaatctcttcggcatgatgattgtattgctgagcgtacaattctatcgtgatgtccttcccgtttttacggaaggggacagtttcatgaagaaggattatatcattgctaccaagaaaatcagtactttgggcagctttgccgggaaaagcaataccttctccaaagatgagataaaggacctgaaagcccaaccttttactaagggggtaggcgcgttcactccttccctgttcaaggtttctgccggactcggtatgcaggaagccggtatccgcttgtcaacggagatgtttttcgagtctgtacccgacgaatatgtggatgtcagtctggagaaatggcattttgacgaagatgcccgggtaatccccatcatcattccgcgcaattatctgaacctctataactttggctttgcacaaagccggagtctgccgaaactctccgaaggtttgatgagtctggtacagatggatatcatgatgcggggcaacggacgtgtggaacaatataaaggcaacattgtaggattctccaaccggctgaataccattctcgtcccccaatccttcatggactgggccaacaagaattttgcaccggaaaaagaagctgaaccgtcccgacttattgtggaagtgaagaatcctaccgacacagccatcaccgactatttccagcaaaagaattacgaaaccgaaggcaacaatctggatgccggaaagacaacttatttcctgcgcctcattacagctattgtcatgggagtaggactgttcatcagcattctgtcattctacatcctgatgctgagcatcttcctgcttctccaaaagaatacggtaaaactggaaaacctgctgctgataggatatagcccgacgcgggtagccacgccttattatatactgacagtagggctgaatgtactggtactgctcctcgccatcggctgcgtggcatgggtacgcagttactatatagaagtagtccaaaacctcttcccgcaactggagagcggttcactgcttccatgcatattgaccggttgcctattattttttgctgtatcactgctgaatattttggcaataggcaaaaaaattatcagtatctggaaagggggaaaataaagatgggaaaaatccatccaacagatataaagttcatggtagtgttggtattatgtctcagcatggcatttcccatctctgccaatgactttctattcacttccattgacacctcgcacggtctgagtgataaccagatacgctatatcctccaacttccggacggaagaatggtatttaccaccacccagaacgtcaatctgtatgatggagccaacttcacctctctgcagcctacccccgaatatatatatccgctgaaacaatacaagggcttctaccatgtctatctgagcggtgattccctcttgtggataaaggattaccaacggctgatgtgcatcaatctccataacgagcgatacattgccaacctggactccgtctttcaacagaaaggtatgcagcatcccatagaggatttgtttgcggacgaacgggggctcgtctgggtaatcagccatggcgagctgttacagccggaactttccttccgattgaaactgtctgaaggccgaggaacaatacaagacctgactgcagacgaagaatctctgtatctgttccatgacacgggagaaatcgtgtgctatgatgtaaaaaacggaaaacaacagtatgacattgccgcatatccccggacggaacaagagaagttccaaaacacctccctcatactcagaggaaaaaacggattctatcaactgcgcaacggctctaaaggaggatttttccatttcgacctccataagcgagcatgggagaagctgatggaaacagagtataccctcaatacactgatgatctccgcagatgagaaagcatacatcagctgcatccgtggcttttggattattgaccccgaaaagaggacacgccactacatgcccaccttgaggacccgaaagggcaacgtccttgctacagaaatcagtacgattttccaggaccggcaaggagctttatggttcggaacattcaacagaggattgctgtactaccatccggccttatataagcacatccacatagacaagaaggatttccccctatcacttgaaagaaatacagccgtagcaaacatatagtcttgtcaatcgccatcattgcggcaagcatccgcctctacatacaccgcacccggaaggagatggaacggaaacacaaagaagaaatccttttgctccgcatccgcaacttgatagagcagtgcaaccgttatgaagcggaacaaaagaaatcaccggaaggacaaaacataacttgtgtacatagccataccgaacctccccaaacagaaaacaagcaagacgcatccgaatctgttttcctgacaaaagctatcgaactggtggaaaaaaacctgcatgtacccggctactccgtagagcagctaagccgcgacttgtgtatggaacgcaccggactttaccggaaactggtagccatgctcgaccagtcccccagcctcttcatccgcaacatccgcttgcaacgtgcggcacaactcatcctggaaggcagcctcagcattacggaaatcgcagagcgtaccggcttcagcagttccagctatctcagcaaatgtttccaggaaatatacggctgccgtccctcggaatatgcggagaaaatgcagaaatcaacctgagtattgttccgtttcaacaagattgttgccacctaaaggggattcaaggttacttttgcagcataattttaaaagaaccatgaaaatgaattttatgaaaagagccggcttcgtgctgacttgtgcaaccatgcttgcaaacttgtgtgccgcccagaacacagagcgcacacctcaaggaatgaaatgcaccacacaaggaatggacatccgtgtggaattctattcgccttccattgtgcgggtttacaaaactcccgaaggcaaaccctacaacaaagaaagtctggtagtggtcaaatcacccgaaacggtcaaagtggacttttcggaggaagcaggacaaaccgtgctgaaatcttctatattgaaagttcttgtcaatccggcaaccggaggcatcagtttccataccatcgccggcaacgagctgctgaaagacaaggactacggcacctcttttgccgataagaatgatgccggcactccctcctatcaagtaaggggctctttcctattggataaagacgaacccatctacggagtaggacaagtgatggacggcaaattcaaccgccgcaactccatgcaccacatgcagaacgagaacatgttcacctattctccttatttcatgtcgcccgtgaaaggctatgccgtatattgggacaactactccatttcagaattcatggatactccgcaggaactcgctttccagagcctgggacactgtgcggactattatttcatgtatggcggaaacgccgacggcatcatcgcccaggtgcgcgacttgacgggacactcccccatgcttccgttgtggacctatggtttcttccaaagcaaggagcgctatcatacgcaggaagaaagcctgaatgtcttgaagaagtatcgcgagctgcaaattcccattgactgtatgattcaagactggcgctactggcccgaatatcagaagacggacagtgcgtggaactcacacagctttgaccctgagcgctttcccaatcccaagaagtgggccgacgaaatacacaaactgaatgccaagctgatgattgtggcatggcccggctttggtacccacacagagcagcgcaaggagctgaatgccaaaggcatgattatcaattttgatacctggcctccacaaagtggcgcacgcccctacgacgtctacaatcccgaagcaagggacatttattggaaatatctgaataaaggcattttcagttacatcggcaacgacggctggtggctcgattctacagagcccgaccatatcaaccgacaagaatcggactatgacctccccactcacttgggatcttaccggagtgtaaaaaatgcctactcactgatgcacaacaacggaatagcctcgcatcaaaaggctttgagcaaagacaaacgcgttgtcatcctgacccgttccggatttatcggacaacaacgttacggttgcaacacctggagtagtgacgtgacctccacttgggacatgctggagaaacagattcctgccgcactgaactacaccttaatgggcattccgaactggaacagtgacataggcggcttctttgccggacgctggaaccaagaagggggagccaagaaccccaaataccaagaactgtatgtacgctggatgcagttcggcactttctgcccgatgatgcgttcgcacggtacggagttgccccgtgaaatctggaacttcggcaagcgtggcgagtggtgtttcgatgcccaggagaagatgattaatctgcgctatcgccttctgccctacatttacagcacttcctgggatgtgtcccacaatgacggtacattcatgcgtcctttagtaatggattttgcagcagattctaaaacacatgaagttggcggcgaatttcttttcggacgctccctactggtagcaccggtcacccggccggaagtgacggaatggtcggtttaccttcctcaaggcgcagactggtgggacttctggagtaacgaaaaacagcagggcggacagaccttgaaccgctgtgtatcgaaagagattctgcccgtctatgtaaaagccggcagtatcctgccgttcggtcccaaagtacagtattccgccgaaaagaattgggacaatctggagatacgcatctatccgggtgccgacggcacattcaccctctacgaggacgaaaatgacaactacaactacgaaaagggagcttattccaccatccgcttccattgggacgacaaggctcgtcgcctgacaatagaagagcgggaaggcagttttccgggtatgctgaaaagccgcaagttcaaggttgttctggtcggtcagaactccggtacgggagaccggccgatgaaaggcggaaagacaataagctatgcaggaaagaaaaaaagtataaagctgtaacagtaaaaaggaggaacgtgtcaaaactaccttactattttttaggcgcggattacgcagatttcaagaattcaatttgcatagtccgcgttattccacgtaatccgcgcctaatattacagcataatgaagtggtcatatactttattaaaaaggaaacagcaacggcaacacaaataccatcaccactcccataataatctgcaacgggagccccacttttatataatccatgaatgtatattgtcctgccggcatcaccagtgcattgggcggtgtagagaatggagaagcgaaacacatgcttgccgcaaccgtcacggcaaacaagaacggaacgggacttactccaatctgaaccgcactttgaagagcaataggggccatcagcactgccgtcaccgtattgctgatgaacatggtcatcaatgaagtggtgaaatagatacctgccatcaacacaataggaccataactgcccaatccgctcacaagactgttggatatatattccgaggcaccggttttttcgagtgcaagagacatggggagcatggctgcaaagagcacaatcgtttcccagtttatcgttttataggcggcttccacattcctgaaacatcccgtcagcaccatcagcaagccggcaatcatcaccgctgtcaccggggccacgggaataaagtcgaagaccatcatggcaaccatcagcaccatgatagcggcagctatgggcgctttataatccagcgtcactttggcggcttctgccaaaggctgccccaataccacccaatcggaatcttccctgcttatccgtgcgatgtcctgccacgcaccctgcaccagcaaaacatcgccactatgcatacgctcacgtcccaattcacgtaatatatattccttcttacgacggatgcccaatacatttacattaaatttatcacggaaccctgcttccttcaccgtccggttcacaatattggaagagggcatcaacacgatttcggcgattccgatgtcataaaagtcaagggacttgtcggctttggaggcttcttcagtggtatgcccgtcgagcatttccattaaaaagtcttcagcaaaacgatttacgttcgacacctctcccgtaatgtaaagcacgtcgcccacccaaatggtcgtatcgggcgatgccaatttctgggtaatggttttcaggaatctatgttgggaagagtctacacgccgtacttcaatgatattcagaccatacttgcggcgtacatccaggtctatgatggtttttcctatcagacgggagtcattgacagccctcaaacggaacagattgctggaaagtccgtactcctgtaccagttggtccaatgatttgcccgacaatgttccgtcattctttttacctttcttggagagaaaccatttggtcagaggcattaaaaccaaagttcccactatcacgcacacaatgcccaccggcaaaaaggagaagaaagacagcggttcaaagcccgctcccgtcaatgtattctgaatgaccaagttaggaggcgtaccgataagtgtcatcataccgcccatgctgctggcaaaagccaaaggcatcaatagacggctaggattcattccggcactcagtgccaagctcaccacgataggcagcatcaaagccaccgttcccgtattgctcacaaaagcaccaatggcagaggtaaccagcatcaccagcaagaagagtttcagttcgctcttgcccgccagctttaaaatgcgcgaacttatcattttagccagcccggtctgaaaaatggcgccgcccacaacgaacaagcccaccatcataatcaccaccgagttggagaagccggaaagggcctcttcaggagtaagaatctgaaatatcaataaaccaatcagcgcacaaagcgccacaatgtccgaacggactttgcctgctacaaaaaaggcagcggagagaacaaggataataagggtaatcagcataaatatgtatattaagaatgcacaaatatacttatttacgcatgatcacacaaccccttactacctcaaattactgattcagaactcgaatttttccaacttcatggcagccagcccctggattttgggcaccagggccacaaaatggtctgctttttcatgggcagacaatgactctgcatctttccatgtttcacaaatcataagaacatcgctgcgagtggcgctctcaaacacatcataagcaatgcatccattgtccttcaaggaatatgcaaccagttctttggcagattccaatactgcggcacggttctccgcacttacctgaataaaaacatttaatctaatcatacttgtataaattttaagtgcatcgcaaatttaagcagaataaatatctccaccaacaaaagtaaattgttattaattcctttcccgccggatgaaccaatctttggcaagtatgttgtctcatcagaattgattctaactttaactattaaaaactgacttgattatgaaatgtaaagattctaatttctggattggactgggaataggttcggttgccggtgcattggcctaccacttctcccgtacggagaaagctaaaaagctggaagatgccatatgccgtgccatccacaaagcaagtggcgaagccaaggagttcatcaacactgctgaagaagaagcattgcacgttggcaccaaagtagcagacaagatggcccatgaggcccatgaggccgcagagaaagctgacaatctgaaaaacaaggttcacaattttgccgatgctaagaaataaaacaagcacttggaaacttctgaaggggtgtgtcaaaattcaccacagattacacggattaacacagaatgagcttaatctactgataatcaaagatgcttatctgtgcaaatctgtgtaatctgtggtgaataccagtttcgacacaccctctttgcatatcgacccatcagttctgcagactgcgccgattcaaaatatcattcatatgctccaatgcccatcctaccaaagattcaatatgcggcatcaggctacatccgatttctgtaaggttatactccacacggggaggaacttccgcatagactttcctaacaatcagcccgtccgtctccaatgagcgcaatgtaaccgtcagcatccgctgggaaatatcccctatggttttctgtatatcgcaaaaacgcatcgttccattcgctttcagtgtgaccagcacaagcattgtccatttgtctcccaacctgctcagtacatcccgtaccggacaagcatccatacgatgaaaattttccattcctttattttaccaatcagttcaacctcagcaatggcgactctatgcttagtgtccggcattgcaccacaaaagtaataaacttactcaaaataactatcgtttcatacgataattaaaacattctttatactcgtaaatgcatctgcctcatccggattatttgtatttttgcaacatcgtttcctattcatatgtaactgcaagactcttatgaacgtaaaaatagaagaaagctggagaaaacgcctacaagaggagtttgacaaaccttattttgagaagctggtagcatttgtaaaaagtgagtatggacatgccaacgtgctacctcccggccatcaaattttccacgtcttcaactcttgcccgttcgagaaagtgaaagtcgtcatactcggacaagacccttatcctaatcccggtcagtattatggagtctgcttttccgtaccgaaaggaatagccattcccggttctctggcaaacatattcaaggaaatacatcaggacttgggaaagcccattccgacttccggaaatctggaccgttgggtagcgcaaggcgtgtttcctatgaattccgtcctcacagtacgtgcccacgaaaccggctcgcaccggaacatgggatgggaaaccttcacagacgctgttatcaagaaactgagtgatgaacgggagaatcttgtattcatgctttggggagcgtacgccaaagagaaagccgctttaatcaatagcagcagacacttgattctgactaccgtccatccgtccccacgttctgccgaatacggattcttcggttgcaggcacttcagtaaagccaacgatttcttacggagcagagggatacaagaaatagactggtaacacgctacaatactccgctaactccgcttccaaacaaagcaaagtcccccaggcacgggtcgtccggaaaggcctctgccagagcttcagtaatccggcgggcattcttcaaagaaaatgtttctgtctcggtgagtcccaaagcataggccacacggcagacatgcgtgtccaaaggcacaatcaggtccctgcaatcaaatctctcccaaataccaaaatccacttccggacctttccttatcatccagcgcagaaacatgttcagtttcttctgggggctctttgccgagacttccaaaaatgcgcataacctttccatcggattacctgcatacgtacataaggcatcctccagactgtcaaaagcagaataagcagcatgcaaacgtctgaaataggaatgaaagtcggcataagaaagcatccggtaaaaactgcttctgtccgcagcaggaaagtcgttcttccatcggcaggacaacacgtattgatgaggcgatgcccccatcaccctatgcaactcatcagcctttttcaatatctgtttacggttgccgaaactcatgatggcagtcagcaacccactgatttcaatatcctgcttccgttcatagcgatgtggaaactgtacggggtcgttctgaatgaagccggcgcaatgataggccgccgcccactcccaaagttgtcttttaatctcctcggtcatctgcaagcatttgttcttttcatctgaaatgcaaagatattgcaaattgagtgcagaactttcatgcttgcacgaaaaagttgtgccgaaatacagcttatcttattttaaagattttgcatttatagcaacatcggacaagtaacctatttcttttcctcctatttttgcaacatgaaaaagcccaatagagccatgcagcagaaaaagacaacccaggaagaataccaaaagtgtgtgaacgcagtagtagattatataaatctgcacctcggagaagaaattgacctgaaatctttggccaggatttcccatttctctcccttctacttccaccgcatcatgaaagctttcctgggtgaacccgtcggtacgttcattgtccggacgcgtaccgaagccgctgcccggttgcttcgttactcggacatgccgatagcggacatagcctaccgtataggctactcttcgccttcgtcactgtcgaaagtattcaagcagttctacggcatttcaccattagaataccgtaacaataaaaactttgtaattatgaaaccagccattattcgtccggaactggaactgaaacacgaaatcaaagaagttcctgcccgcaatgtgatttacatccgcctctttggcgactataaactgaacgactattgcagcgcatggatgcgcctttgccagttcatccaggaagaaaaactgcctatgggagaagtgatgccctactgtatctatcacgatgaccccaaagtgacgcccgctgaaaagctgcgtaccgatgtatgtatggtcctaccctcatctgcaacggccaaaggagacataggatttaaacagctcgcggcaggccgctatgccatattcctatacaaaggtccatacgaacatctgcaggccgtatacgataccatctacgggaaatatatccccgaaatggaatgtagcttacgggatgagtccagtgcggaacgttacctgaacaaccccgcagatacggcgccggaggaactgttgacagaaatctatattccggtagagtaggcaagctgttctgccggcgctaccaggccttctctctggaagagtttaggaaccggacagcaaacatatattcgttccatcatggggtaaaaatcattccaccgcggagtaaaaatcgttccaccatggtggaacgatttttactccatgacggaacgattaaatattaggcaagccggtcggaaccagatacgaattaccatatataggaatgcaagccgacgcgatttccctcactatcggtagataccataaagattcaaattgtccttatttcgcttttttataatccgcgatgaaaccctccatcatccacttggccaaagcctggcggttcgaactgattacaaaacggcgctggtcaaaagtgttctggatatttcccagttccacgaatacggaagcgggagaagtgttggccaacacatagagattgcgtgcgctgacagttccggtaaacccacggttgggctggtgcttgtcatatttcgattcgaaagttttcttcatggtcttagccagacgcttgctgtcgggcttgtttttggagtggtaaaagaatacatcggtctgatggctcttgctacggctgtccacatgaagaaaaacggcacggcagtatttatagttcttacggtccttcttgtaaagctcattgattttggcacaacgttgctggaggcgcgctacttggttcaagggtatggaagctcccatgcacgtctcacgtttgctgttggaaaggtatttgccatcacggattccgtctttggcatcctggataatgatacggacttccgccccctcctgcatcaggttacgggcaagacgcaaagctacatcataggcatactcgtcttcatgcagttctattttgccgattctgccgatagctccggggtcggggcctccatgtccgctcactacataaaaacaagcgccctgcaaacggttggatgtcacttttacatcggcaagcgctttcccgaacaaaggttcattgattgccctttttctattaccggccggtttggaggcagaactgtctgtcgcaccttcttttccgccatccacggagtttcctccattccgcaatggtggcagtacatacttcactcccagtcgtaattcttctttccctttaaggcgtttcttgttcagctccaaaaactccttataataggctctccccgggcgcttgttacgttccaggaaaacagagattccttctccacgtctcggactatcccgctcttcctgagccgaagcattaaaagcaaacaaagtacaaaagaagatggtcagtaaacaaaatatgcgtttcatattccaattattcatcatttattcggttcgctacaaatttccagccgctaatttatagcattttaccatacttaagcacaaaattataattttttccctacttttgcgacaacttacgcgataatagataagaaacttttaaaacagataacattatggcaaagcaattcaagccggagacgctgtgcgtacaagccggatggactcctaaaaagggcgagccccgtgtactccccatctatcaaagtacaactttcaaatatgataccagcgaacagatggcacgcttgttcgaccttgaagacagcggctatttctatacccgcctgcagaaccctacgaacgatgcagtagccgccaagattgccgccctcgaaggtggtgtggccgctatgctgacatccagcggacaagcagccaacttctatgccattttcaatatctgccaggcaggagaccattttgtttgctcctctaccatctatggcggaacattcaacctcttcggagtaactttgaagaaattgggcatcgacgtcactttcgtcaacccagatgccagcgagaaagaaatttccgctgctttccgccccaataccaaggccctattcggcgaaaccatctccaaccctacgctcgaagtgctcgatatagagaagtttgcacgcattgcccacagccacggcgtgcccttgattgtggacaacaccttccctacccctatcaactgccgcccgtttgagtggggtgccgacatcgtagtacactctactaccaaatacatggacggacatgccaccagtgtaggtggagccattgtagacagcggtaacttcgattgggatgcacacgccgacaaattccccggactgtgcacaccggacgagtcttaccacggactgacttatacgaaagccttcggcaaaatggcttacatcaccaaggctacagcccaactgatgcgcgacctgggcagcatccagtctccacaaaacgcattcctactgaacctgggtctggaaacactgcacctgcgtatgccccaacattgcaagaatgcacaagcggtagccgagtatcttgcccagaacgataaagtggcttgggtgaattattgtggtctgccgggcgacaaatactacgagcaggcacagaagtacatgccgaacggctcttgcggcgttgtcaccttcggcttgaagggcggacgggaagagtctatcaagtttatggattcactgaaactggcggccatcgtgactcatgtggccgatgcacgtacttgcgtgctgcacccagccagccatacacaccgccagttgacagacgagcagctgatggaggcaggtgtacgccccgacctgattcgcttctcggtaggtatagagaatgcagaggatattattgccgacatcgaacaagcgctgaacgcctaaaggaataaacaaaagggagtgcattttcggacaatgcactcccttttcatttcaatattctctattactcaacattcaatataatcgtcaaactttccttgccttggtagaaggtctttgctttcactaccagggaaccacacttcaccggttctttccataaggttgactgggcagtaggttccgaaccatcagttgtgtaacgtacttcagcaccatcaatggccacattagcatacagatttccatcttttaccaataatcccggctgaggcaagcggaagttaatcccattctttgcccaataaggcatttcactcttgctgattttctcataataaagtgccaaagcctgattgaaagcctgctgctcccgcacgccggacaggttttcccataccggatgagcattccagccacgttctgccagccctaagattttcgggaagagaagatattccacgccatcaaaactacggatagtttcggcaaacaattgcccttgtacacccataatatgcttcttgcctatctctgtcaaagcagtcttccccttttccgcattattcaaatcaatgggattgcctgccatatccacacgcagcgaacgataaatgctgaaaggaagcatagagaaagagacagactcatccacataacctccccaatcgagtccacgctcgtccggatgaccattgtaagccatatccatatagaaattgcccacgttgcaaaggatgaccgggtaaccgttattggctgtctgataaaccacttcatcagagcccggtacagtattccagcaatacacaccggcagcctggcccctcaactgttgatgagcctcttcggtatgccccaaagcaacttcctgccaaccactgaatttcagtccgttcttctgcatcacatccgccatttgcgtaatgaaatactccgacaaatcatgagctttcgtcatgcctttttccttcatcagttcctggcatttcggggagcccatccacacaccgcgaggcacttcgtcaccacccaaatgcactgtgtacagtgaaagaccagcttcctgatacatcgcattaagttcctgaatcaccttctccataaaacggtaggtagaaggcaaggcgacattcatcacattgtccgtataatattgtacagaaacataacgtgaagtatcttccggttcactcaacatatattctgtagctttccccggatcagtttcaaaatatttgttatagcgtgccttcatggagacaatggcagcgcgggcatgccccggagattctatttccggaacaatgcggacatgtctttcggcagcatacttcagcaaatcaataaattcctcgcggctataatatccattgcctacagtctttgcatcagggtcatagccaccgtcataacatgggtagaggcactggctttcgtcagtggtatgcccgcgacggctacccacagcagtcagttcctccaaaccaggaatctccaaacgccaggcttcatcatcacaaaaatggaaatgcaggacattcaatttataagatgcaaaaatatccaccagtttcttcaagttctccggagcggtgaaattacgggcaatatctatcatttgtccacgatatgccaagtccggataatcccgaatggagactgcctccagcaaataaggtgtctgcttgtccttcaacattgacaaaagtgtccgtgtaccattaaagatgccatgaggagtggcagcactgatttttatcaggttgtcatctatattgatagtataatattcatcatttacagcctccttcctatcaagcagttcttccagcacaatcttcacggaagcatttccgacaacttccaaaccatacaaacctgtcagtttctctttcagcaacttggcttcaccggcaaagttctccggaaatgccaaagctaccttaccttccaatacgacattatcgccttcaatggctaccgctttctttacagacggaagaatgtctgactgcaccaaagcaggagcaccagccaaacgaagattggattcataaatcttagtcgcatccggatagccgctcattgactcgggagaaggaagcggcagcgccttcaaagccacgggcaacggactgccctctttaccatccacagtctccacccaataagttccttccggtacatgggagttccggtccagcttgtaagtgcaaaggaaagtgatccgcatggaatcaccgggagccagcggagcaaattcgtctgtcggatacattttgaaaaaattaccgttcactacctctaccttcacttcagaggctccttcctgcttcacccctcggggaagctgtgaatagtaaatcgtccagttcttttttagaggtttttgagagatattcttgagaataaaggtattctcataatatccgggttcgatgtcacttgcacccatttcccaggtcagagcaaccggtgccttaggttcattactcgttttacatccagcaaatagtgccattacacaaaataataatcctgccagaggaagtttcaaaattctcatgcaactcatgtgttaagttaataaatgggggtaatctctaaaatctgatgccaaaaataagcattttaagctaattaactgataaaagtaatagattttattgacagcgagctacaatttagaacttttatacctacatttgcagccaaattataaccaatttaactattctaccatggctaaaataaccaaagaagcagccttgctctaccattcgcaaggcaaaccgggtaagattgaagtagtacccaccaagccttacagtacacaaaccgatctttctctcgcctactctccgggcgttgcagaaccgtgcctcgaaattgagaaaaacccgcaagatgcatataaatatacagcaaaaggcaatctggtagctgtcatctccaacggaaccgccgtgctcggcctgggcgatattggcgccctcagcggcaaacccgtcatggagggtaaaggtctgttgttcaaaatttatgccggtatcgacgtattcgacatcgaagtaaatgaaaaagaccccgacaagttcatcgaagctgtcaaggctattgccccaacattcggaggtatcaacttggaagacatcaaagcacccgaatgtttcgaaatagaacgccgcctgaaagaggaattggacatccccgtgatgcacgacgaccagcacggcaccgccatcatctccagcgcaggattgctgaacgccctggaagtggcaggcaagaagatagaggaagtgaaaatcgtcgtaaacggtgccggggcttccgccacctcatgtaccaaactgtatgaagcgctcggtgcacgccgtgagaatatcctgatgctggacagtaagggagtcatcaccagcgaccgcgagaatctgaccgagcagaaacgttactttgccaccgaccgtcgcgatgtacatactctggcagaagccatcaaaggcgccgatgtattccttggactgtcaaaaggtaatgtgttgacccaggacatggttcgcagcatggcagaccatcccatcgtgtttgcccttgccaaccctactccggaaatctcttacgaagacgccatggcagcacgtccggacgtactgatgtccaccggtcgttccgactatcctaaccagattaataatgtaatcggtttcccctacatcttccgcggtgccctcgacacgcaggcaaaagccatcaacgaaacaatgaaaattgctgccgtacacgccattgccaaccttgccaagcagcccgtgcctgatgtggtgaacgaggcataccacgtaaacaacttcacttttggtcccgaatacttcatcccgaaaccggttgacccgcgcctcatcaccgaagtgtcctgcgctgtggccaaagctgccatggaaagcggtgtagcccgcaaagacatcgaagattgggatgcctaccgcctgcaactgcgtgagctgatgggttacgagagcaaactgacccgccagctctacgacaccgcccgccgcaacccgcaacgtgtggtatttgccgaaggcatccaccccaatatgctgaaagctgctgtggaagccaaggctgaaggtatctgccatcctataatattgggcaacgacgaagccatcgagaagctggcaaaagaactagaccttagccttgaaggtattgagatagtaaatctgcgccatccgggtgaagcgccgcgccgtgaacgctatgcccgcattctatctgaaaaacgtgcccgcgaaggcgtcacttacgaagaagccaacgacaaaatgttcgaacgtaactactttggtatgatgatggtggagacgggtgaagcagacgctttcatcacaggcctttacaccaaatacagcaataccatcaaggtcgccaaggaagtcatcggcatccgtccagaatacaaacatttcggcaccatgcatattctgaactccaagaaaggcacatacttcctggcagatacgctgattaaccgtcatcccaatgccgaaacgctgattgacattgccaagctgtcggaatataccgtccgcttcttcaatcatacaccggtaatgggcatgttgagttactccaacttcggtgcggataaggaaggaagtccggtaagtgtacacgaagcagtggattatatgcaacaaaactatcctgaccttgccattgacggagaaatgcaggtgaatttcgccatgaaccgcgaaatgcgtgatgccaagtacccgtttacacgcctgaaaggaaaagacgtaaacacactgattttcccgaacttgagttctgcaaactctgcttacaaactgttgcaggccatggatacagatgccgaactgattggtcctatccaaatgggattgaacaagcctatccactttaccgattttgagagctctgtgcgcgatatcgttaacatcactgcagtagcagttatcgatgctatcgtagacaaaaagaaggcagtcaaatgagacgaccgttatcaaaattccaaatagtttgcattgtgctgctttgggcagcactttgctacattgttttgatatctatcgaacgaattgacggtccaatcattctaacgcttgccatttcggcggctttagtatttattcccgtcataaagtctctaaaaagaggataaataatatctttttattccattttgcggtataaaacaataaaattgttgttttataccgcattttctttataaaatgtttgctcgtttcatttttatgtgtacttttgcaaccgcaatgagaggaaaaggaaacaaaccgaaaatcgaattgttttaggtaacatatagtagcaaccaataaaagaaatagattatgaatgcagctaaggtattagaagacctgaaaagacggttccccaacgaaccggagtatcatcaagcagtagaagaagttctttctacgattgaagaagagtataacaagcatccggagtttgacaaagccaatctgattgaacgtctttgcatccccgatcgcgtttaccaattccgtgttacttgggtagacgataaaggtaacgtacaaaccaacatgggctatcgtgtgcagcacaacaacgctatcggcccttataaaggcggtgttcgtttccacgcttctgtaaacctgagcatcctgaaattccttgctttcgagcagacatttaaaaactcattgacaactctgcccatgggtggcggtaaaggcggttcggacttctctccgcgcggcaagtcgaatgctgaggttatgcgtttcgttcaggctttcatgctggagttgtggcgtcatatcggtcctgaaacagacgtacctgccggtgatatcggtgtaggtggtcgcgaagtaggtttcatgttcggtatgtataagaagctggctcatgaatttacgggtactttcaccggtaagggccgtgagttcggcggttcgctgattcgtccggaagctaccggctacggtaacatctacttcttgatggaaatgttgaagactaagggtactgacctgaaaggcaaaacttgtctgatttccggttccggtaacgtagctcaatatacggccgagaaagtattggaattgggtggtaaggtattgaccatgtctgattctgacggttatgtatacgatccggacggcattgaccgcgaaaagttggattacatcatggaactgaaaaacctctatcgtggacgtatccgcgaatatgctgaacaatatccgggtgtgaaatatgtggaaggagccaagccttggggcgaaaaggctgatatcgctttgccttctgccactcagaatgaattgaatggcgaccatgcccatcagttgatagctaatggggtaatggcagtatccgaaggcgccaacatgccctctacaccggaagccatcaaagtatttcaggatgcaaagattctgtatgctccgggtaaggcagccaatgctggcggtgtatcagtatctggtctcgaaatgactcagaactccatcaagttgagctggagtgcagaggaagtggacgagaaactgaagagcattatgaagaacattcacgaagcttgcgtgcaatatggtacagaagccgacggttatgtaaattacgtgaagggtgccaatgtggccggatttatgaaggtggcgaaggctatgatggcacaagggattctgtaagaataaaagccatagttgttatgaagaaaggcgaagggagttgcacctcttcgcctttcttcataatagcaacctattcagtagggacatattaagaatttccttgtctttccctcattttttattcggtttcggactcatccataattctaacaaccctccattagcaaacacatcgtgagaaaaccagaatacatcatgatttttcacataattaaaacttcagtacccccttaatcggatagtgatcagaaataaaagtttttcctgcatatttttctcgaattgtaacgtattccgtacacattttaaaccctttataataaatataatctataatggagctacgggtcccccatccattgaaagtaccaaaagaatccgtttttttagcagaagttctagcatctatcattttttcattcagtttttgtatggaagaatctgtatgctccatattaaaatctccggtcaaaattaatggaaaattatcaggattaatcttctgtatcttttctaagatgagattcagaccttccttccgtgccactcttccgacatggtccaaatgagtattaacgtaataaaatttctccattgtctttttatccttcaaaagtgcccatgtagcagtacgggtacatgcagcatcccatcctatagaaggaatttcaggagttgaagaaagccaaaaattaccccactccaacaattctatttttttcttattatacattattgaagcatgctctccgtcgtgcttaccatcaatgcgtccaacacctacagcctcatagttcgtgcaattctcaagaataaacgccagctgaaaatccaaagcttcctgaactcccaaaatatcgggtttatgctttttaatcatttttatagtagctggctttctgaattcccatgcattaacaccgtcctctgccgtaccataccgcatattataagaaataacagtaagttgtgaactatttttccccctttttgcagaaacgaactgaggtaacataagggtaattaccataaaaataaaaaaggactgtttcatattaatatctataaaagagatgagagtgtaaaaaaccagaccaaacaatgtgcttatcaaggttccaatacactctcatccagattattactaattacgtgctatagttgtgatttctttaattgttgtatagttataacgattggtaccgctaaagctttttgtagtacgagcacctacacgcaaaaagaatttacgcgaataatcagggaattgtccttttgtcttaatagtaatttctttacctaaaacatcggttaaagctgcccctaacaactgagtagaaaaacgcggactgaagctgaaatctccgacataactcgtttcgctcacaaatagccaagcttcggtaagcggttgttggtaatccggattatttgtaccacgagtaattataaccttcacctccacagtaccatctgcattgacctgaggttcgcctacccatttcacgcgcaacagcggctcaatctcataagttttctctacagtaccttttatatcaataatctcttcatccaatggtacaaaagcaccttcaggaataataccataattgcctgcaaatattttggtattctggaaagtaccatcctgcatacaattaaaatcataaggttccggagtatcactccagctatactccatcatacggatacgaatgccggtattaccaatagctgtttggaaaggttctttggtttccttatcaataaaagcaccacggaaagtttcttcaggttctccataattatccacatcgcaagaggtaaaatttaccaataagcataaggacaacaaaatatatgttaactttttcataattgaatgtttcgtttcttataattaataacctggattttgtttacagttcggattcttggtgatttcaccagtcggaatctgctgataataattacgtgtatcataagtataagtatatccatattcctgctccttgatatccatgaaatacttcatggcatctgctgcaaagaatggctgcagagtgcgatatctgcgtgtagactgctcatcatcaataatacgccaacgcttcaaatcccaataagttttattttcgaaagcaagctctttacgacgctctatacgcactacatcaattgaagtttctgcagaagaagcaagcaacgtagcacctgcacgttcacgaataagattcacacagcggaaagcctcctctacataattcttaccggcatcatcggtaacactacccgcagctgcaagttccatagccgcctcggcacgattgagcaatacttctgcataacggatatcaatccaatctgtaacagactgattccaagttgtattcttctgttcaggattcagatacttacgaataaggaaaccggaaaccgtacagcctatctcctgattcttcactgtaccacttttccctgcacgcttcatcattgtaccatcctttaactgaattgcattagcatccgtattttgcgattcgcgactggccaatttcagcaaactcgtcgcatcgttagcataagcactataatcatcataaaagccataggtatcttctgaaggaagaagaggagaaattttatcaccttctccaacccaaataccacgacggatttcaatggattcacccttgaactcgtcacccggcagcaatacagtagcacgcaaacgaggttctgcattcttgaaaggttccattgttgtttcatacaatttataataaccttccgtgttcatgttggcaaaatgcccatcggcatctttctcaaaaccttcaaacatttctacaaaatccaatgtaggacaaatttctgtgttgctaccaccggtagaggtttgcgtaggctgtgcaaaacaatcatatgaatgtacacagtccgggtaatcaaaatatttcacgaaaatattctcttccgtatctttcaagaaaatattcacgaaattagtatattgtgcatctttattattagttgcccagtcccctttgtaaagagcataacctccttcatcaacaatcttcgatgcttcataagcctgtttaaaataatcggcagcacgatttgctggaattccgcaaatacgcgcatcattataaacttcattcacatcattatatttggcaatacttccagcataaagcatagtacgcgatttaaaagctgcagctgcatatttattggcacgtcctttttggttctttgcagacaaatgcgcaatagcgtagtccaaatcactggaaataaaatcccagacagcctcttccgaatcacggaacaattgtgtttcaggaatgcttactgtagccggataatcaattactgtgttaacaataggtacaccaccataacgctttactaatgcaaaataagtataagcacgaatgaaatacgcttcgcccaacaaactttcaatttcagcagcagaatgtgaatcagcatatttgggaagtgtttctataaaatagttcgtttcacgtattaaggcatacgcagcatcccaatagtttgctgtttcaacttctgcccccttcgtgtcacggctaatagcttcaccagtcaaacaagaaggttgcgcaaaattagaacctcccgaaaagaacatgtttacatgcgaatagcggaagtcttctacaggcaacgtactatacaaacgggccatatagcttgtaacccccgccgtacttccaaaaatatcattatcaccaacaatattcattggtgggatgtccagatctacacaagaagtcaatgaccccatgcataatgcaaatgcgaagatatattttttaattttcatgttgatattcatttaaaatttaagatttgctccaatagtaactgttttatttaaaggatagttatatccataatttcctgacgggaattcaggatcacaatatttcaatccggtaatggtaaacaagttataaccgcttaaataaacacgcagcccttgtacaccaattttagtcaaccatggtttaggaagattatatcccacttcaatcgtttttaaacgcagataagcagcattttgcatattgaattctgaattccggttcggcaatgaaccagtgtaagcataatgaccgctaatccatttagtggccggatcataaggatctgcatgaccatcagcaggacgccaacgatccataaattgatccaaagcatttgtattggcccacaatggattgtaaagcaactcatcataagagatatggcgtttggcagctccttgcaacaacagacttacatcaaaacctttccagcttgcattaaacgtcaaaccaaaatttatcaaaggacggtctcctgtattcgtcaaaggatgttcgtccaattcattaatccaaccatcaccgttccaatcctcatagttataatcaccgagtacagaaccacgtcctatataaatagaattgtaataaatttgatcccatgaagtaaaacgttcgccggccccatatccccaccaaagatctgtaaaacgatcgtttgaattttgtttccaattcaaataagaattacctttccgcgcaccttccacatgtttattttctgaacgggcatacgcaaaatttccttttatctcataactgaactcattgatggtattacggtgacttatttctatttcatatccacgggtcatatctccattcagattctcttgtggcaatgcggctcccactactcccggaagactcgctgcccgagtggtcagtagtccatcacgatcacgtcggaaataatcaacagtcaatcccaataagccatcccatgcttccaaatcaaaacctatatcaaaagttttagcttcaatccatgagatgctttgattagccaatccctttgttgcagaagcattgacaaatgagccatcaaaaatggcaccgcccggcatcgcatatgctgccccacctaccggatacgtataaccattaaggaactgatacgctaaagcaccatcgtctcccatcttaccccaagaagcacgtattttaaggttattaatgaaattcaaaaaagattctttccagaacttttcttcagagacacgccatccccctgacactgaaggaaacatagcccaacgtgaatttgcagggaattttgaagaaccttcataacggaaagcaaattcaataagatatctggacttataatcgtaagctacacgccctaccaatgcttgattggcattatcaaacaaggcagaagcagcagtactctgtccaaattgctggttatcagcatttccggcaaatacttgatctataggaatagaaagttcctttttaccattaaagttatcccccttataagtcgattcctcaaacagcagcatcgcatcaatattatgcccattaaactcacgagagtaattagcttgtacttgccataaagtattatcttttgaatagaatgtacgacctactttaggaggatcattacgtgtccatacctgatcatctcgatatgatttccaagtattttcaaactccttattgtcattcattatataatcgtaactatacaacccctttagtttcaatccttctacccaaggtacatcataactcaatgaaaaacttgactgaaaccatttgctcttataagttttatatcctacagcatccttatccatcatcgccaccggattcatcaaagtagagtttgaaggctgggtaaaaccgccattctcctgataaatgggatccatcggctgcatcaaccaaagaccacgaataatatcataagcaccataatgcggcgtattacgctcatccatcaaacctgaaagattaacatccaatttcagattcttagtaatattggcagaaagattactacgcattgtccatttatcgtaattcatatcatctgtctgcaagaaactttgttgcgcttgatagccaacactcgcataataatttacacgttccgtcccacctgaaatattgatggaatgttgtgtctgaggcgcagaaccacgtaatactgctgatttccaatctgtagtctgcgcagcagctatttcttcatcagaataagaagctcctccaccatctacattatgacgtcccttttcattagccaatgtcatccattcttgtgaagtaaccaagtctgggaaattggaaggcatttgccaagtaaagctacccgaataattaatttccggtttcccttgcgcaccttttttggtggtaataagaatcacgccattggcagcacgcacaccatagatagaagcagaggcatccttcaaaacagaaatactctcaacatcttccggatcaacgcgtgccatattatcgcgaggaataccatcaattatcaccaatggattccccagtccacgaatatccatcgatgtattgaaagctcccggctcacttgaattttgaaccacacgtaaaccggcaatcttaccagtcagcatattctgtaaactttcattttttgtagaaacaatgtccttcgtgtttacggcagatacagcaccggtcaatgtctgtttctttttcactccatagcctaccactaccagttcatcaatcaaaacattgtcactttgaaggatgacattataaaccttctgttctgccttgatggcaatcgtctgtgacttatatccgataaaacttactttaatcgacgaatttggcgtcacctctaaagaaaagtttccatcaacgtccgtcacacatccattttttgtcttggtatcaatgacagtggcgccaatcaccagctcaccggtgttgtcctttactgtacccgataccttaaaagagttcccttgtgcatacaacgtcactgtcatgaacgacaccattgcacacaaccaaacctttaaaagattctgtaccactaactttttcatacttattaaatttaaaattgcaatttgatgattattctattattactttcaacatgatatattcataaggcttcatccaaaacatctcgtcattaaaagatcttaaggccttctgacgataatcacatacacttacttcacgcggccttatactaccccaaacaaatgatgaacaaacactctgcttacccatattgtgcaggcagacaatatacccctttccatcgtcagcaggtttgatactggataatgcaatacgatggcgtcctttcaaccgaaacaactgctctatattctgagaagaacgactggctacagccaccaattccatctcgcgttcagctcctcgctgtttcaatttcaggtcaagcggattacaaggctgcaaagaatagcgaaacttcgctgtgcctccttgtgatgctttataattagtcctccatgtattcgtcattacccatgaatagacaatcggcgatatcttggcagactgccaccagccatatccatgacggggattcaggcgataatcaagccctgagggcgaacccagttcaacaaaaggcgcatcaacggtggtcaggcagactgcatgctccaaatctcccacagccaatccgttttgcaatgaataataatgtttgtttactccctccagttgctcacgctcaggatgaatttcactcatggcaagatccattgtaatttcaggttgctgaatattgaacggaaaaacaaaacgcacattttcaaaatctaaaatatcctgcttatccaacgtattacaaatatctaccctatctatccctttgtaaactgtcacatcacgccataaagtattacatcctggagctttagactctatacgcagtgtagcagcaaccgctccatcatccaacactcttatatttaatatctgttcgattccctgtgggtcagaagcatatcttccagtatataaataatcattcaaaccgctattcgaagcatattcataagagtcaccaactcttttgaaagaactaattgtacctttcacctcatcaatttcaacgcgtacaattccattatttaatattttattctctgcaatcatggaaacgaaacgtcttgaactctttttcttcgagacgatttgatatacctcagaagaaagtgctggtatattttcagctacaaaagcccaacggccatcatacagacgctgtgtctctactttttcaccagtcctggttatcaattctttttcattcaaattgaccattgaatccaaaaacactacatccgtacgattccaaagatttgtattcagcacatgtacaaaatccccacctttgtcgacatgcaatgggcttaaagcctgtttatataatatttgagactgattacttgcattatcagcataagcttttttcccttcccacaaatcttttgtaaatttagaatgtgggtcagttccactagcagaagccccccaagtgtgctcagaaaacagtatcacatttttccatgcttctttaaaagctttatctgggaaagcgtctgttttatgaagcatgctccaaatagtttcagtctgtgccaagcgtgcagcagtagtacgattcattgctgtctcacaagcagtagaagccgctccgtcttcccaagtgggagtcatgtcaccagcaaagacgggtaattcagcgccatattgttcttcgaatttcataaagaactcacgggcagttgatatacggaattgaggagactcataacgttcattccactcacggattacatcagacattgattgatcgggagggccgttatcaccatgaactgtataacgtaaataacaagtttgatatggaaactcctcagtttctaattctgttaaatagtcccagattggctcaagtccacaaactccgatacggttagccaaccagccatgaaaccatgagtaaccgcgccctgcctgccatacaagtactttatcagtacctgattgagattgccaataaaaaggtctatcaccccatctgacatgtaaagcagcagcacgatcatttcctatcctcccataaaaaggtacataattcggtccgggtgaataatatttcactccattcttagccattgcagtgaccaatccccaagcttgcccaggcacatcactcatcattgcagtattcagctccactcccacttcatcactaatccaatgtgcatcatcaaaaatatgcatcaattcttcttgtcggctaatcccagtcaaaatacttcccaaagacatatcaacattaataataccatcgcgaatggcctgcttcaaacgttcagccttttcagttgctgcatattttttcaaatatgcagcaactgcccatgtagcctccgtattccaacagtaacgtgaaccttccggatattctttagtacgctcagctaaatcgagtgcgcgttccaaattacgccattgaagtttcatcacatcatcctggcgatgtgtatatccgatatccaaatgagaatgcggaaaaaagcaaacagtccactttcttgctcccggcacttcatatttacgtttcacacaaccttgacggctattcacctttatctccaaagaagaggtctcttccatatatccagcagggaaatatcctttgtactcatccaccccagtctttgaagcctctatttcagcattccatattttatcacctaattgacacgttaaggtagccccagcatacaatggagtattaaaacgtaataagaattctcgtttaggaccttcagcactctttagataaccttgcccagccacaaaagaaatatcatcaagctttcccaatgattgtactgaaaccactgtttttttataaaaacgaatttcgctcagaccatagtaatccacattctggtgcatatcagcagcttcctgcatcacaaccggattcttacggtcataatgattaccttctccatccaacgcagccgtaaagcatatataacgtgctcttatacctttagtatccaaagaaaaatccacggatccaggattacgtcctaccgattcaggaattaaataatattccaaatcaccattctttagtaattgccatttattcccatcctctgagtactctatatataccttattgagtccacgccgagtatgctcattctgattatagttccatatctgaatcaaatctacttcaggacattttctacttttaccaaaatcacacaaaaaccagacaactccttcatgagtagacttattgtaacgaactggctttttagaaacttcagacaaccacatgccatgtcccaggttattagccacatgatagcacccctgcattccatctccattaactacggaacaaacagttcctttattcaattcgctgctggcagatactttaattaagctctcatccaactgtttatacacaacaatacgttgtgcatatccggtaatgaacatcattaataacaaaataacggtaatgatttttttcattccacaaaatattagtttttaataaaactgctaaacatataaagtagtctcaacaaaaacaaacctcattatatgtatgaacatatagatgcagcaaatatatataataaattcaaaaagcaaaagtaaaacaaagttttttttataaaaaaatgagatgtaataaattaaaagtcaaactaaacttaaattaatttatcactaaattatttataaaagaatacatatcaaaactcaaataattaataattaactaattacgtttaaaaatatctttaactacaatattaaaaaacaaacatttcaaagaataatgtcccagcaaagcccgtatttatcgaaatgattacataatacacattaatgttcatacattaattataaggtataaattatattttcattaaatcatcataccaaagaaaccatacaacacaaaaaaagcgtcttcgttttcgaagacgcttaaaaaataaaaatgatgatgtattaatagtatcaaaaaacaaatcactttacacaagaagttacttttataccaaaagcgcaatacattagatataatacgcaggccaacgtcaccacaacaccaccgataatacctacagtaccgatggcaaaaccgataactggagttaccactccccccccggcaacagctgtaatcattagaccggaaatctgatttgccttctccggacgcgcctgcaaagccattgaataaataatagagaaaactgatgaagcaaaaaagcctactgcaccaatacaaactatattcaccacatccttttccactcctattaaaactagcagcgaaacaacacaagctacaatatttatacgaaagtacctcatttctgcaatacgggtcaataagaacgcccctaacaaagcgccaatcgtacgactgaggaaatagacttgaggagcaaattttacttgctcatcagaccatccaaaacggatagacataagtttcgaactaataaagtttgtcgccacatccacgcctacaataaagaaaattcctaaaaacagtaatagaatagtccggtctttcagcaaagcaaacgtattcctcatggaaagatcactgttcgacacaacatttctttcccgttcaataggggttgcaatcagccaaactgtcgacaataaagtgatgaagccaagaatggggaagcaataataccatttatcccccccccaataatggacagccagcaatacaatctccgggccgaccaaagaagaagccgcttttattacctgcccaactgtcaaactacttgtcaggaaagctttgttagttataacattattaagcaacggatttaaagaaacttgtaaaatagcatttcctatacccaacaaggcataagccaccatgcaagttacaccatcatacgccaataatggcagaatcatacctacaattgtaatcaccatactaacaagtacggtattcttacgtccccatttattcatccgattacctatcggaattcctaaaaacaagaaccaaacaaacgccattgaaggtacaaacccggtcatcataggtgaccagttaaaactacgctgaacatagtctgatgaaataccgacaatatcacagaagcccatcacaaagaaaccgaaaagtaccggaaaggctgtcattatagagttttgttttttcattttcatggatttttatataaaatgtctattctgtcactcccacgtctttacgcagtttttccaattgaacagtcagtgcttcccgtacttttacatacttcgggttatcatatacattattgacctccatcacatcttttttcaaatcatacaattcccaaaagtcaatagcttcatcattcccactaccctctccataccaatgaatcaatttgtagcgtttagtgcgaatgccatcatgtttgcgtacactacccactgccggataatcgtaaaaatgatagtataactcatttcgccaattttccgcctttccatttttaaacaacggtaataaagagcgcccagacatctctttcggcacctccactcctgcaaggctcaggaaagtcggtgccaaatcaatattctgcaccagctctttgcataccgaatgtttcttgactaaagaagggcacgaaataatcagaggtgtacggaaagactcctcatacataaagcgcttgtcatacagtccatgctctcccaacagaaaaccttgatcagaggtataaactatcactgtattatccagaactcctttttcttccaaataatcaagcaaacggcccacttgttcatctaccgaacggatagtccgacaatactcttttacataccgttgatatttccaccgaagcaaatcctttccaaccggaggatttttcaagaattcttcatttttcttgtcataaatagcttcccatgtggcacgctgttcgctatccatctcagccattgccatcagccaactgtctctaatatattgcaatgtaggttcgttcttcaattctctcaccttaaaatcgaacgcatatcccatgtgccgatcaattgtcagctcctgagttttcatctgcggaccacgtgtcgcatagtcatcaaatagcgtttcaggttccggaaaatccacatcctcaaataaatgcatattgggaaagtcaggcatccaattacgatgaggtgccttgtgatttacaaggacacagaaaggcttctcatcggaaatgtttttctccaaccactctatggcatgatcggttatcaacgtggtagcatatcctttttcttttatatattctccgtttgtatcaggacgacggaacttgggattatagtattcaccctgatcaaaaagaatgtcataatggtcaaaccccttcggctcaacattcaaatgccactttccaaagactgaagttacatatccttctttttgtagcagctcggtaaaccattgtttctgtggattcaaacagcaccccaacctcgtctgtccgtgctgatgactatacaagcccgttaaaagggtcgcccggcttggagctgaaatggaattctctacaaaagattgcgtaaaaagcatgccattcccagccaaacgatcaatgttaggtgtcggagccaactttgaaataggatgtccgtaagcacttatggtctggaaagcatggtcatccgtaaaaatacaaacaatattcaacggtttattgggcactttctgggcccaaataggttgtactgccgataatatcggcagtacaaccatagaagtggaaaacagattatttttcataacatatttctcagtgagtcaattcctcattaggtgaagctcccaaacctaaaaccaattttcctccttttacgacctcactaaagggcaattgtacagtatcttgcggacggttgttcaaagatatatcctgcaaataacaatcacctaccgcctgcttcttagcttcgattacaaatttctctcccggataataatctttattcaaacggacagtgactttgtcaaacaaaggggcacctatctggaatttcggatcaatctccgtcaatccctttacatcaaataagcccaatgcagacattacgtaccaagcccccaattgtccttgatcctcatcctgtccataaccatagccatgtataccttcgaggccatagaactcatccaaaatagcacgtacccacttttgagacagatatggtttacccgaaaagttaaacaaccaagaaatatgcaaattaggctgattaccatgattatacaccgtcttcaatccggcgaacgcatccacttctttcccacctccaaaaatatttttctgtgaaagcaaaaagatactatccagacgattattaaacgtttcttgccctaccaaatctaccaattcgtctatctggtgaggaacataaaatgtatattgcacggcatttccttcttgaaatcccttccaaggagccaatggattaaaatcttccagaaaatttcctttagtatccttgggacgaatcaaacgggtctccggatcataaagattcttccagccattcgacaaattagagagtaacttatagtcatcctctttacccaaatgtttggcaaattgggacacagcaaaactactgaaactgtattccattgtatgtgaagcaccaaacccagatccttcctcacgagtcaccatatcaaaccgtttttcataaggagaatatccacgttccacaaactgacgtacatccatcttacctgcaccttcaagtcttccacgccattccacttcattcttcaaagcagcttcatatccctgctgtacgtcaaaatcacgaataccgcaattatatgcagcagcaatagccaagctagtaaaattcgtccctactccagacacatatttactgcatgcgatgccatcacccaaccaaccggcatcctgataaaccaacaactgactttttatccaatcagaataatattcgggataagccaatgaccataattgcgtcagattccagaaaccaccccaaatggcatccgtattataatgctgatgtaccggattaccttcttcatcaagagcaatacgaccgaccgttccattatttttaggataatatccatttgcatcactagccaatccacgccccaaaagcgcatggaacaatccggtgtaaaacttcactttatcagtttccttccctccttccacataaatcctgctcagagattcattccacacatctgttgcattcttcttggcttggtcaaaggtaacatccgcagcctcggtttcccggttgaaacgagcattctctatggaagtataggataggcccactttgacttccacagcctcttgttcttctgtagagaatgtcatgtaaagacccgcgcctggtcctttttcctgatgtttacccggattaaccacatcttttacaaaagtacctacctgaaccggcttcttattaagaacagccgagaaatacatacgtacatctgcccctttctgataaatattaacatatacgggggaagtgattacataaccttccacccggccatcttcaaaatattgtacttcggcatctttcacctcaccactttctccttgcttgttacctatatcgaagataaggtttgccagttctgttttgggataggtataacgatgaaatcccactcgtttcatagcagtcaattcagcctttactccatagtccttcaacaaaacagaatagtacccgggagctgccacttcatctttcttatcgaaacgtgaacgataaccgccatccggattttccaactcacccggtactgtctgcaattctccgacagtcggtgcaaatacgacaccgcctacctggaactcgtgaaaattggcaaagccttcgatggaagtatgacgaaaatcataccccactgcttgccaaccaccgggatttcccaaatgcgcatcggtagaaggagccagttttgccatgccaaacggaatagcagccggtgtataaaagaaccaacgacaatgcgcagttccaatgtttgggtctacatagtccaccaaagctttagtgcttgaagtacttgttgaacaccccataatgatactcatacatatcaccaaaaaacaaagtcgtttcatgatattaatttattaagacggtagacactaacattatttattttccgagcatggagcaatcccccatgacttattcggtttatcacccatttccagtatcaattctccaccttttagcaattctgcagcggggaagtagaaacgttccaacttctcaccattcagagtggcactctgaacgtacttattttttctggatacatttttagcctcaattgtaaatgtttcaccacgattatagcgtttgcccaaatcaataaccactttctcatacaatggactggcaatttcataaataggttcgacactgcaaccgccatcagtctgaaacagtcccaaagccgccatcacaaaccaagcactcatctggccctgatcttcgtcacccaaataggcattggcaacgccacaaccataatatctatcaataatggaacgggaccatttttgtgtcagccaaggtttattggcccaattgaacaagaaagcaaaatgcatggactgctggttgccctgaaccaccggataatcccaatattggtcattgggagcattgtatctccaaggttcacttacttcaaaaccccagttcagacgatccacaaatgatttttctcccattatgtcaatcaaggccggtacatcctgaggcacaaagtagctaagctgccaagaattaccttctacatagtggtgattacgtccggtttgaaatgcatcaaaatcagggataaagttaccggccgaatcacgcatgtgagcatatccattttccggattaatagcatttttccaccaatatccgcgatcattgaatgtagcatattccgagaatttacctaatgctttcgccatctgtcccacagtccaatcatcgtaagaatactccaatgtattagaaaaacgtcccaattcaataggtacgtatttatatttcatataagacaccaaatcgcgattaccggcaaaaccacctgcaacatgtgtagctggagtagtctgcatttttttcatggcttcaaatgccttttccacatcataatcacgaatacccatctgataggtagataccatctgtggaatttcgtgttcggccaccattaccggaatatattccattccggcaggaccttttgccaaccacccgtttgcatcgtacaatgccaactgagagttcacccatttggagctccattcgggtgtcactaaattccagaactgattcaaattccaaaaagtattccaaaaagcatcacatcctaaagctacatgttcaggatttgtaaatttacgtaccttttcgtccggagacacccattcgccattcacatcactccacaaatttcggcaaagtgcacgatacatattagtgtaaaagcgcaccttctccagacggtcattggtagttatatccagacggttgaaaataccattccatacatctttctgattttgcactaccgcatcaaaatcccaaccaaatctatcagagatttccttttgcagattttcagaagcatttgaaatactcaccaacgaaataccggcacgagcctgcaccaccggatgctttttcgtatcaaattcgacataaagtcctgcatctttcaagttcttaccaaatatatggcctccatccaatatttgcttattcttccagccacctactttcttaatcggtgcatcaaactctattacgaagttcactacatattcctgatcagcgtcattactccacacataaggacgaggagaaatctgatgagagcgtccctcaattctataatcacttaccttcttaatatctacatccagcagattataatcatattcagcttgcacatgaaggtcaatcattacacgtccatctttatctttcgggaaggtatatttctggaaacttgctctttctgtagctgtcacctccgcccagatttctgtatcggtcaagaagaccttataatatcctaacggagcttcttctgtcctcttgtcaatacgcgaacggtaaccttcatctggacggaactgatcgccaacctgagtaaacaacttgccgttagtaggcattaaccctaatccgcccattgtccactcatggatatgactgaaacaacccaaagtttcaaaagttggttgataaccggcctgccagcccatattttgattgtccggactcagcttcaccatactgaaaggcatccaaggtcccggtgcaatcatccatcgagaatgtgccgtacctattttggtatctacatagtcagcaaatgtctgtatcttttgcggagaacgtataataatacccttttccagcaattgtccatctacaaacacttgatattcactctttctactttttttcacagcaggcataggtacttcaaatacataacgtgccgtgtccaactgcgcagaaaaaacatctataccgtctaattttacactcaatttcgggttaccggatagatgctctacatcaaccaataaaggctgtatttttgctccatccatttccatttcatattctgccggagccacattgcgcaagaaagcatattcattattcttttccagaacaagttcgtcagcaccttccaaacgtatctgatcgaaaacaatccagcccccttcaagaacagaaacagtgaccatatttccaccttttttcaaatcattggctgaaattggaaattcaagaatttgttccttggcatcttgaagattaccctccagtactcctttcgaatgccctttaatttcaaacttcttttcggcagaattcaccataactttaaccaccgaacggctcggattggcatccaccaagtctaccaccaatttccatttgccatgtttcggcaattttttaatgccaaacaatatatttgcatcatgagttctccaaccggaagtactccatgtacctccccaagtatcatcaggccctggcaacacataagggaaatcatttttgtcaacagaagtccccactaaaaagtaacgatcttcataaccaaaatcatgagccaggaactttttatactcagaagggcccaaagccagttctgttccggaattatccgcaacgccaatttgccataccacttttgcagcagttgcacacatagcgcaacaagcaacgataaaaaaagatattatttttttcatattcataatgagtcttattattttttgttatccgtgaaaacaatcttatctacttaaaaagcaaactaacccttatatcttcttgtctatctgttgtaaagcaaaagcatatgctcccagtgcaatagccttgtttgctcctaaagttgaaatcgccacccctatacgtttagtacaatcataggatactttcttgtcagtaaaaggtacctcaacccaagaacttgtatcttctaaaaacttcttatattcgtccggctccatcaaattacaaacttccatctgcagacaatcgaaatcccgtccggagaaagtcgatatggaacgacgcatttcacgcatcatacctggcagaatatatttagctgcaccagcaactcctcctcctataaccaccataccatctacaatatgaagtgcactgacaatggcagcacccgccatttcacctaattcatcaaaactccgcacagccgcttcacgattccccgtgagtatgccctcggcaatgtcatatatatcctttggagtcagattatcaaccgcctcaccgctcagttctccgtacacacggcgtactgcacggatactgacactttcttcggctatcaagtcggtatattttttatttctcataatccagacatcaccaccacagccgttatcaccggtcagcaagcaattatcaatcaccactcctgctccaaaaccggttcccaacgtaatgcctaacaagtttttataacgtttaggattaccgacagccttaagttcctcattaatggaaggtaatattccggccaacgcttcaccgtaagcaaacaagttaccatcgttatttatatataccggaataccaaattcttcttccagaaaagctcccaaagccacacctccacgaaaaaccggaaagttcggtaaatcgcctatcacaccattcttatagtctgctggaccaggaaatgcaaaactgatagctaccggctcattttccaattgtcttttcactgcagaaaagccttttttcaaaacagtcagacatccattcaaattgtccgaaaccgctggcaaacaaatagtttccacaatatcctgatttccccggatagctgaaaaaacgaaattcgtgcctcctgcatccaaggtcattactgtacgttggtcatgtctatacatattatatcagatttaattaataccattttccggttaaaacctcacataagccttgatggttccacactcttttcccacagacttgccacaaggagttattgtatattcacccacacttgccggaactatgaaggtttcagcataatgtaccacaaatggtttaaaagcgcttgtcggactttcaacaaccacttcttcaccttccaccaaattcagtacattcacactattattcgtatgatgtgtaacagatttggaaaaccagtgacggcgtgtttcaatgaattcattcgggtgtaatccagtacgctcctcgctccatccttctccttcggcaatctgagtgaaatgatttgccagatattcttttacatattccgtattacgtttccagtctattacttctttacctctttccacattaatggggcgcggtttgccatccaaccccaaacgttgccaatcccagagtttgaatgtaaacaaattgggtgttgagctgatttccaatacaagtgcctccgaacctgagcaatgcaccgtacctcccggaatcaaataatgatcatgttttttagcaggcagtttatttacatacttttctgtatcgaaaacgatttcacctttctgagcctcacgcaaatcacgaatcatgtcatctttattaataccattcttcaaaccaagatagaccgaagctccttctttagcatccagcagataatagctttcgtcctgagtataatacataccaaagttttcacggataaactgtgtggtaggatgcacttgtacactcaaatttccaccacctactgtatctaggaaatcgaaacgaatcgggaaatccttaccaaaacgcgcttctaccggttcacctaaaagctctctagatttcaacaaaaccaaatctaccgacggcaattcaaaacgtacaccgttcacctcaaaataaagactattctcttcgggcacacaatcgaaacaccaaccataattttctttttcaggatttaatccacacacttctttcatccattgtccgccccatggtgccgggtcaaagaaaggcactacgcgaaaaggagtcttaattgtttcttctattcctttaaagaaagtctccctatcaatcattctcggatcgtttgcaatgtgcgtatccaaccagaaatcggctttatcaaacaagccttccttatacttatcaagaactctccaatcattaaaataccctctcttatattgtaaagacacagcatcttcacgattatccactcccaaagcctttacttcgtgagcacgaaaacgctgttgtatctcccaacgggccatatcaacatacaccagcgttgcttctgcctgagctatcatagcagcacccgaaccgaccacaatcactctatcatttgccgctacctgcttccgggctacctccagcttacctgcatcaaagtagtctttcagagataggttcgtcacataaccaaaaagaacatcctttgtcataaaacgctctgtcatttccttaatctcattctccggcttcatcaagtcacgtgtattaataagtaaggtaggtgacagcgatttcaattcatttataacttcatcttcacgcactcctgcatagagttcaacagctagtacctttctactcttaaaacactccatcagtaaggtatgaatatcattccatccccgaagaatcgttcccgaaatctttgtagaagggaacttgtcgtaatttacttttctcataattatatatacttgattttattatatgtatgaacatattagtattttgtgcaaatatatactctttaaaaataaaataaaagaatcttctcatatttttttgataaaaaaagaattatctttgcaatattaaaaaaaataacagaaaaagtataaccatgaaattagacccaaactcagaaaaacctcttcacattcaagcagaagaagtgctgagaaaacttatagaatcagaggaatacaaaaatgggaaacttcttcccaatgaagttttattgtctgaacaattaaacatatcgagaaatacacttcgccaagcaatcaacaaactggtattcgagggattattggtcagaaaaaaagggcatggtacaaaggttgtaaaaaaaggtattataggaggagtaaagaactggttgagcttctcacaagaaatgaaaatgctaggtatcgaaattaaaaacttcgaattgcatgtcagttttaagaaagcatccgaagaaatatgtacctttttcaatatagaccctgaaaagggaacaaaatgtatggtattggaaagagtacgcggtaataaagaatatccttttgtctccttcatctcttatttcaatccgagtataccactgaccggtgatgaggacttcacccaacctctttatggaatacttgaaaataaatatgacatcatcgtaaaaaccagtaaagaggaagtatccgcacggttggccggagaatatatcgcagaaaaactggatatcaaatccagcgaccctatattaataaggaaaagatttgtttatgatatcaatggaactcccattgaatacaatataggatactatcgtgcagacagctttacctacaccatagaggcagaaagataaatatacaagaaagtttaatctataacagaaatgactatgaatacaacagaaatccccgtactgctgttgaccggttatctgggtagtggcaaaacgacgttggtaaatcacatcctttctaataaacgtggcattaagtttgccgttatcgtcaatgacataggcgaagtgaacattgatgcagaccttatacagaaaggtggcgtggtgggaaagaaagacgacagcctggtagctctgcagaatggctgtatctgctgtacgctgaagacagacttgatagagcagatgttcgaaatcatgaagatgcaacgcttcgactacatcgtgattgaagcgagtggcatctgtgaaccggagcctattgcccaaacactctgctccattcctcatatgggaggagcgtatactaaatacggtatttgccgcttagactgcattaccaccgtggtggacgccttacgtctgcaaagtgaattttcttgcggagatgatttgacacgcaaaggcattgatgaggaagatatagaaaacctcatcattcagcagattgagttctgcaatattatcctgctgaacaaagcagcagaagtacagcccgaggaattaaaacgtatcaggcagattatccacaccttgcaacccggtgcccaaattatagagtgcaactatgcagatgtagacctggataagattatccatacccacctctttaactttgaacgtgccgcaacttccgccggatggattcgtggcatagagcaacaagtaagcgaagaggaggaaaaagaggcgcattaccatcacgaagatgaacatcatcatgaaagcgaacatcatcacgagaaatgtcatcaccaccatcacgaaggaggtgaagtagaagaatacggtattggcacatttgtctactaccgccgtcctgcattcgacattcataagttcgaccactatgtcgctaccaaatggccccgcagcgttatccgcgccaagggtgtctgctacttcagccacaaccgcgacatgtccttcctctttgaacaagcaggtatacagaagaaaataactgaagccggacaatggtatgccaccgctcccgaagaagacatgatagaactgatgcgccaagaaccgggattgctaagagactgggacgaacaatacggcgaccgcatgctgaagatagtattcatcggacaaaatatggataaagagcaaatcatccgcgacttggacaaatgccttgaataacttcctaaaaaagtgctccccgtcattccgatcttaagaacaacggggagcatcgtcccagacgcgtaactctattttaagaatcaagaaccatatcaattctccgtaaaacggaacattttgaaatacaccttctgctctgtgtcggatacattcaccagcctcatcttcgcaacgctcaaatccttgagagatgccttcacctgcgttctgtatcccggtttcaaatccaccgcctgccagtttgtaccatccgaagttacttccagtttaaacttagaattagccacctccgcatctcccaaatcaataagcaccgaactcaactggcgggcataatccatcgaaatggtcagcacaccgcctgcctgccagttgatgacttcattggacggaataattgtattcacctttcccttctgctgaataggaagcgaagccaactgattcacgtcgctcttcaacgtgtagggagaataaacagcctttgtatcaagcccggcatggaacgctgcattatagcccgttgtcgccgcttcgaacaaagcattgaaagtaggcatcagatgcaggctgccgctctttatgcccgctttatattgggcatccgtctcacccatcagcaccagcagggcgcgggcgtgttcgtagctacctataaatgcatccttctgctggcgcaggcgtatcatgttcagcacctccgcaccatactctcccacttgtttgaactgaatgagccaaggccttatttcagttatcaacggacgattctcatttcccgacgcaagcaatccatcagcggcaacgattatcttccggcattcctcagctacctgccgataggcatcttcatctatctcgtttttctcttgataggctttcaacaaggcagagagagcaggctgaatggcaacggactcttcacgacggaagcgatgtccattctgtcccgggtcggaattatgagcagcgaagatttccaaatattcggcatgaagtggcataaggtctctgactgcatgtttccaagaagtttcactatcataattctccatattccaagtataatcagctacactgtacagagagattttggaagcctcggcatgttccatcggattggaaacaaaagcagacatatcatcttttatatcaagcccgtttccataaaccggccctagcagcaaatggtcttgtacataatccgaaacggggaaattccaccaaatgtacgccttacgtttcagcagcggattgacgaagtccagcgtagacttatctatagtagcaactaccatatcaccggtccacatcaccttgataccctcgttcaacttatcaccaagcgtagtgagatagcctccctccacatcggtccatgacttgttgtactctgtgggacacaatatcaatggtgcaacatcccgcttgacttttacaaaatggtcgtcaatatagttcaacagctcagcctgcttgtccgcctttgtcccctcacccgaaatatcatcaaagaaaacggcaaaaccacgcacacccaactggtacatgctttcgaacttctgcaacaataacgagcggtcttcttcattccagcgaatatcctggcccggatgaatggcccaatagaaaatgacattgttctccttcgccctattcaccaatactttcaactcttctccttctcgagcaggataaggcttgcgccagttgggagtccggtgataaggatcgtctttcggtccatagatatagacattcattttgttccgaccataaaaatcaagctggcgtatacgcgcctcctgactccagggagcaccgtaaaaaccttctaccacaccccgatagggaacatcaggatagtccgtcacttcagccaaaggcagcttgtctaaagcaagcaactgcgcaagagtctgtacaccatagtacgctccccgttcgtcagcaccggctatgacgatgcagtctttttctattttcaggaaataaccttcggatttgcgtggaatccgatgttggtatttcttgataatcttatctcctttcactcctatatatacacggaaagaagcgccaagcacctcttccggcatcaatgaacggagtaaaggcaacgcaggtccgtcctgcacggaattgccggaaaggatctggtattgtcggggaatatcaacagaatctttttgcgtaatatattcttggggagtaggttgcaaatgaaactcttgcgcacaaagcgtcgctgtcgtcagcataccgaatgctcccagtaacagtagttcttttctcataagcggattattaaattaaggaatatctatgtattaagaaaactcttccatgcattcaaggttgatacgttcaaaaataagaaataaatatgaaaacacgtacaaatacagacatttatttcagtttaaagattcatttattctgcatccgtttgagttcatcgcacacagccggatgcaggaagtagcgtacgtcttttccctcctctatggcccgacggataaaagtggagctgatttcgaataccggagaagaaactgtccgcacattctgcggtaaaaaggtggcctctaccggatagccgggacggggataaaccagaagatgattttcggcaataatgcgttccgactcgtaccaacggtggaacagcctccagttgtccgaaccaatgacaagatggaaagtgtgttggggataagtccgtttcagcgcatccaacgtatgaacagtataagaaggccgaggcagatggaattcaaaatcggaagcgcgaaacttgggataaccctcagtggctagctgcaccagcttcaaacgtaacttgtcatccatcagatcgttttcttccttcagcggattgtggggggtgaccataaaccacacttcgtccaggtccccgtattcgcaaagatagttggcgagggccaaatgtccgatgtgtatcgggttgaacgagccgctgaagattcctatattcatttattcttattcatatacaaccttacaaaggacgtctttgcaacgcacgccaggcagcccaagcattgaaaatcgtcactacagagataagaaacattgaaatactggaacgaggctcgccatgatgtatatacaatacacccacaacaagggagcagacgaacagaacgctattaataattagcaatgccttgttcagcttcgggctattcttcctcctcggtgccaactggttgtacactcctccacgttgtttcattcgttcaagaattgagagattactttcaatgcttccgctttggctgtctccaggtcatcgttcacaatcacggtatcgaacttcggtgcaaagcccagttcgtattcggctttcgccacgcggctctctatcacttcgggagcatctgttccgcgccccaccaagcgtttgcgcaattcctccactgaaggtggctgaatgaaaacagacaaagcacgctcaccatagaatttcttgatattgcaaccacccactacatccacatcgaacactacattctgtccggcagccaattgcttttccacctgctccttcagtgttccgtaaaaacggtcctgatatacctcttcatactccaggaattcatcattggctatgcgacgacggaactcgtcaggagtcagaaagaaatactccactccatctttctccgttccgcggggcgggcggctggtcgctgagatggagaatgccaagttcagattttgagtcagcagatagttgataatcgttgacttgccagagcccgaaggggctgaaaatatgataagttttgccatcgaattatttacgatttgacgatttactatttgatactacatgacgttcaatacttgttccttgatttgctccaattcatctttcatctgaacgacaatcttctgcatctccgcatgattggacttactgcccaaggtattgatttcgcgtcccatctcctgggcgatgaaccctaacttcttgccttgtccggttccggtttccagcgtattgataaaatatttcagatgattgccaagacgctgtttctcttcgttcacatccagtttttcgatgtagtagatgagttcctgctccagacgattcttgtcataatccacactcaacgtcttttccagagcatcggtaatacgctccttcactttggccacacgctctttctcatagggagcgatagtctccaacaaatgagagatattggcgatcttctcacggaactttttttcgagggcagctccttcctgcttacggaagtccaccagcgcatcaacagccttttccacagccgaataaaccacagcccattcttcctcactcagttcctgcgtttcattcttggtcatcacatccggcatgcggagcaacgtggcaaaccagtccgtcgcatccggtacaggtattccaagattttcggatatggcacgaatctgcttgtagtatccctccaccaatgtctgattgatgggagtggcactttccgcactctctttcttttctatccaaaggctgaaatccacctttccgcgttccagtttccgtgatatttcattacggatttccatctctttctcacgataaagcggagcaatacgagcagacaagtccattgccttactattgagcgactttatttcaacgttgattttcttatcaggcagttcgacggttgctttgccgtagcctgtcatagattgtatcataatgttatagttttgcgcaaaattacacgattattttaattagtgaaaataatcacgtaaatttgccacaataaaatcaagaataaaagttatgtcatgtatcttgcatattgaaacgtccacttctgcctgctccgtagccgtgagcgaggacggacagaacgttttcaagaaagaggacctgaatggcccttcacacgccgtttcattgggagtctttgtggacgaggcgctatcctttgccgatagccatgccatgccgttggatgcagtcgccgtgagctgcggccctggttcgtataccgggttgcgtatcggcgtgtcgatggcaaaaggtgtctgctatggacgtaacctgccacttatcgggctggaaaccctgaaagttcagtgtgtaccggtattgctctaccacgatgagttgcccgacgacgcattactctgcccgatgattgacgcccgccgcatggaagtctatgctgccatctacgaccgtgccttgaaatcggtgcgcgacattgcagccgatattgtggacgaaaactcctacctggaatttttagagcaacatcccgtctatttcttcggtgacggtgcagccaaatgcaaagagaaaatcacgcatcccaatgcacacttcatcgacggcatccgcccgcttgccggcatgatgtttccgttggcagagaaggcaatagccgaacaagatttcaaggatgtggcctatttcgaacccttctatttgaaggaattcgtagccggcacgccaaagaaacttatttagggtttagcgattagggatgaataccatgcggtatcactacgtagcccattaatcactaatcactaaccactaatcattgaacattaatcactaattaaagatgcaatataacactcaacaaaaacggatgcccctacccgaatatggtcgcagcatccagaatatggtagaccacgcgctgacaatcgaagaccgtgcagaacgccagcgttgcgcaaacacaatcatcaacatcatgggaaacatgtttccccatctgcgcgatgtgcccgacttcaaacataagctatgggaccaccttgccatcatggccaacttccaattggatatagattatccgtacgaaattatccgcaaggacaatctgaataccaagccggagagcatcccctaccccagtaccaaaatccgctaccgccactatggccgtacactggaagtactgataaagaaagccatcgaatttccggaaggagaagagaagcagaacttgatagcgctcatttgtaaccacatgaagaaagactacatggcatggaacaaagataccgtcgatgaccgtaagatttcagatgacctcaccgaactctctgacggaaaactgcaaatgacagacagtatcgtccgtctcatggccgaacgtattgaccagaactaccgtccgaaagtgaacaaccagaataaccggaacaacaaccggaacaataaacggaaatactaaaattgaatgattagtggttagtgattaatgccatgcggcatcaccatgcagaccactaatcactaatcaccaacccctaatcactaatttcatggcatcatttgtaatcgaaggaggacacagactttccggtgacatttacccccaaggagcaaaaaacgaggtgttgcaaattatctgcgccacattgctcactgccgaagaggtgactgtgcacaatatcccggacatactggacgtcaacaaccttatccaattgatgcgggatatgggagtcagcgtatctaaaaaaggcattgacacttacagctttcaagctgccaacattgatttcgcctatctggaaagtgacgcgttcctgaaaaaatgttccagcctgcgcggttccgtcatgctggtggggccgatggtggcacgtttcggcaaggccatgatttccaagccgggcggagacaagataggacgccgccgtctggatacacacttcatcggtatccagaatttaggagccgactttgtctataatgaggagcgtggcatctacgaaatctcagccaaacaactgcatggcagttatatgctactcgacgaggcatctgtaacgggaacagccaatatcgtaatggcagccgtccttgccaaaggcaagaccaccatctacaacgccgcctgcgaaccctacgtgcagcaactttgcagaatgctgaaccggatgggagctaagatagaaggcatcgcctccaacctcctgactatcgaaggagtagacgagctgcacggaaccgagcataccatcctccccgacatgattgaagtgggcagtttcattggcatggcagccatgacccgtagcgaactgaccatcaagaatgtctcctacgagaacttgggaattatccccgacagtttccgtcgactcggcatcaagatggagcagtgggaagacgacatttacgtgcccgcacaagagacgtaccagatagagtcctttatcgacggctccatcatgaccattgccgacgcaccctggcccggactgacaccagacttgctcagtgtgctgctggtggttgccacccaggcaaaaggcagtgtactcattcatcagaaaatgttcgaaagccgtttgttctttgtggacaagctgatagatatgggagcgcaaattatcctctgcgacccgcaccgcgccgttgtcatcggtcacgaccacggctttaaactacgtggcggcaacatgacctcgcccgatatccgtgcgggcatcgccctgctgatagctgccatgagtgcggacggcatcagccgcatccacaacatagagcagatagaccgtgggtatcagaacatcgaagggcgactgaatgcgctcggagcaagaataacaagaatagaataagatgataaagagagaagaagtatataagataggtatattcaacaagccccacggcattcacggagaactatcgttcacttttacggatgacatcttcgaccgggtggaagccgaatacctaatctgcctgctggatggtatactggtgcctttcttcttggaagaataccgtttccgctccgacaccaccgcccttgtcaaactggaaggcgtggacacagcagaacgcgcccgcatgttcactaatattgaggtctacttccccgtaaaacatgcagaagaggcaggaccaggtgaactgagttgggacttcttcgtcggttttcgtatggaggaagtacatcacggcacgctgggagaagtgacggacgtggacacatcgaccatcaacacactgtttgtggtagattatcagggagaagaactgctggtgccggcacaagaagagtttatcatagacattgaccagaagcacaaggtcatcaccgtagacctgccggaaggtttgatagctttggacgaaacagaagaggtatgaaaaagaaacgaagaaaagcattttggagtaacatcaagttcaagtacagactgacgattacgaacgagaatacccttgaggatatcatcacgttgcgcgtatccaagctgaacgggctgtccgtattgctctccgtgctgttcgtattgtttctcatcgcctccctgatcgtagccttcaccccgctgcgcaactacctgccgggatatatgaacagtgaaatccgtgcccaggtagtggagaatgccttgcgcgtagattccctccagcaactggtgaacagacagaacctctatatcatgaatatccaggacatcttccagggcaagataaaggcagataccatacattccatcgactcgttgacccacctgcgcgaagattcgctcatggaacgtacacaacgggaagccgaattccgcaaacagtacgaggagacagaaaagtacaacctgacgagcatcaccgctcgccccgaaatagacggactgattttctaccgccccacacgcggcatgatttcatctcccttcaatgccgaaacaaaacacttcggcacggacattgccgccaatccgggcgaaagcgtattggccaccttagacggtaccgtcatactgagtacctacactgccgagacgggttatctgatagaaatacagcacaaccaggacttcgtgtcagtctacaagcattgcggctctctgctgaaacgggaaggcgatgcggtgaaagggggtgaagccatcgcactggtaggaaacaccggcgagctgtccaccggtccccaccttcacttcgagctgtggcataagggcagggccgtaaatcccgagctttacatcgtattttagtctccaaatagtaaattgtaaatagcataatagtaaatgaaacagattgccatactcggttctaccggttccatcggtacacaagcgttgcaggtcatcgaagaacatcccgaccagtacgaagcatacgtattgaccgccaataaccgcgtagaggaactcatagcccaggcacgcagattcaagcctgaggcagtggtaatagccaacgaatcgaaatacacgcaactgaaagaagcgcttgccgacctacctatcaaggtatatgccggcgcagatgccctctgccagattgtgaccgaaaatcccattgatatggtattgaccgccatggtgggatatgcagggctgaagcccaccatgaatgccatccgagcccgtaagccgatagcccttgccaacaaagagacgctggtggtggcgggagagctcatcaatgacctggcacgtttcagcggtgtccccatcctacccgtcgactccgagcactccgccgttttccagtgcctggccggtgagataggcaaccaaatagaaaaagtgatactgactgcctccggaggtccgttccgcacctgcactatggagcaactaacaaccgtcaccaaagcgcaagcactgaaacaccccaactgggacatgggcgccaaaatcacgatagactctgcttccatgatgaacaaagggttcgaggtaatcgaagccaaatggctgttcggtgtacgtcccgaccagatagaagtcgtggtacacccgcaatccgtcatccactccatggtacagtttgaggacggtgccgtgaaagcacaactgggaatgccggacatgcgcctgcccatccaatacgccttctcctatcccgaccggttgaaagcctctttcccgcgcctggacttcaagctgtgcacggaactgacgttcgagcaaccggacatcacccgtttccgtaacctcgccctggcctacgaagcgctacatcgtgcaggtaatatgccttgcattgtcaatgccgccaatgaagtggtggtagccgccttcctgcaggacaaaatttcgttccttggcatgagtgaagtaatagaaaagaccatgtcgcgcgtatcctacttacagaagcccacctatgaagactatgtggctacggatgccgaagcccgacggatagcagaagagctgatttgatagatacaccggaatgaaaagaattataaaaaacatctactcatttgatacgttaaataagaaaacgtacctttgcgaaaattataaaaatcgtaaaacagcaaataattagatggaaacattcttgattcgtgccctgcaactcattatgagcctctcgttgctcgttattgttcatgagggggggcacttcctttttgcgcgtttgttcaagacgcgggtagaaaagttctgcttattctttgacccttggttcacattattcaagttcaagcccaaacacagtgacacggaatacggtatcggatggctacccttaggcggctatgtaaaaatagcaggtatgatagacgaatctatggataccgaacagatgaagcaacccatgcagccatgggagttccgtgccaaaccggcatggcaacgcctgctgattatggtaggcggtgtattgttcaacttcctgctcgcattgttcatctattccatgatactttttacttggggcgacgaatatataccagtacaaaaagccccattgggtatggattttaacgaaacagccaaagccataggcttccgcgacggcgatatcctaatatctgccgacggggtaccgttcgaacgctatgatggcgacctgctgaccagtattgtcgatgctcgccaggtaagcgtattgcgtgatggggaagctgcttcagtctacatccccgaagacatgatgaaccgcttgctggcagacagcgtgcgtttcgccagtttccgtttcccttatgtagtcgacagcctgattgtaggataccctgccgcttccgccggtctgcaagtaggtgacagcatcacccacttggatggaaagtcaatagcctactacgacttcaaagaagagatgctgaagcgcaagaaagccaacgcatcccatgaggtaaccttgacatacgtccgtaacggtgtgacagacaccttgagcatgatgaccaatgccgactatgaaataggcgtagcagcacgtacggcaaccgacaagctgctgcccgttgtccgtaaggaatacagtttcctttcctctttccctgccggcgtatctttgggggtaaagactctgaaaggctacgtaggccagatgaaatatctcttctccaaggaaggagccaagcaactcggaggtttcggaaccatcggcagtattttccccgccacgtgggactggcaccagttctggtacatgacggcattcctctccatcatccttgcctttatgaatattctgcccatccctgcactggacggtggacacgtgttattcctcatttacgaaatcattgcacgccgcaagcccagcgacaagtttatggaacgtgcgcagatggtgggcatgttcctcttgttcggtttgctgatttgggcaaacttcaatgatatactgaggtatttcttttaaagaacaagacataaaaaaacgcatcatccattcgcagtagaacggatgatgcatttacatcaaacagatgatgtgttcggggcaagcagacgatgcgtttgagccaaacacatcatctgttttttctgtgtcttataccaaatggccgatccactcttctctatcgcccggaagcaggtctattaccggaacttcaaccattgtatagcaacccggctgctgacgcatagcggcacgcgccacacataccagcacttgtgccgtgagggcaggattgttgatacgcatgttgaactcaaatagctggttctgcgtcttgccggacacacccttacgggtcaagtttaccccatgccccatatcgagcagtgcatccacactcggaaccaattttacatgtgtttcgtcattcacgaagtacgggtcggctttgatggctgcagccaccttatcaaattcgtaaccatccttcaactcaatgtacaccatacgacggtgaatgccggttcctgtaggaatagtcatggaaagagcggctttcacaccttcgatggcctttacagccacggtgtgtcccatgctcatacccggaccaaaattagtataggtaatgcctttcggagcaatggcttccagcatagtgcggacaatggagtcactacccggatcccagccggcagaaatgatggataccgtattatgctttttagcctctgcatccagtgtgcggcgcaaggcagtgatacccgtatggatatcgaaactgtccacagtatgaatgcctaaagcaaggatctcctttgcatactcttccactttgcgggtaggcgtacaaaggatagcaacatccacgcctttcagttccttgatattcttcacaacgggatatgcactcagttccgcaggacagttttcagctccggcacggcgtactacaccggcaatttcgaaatcgggagctgcttgcagggcttcgagcacataatgcccgatattaccatagccaacgatggccgctcttacttttttcattctttttatgaatttatttatcagttttctactttatcggcgcaaaagtaagcattttaatttattatatcggcagaactccctgctgtttcacacagtttttctttttttagtgagtgaaagtccaataataattcatacattcgcagatgatatgtacgcaaggcacatttggggccaacaagcaaaagaattatgatagaatacatcagaggcggaattgccgaactaagtccggcaaccgcaataatagactgcaacggactgggatacggcgtcaatatttcattgaatacgtatgccgccatccagggcaagaaagaatgcaaactatatatatatgaagctatccgtgaagacgcctatgtcctctacgggttcgctgacaagcaggaacgcgaactattcctgttgctcatctccgtttcaggcatcggcggaaatacagctcgcatgattctctcggcactctcgccatccgaactgataaatgtcatcagcacggaaaacgccactctactgaaaacagtcaagggtatcgggctgaaaacagcccaacggataattgtggatttaaaagacaaaatcaagaccggcagcgttgtagccggcaacgcagggaccataggtacactggtatcggcagccaacgcacaagtacaagaagaagccgtagccgcccttaccatgctgggctttgcacaagccccctcacaaaaagtagtgcttgccattttgaaggaagaaccaagcgcaccggtggaacaagtcatcaaattggcattaaaaagactataatatttatctaaaacaaacaaatcatgacaacaatcaacatgcaatattggttgggggccaatgaacgcacccacgtactgccaacggacaaatggtacctcgactttgccacaagcatcctgcccctcgtcaagacctctcccttgttcaacaaggaagacctgcgtacccaaattgacgcagccatctccctcggcatgtactttcaagatgccattgcccaaagcggaggctggaaacttttctccgaagcctttcaaggagtatacggaacttacctgccgttctatccactgggtgacgattatacgcccgatgaaataaatcaggaagacattgcattcgtactgtggacattgaaatcacaattcagtatttttgacaaggaatacaccttgttcagtccttatgacaaagacctgcttgcattaagccaaagcgcctatgaactgatggatgcacgtttcgaagaagctcccatcagcgagggagaatcttccttcctttgggtaatgggacttgatttactggatatgcccattactccgctgccggaagtcactccggaaaccaaactgagtaaagatgccgcccgctgtctggaatacagccaggggaaaccgctgctatacttcaccgattacaaggagctttgcactttctttgtcgatgtcttgggatgggaaaacaaacggtccgcactattgcccgacctggaataccaaaaagagttcgtgatttatgccaacgccaaaggtatgctcgtagcccacaacgtggccgcctatttctgtgaagaacataacccgatgtacgatgccaaacgcgctgctgcagagggttacaagatgttctgccaacccggagagtgtccgttcgacctgctgaaatacggaatggccaaaggaattctacccgatgtggaacttcccttcctgaaaggaaaagaaacactgcatcaatattgggactttatagcccgctactacttatgtgaatattatgaaggcgagtaaccattccggcataaagcccaaacggagcaacaaggccaagccaaccggaaaacggattggtaaatccaaaccttcgaaagcgaataatcagcttaacagaagggtaaaataattgaaaatggataatggaaaaataaacagtgcagcgtatttattgaaaccgcatggcaattttccattatccattatcaattttcaaagttccataatctcttccttacacaacgtcagtttctccactccttccgctgttacaacccaagagttttcgataccgacgggaccaatgcctggcaaaacaatcttcggttccaaagcaaagaccatgcccggttccagctcctgcttcatgcgtggagccagcaccggcatttcattgatttccagtccgatgccatgaccgataaacttggctttttgagtggctcccataaagttgtcggcaaagcccgctttggtgacaatatcgatagcgagattgtaaaggtcctcacaaacagcacccggtttcgctttttctacaacagcctcttgtatgtccaggcaaacctgatgggcaacatatgccttttccggcaactttccgatagagaatacacggctcatgtctcccatatagccatagaagttaccccccatatcaaccataaagctctggccgggttgcaacagtgcaccgttcacactgataggcagtgacgggtcaagtccttcgcctcccagagcaaaatcatagggggcaggcgcagtggcattgtctcctgccagcagacttcccataaaaatctccatactttgtccgaaggtacggaaaatgcccagacaaccttccaggcgcatcaggcgctctatttcgatggataactggcagtctgtcattcccggtctataaaccgagggtatttgttcgtaggccttggcatgtgcaatgccggaacggcggaacatctcaatctctatttcagtcttgacacttcgggccttccggataagtgccgtaccacaaggaagcacctccgtttcagggaaacacgcagccaaacggttatattccgtaaaagacaactcatccccctccagcatcaacctcgcaggtatgggcaaaccacattcctttagtaagtcaggcagttgttccggtttacggataggatgaatatgttccccttcaatattgttgggacgtttgatgaataaacgagcgggagcattcaacggcagatacaagtaaccgctgacgacacgtccgtacgtatagattaagtttacattacaagcgataagagcggcatcaatctcttgttgagccatgagagagcgtattttatcacgtctcagtttcaattcaggtagtaacatctctttgtcatttatggtttctcggatacaaagatacaacttttttaattgagaataaaaaagtactgccccataccttcacaggcgtagggcagcacaaaccacaaatacaaatacaactaaacaaagtttctctcttagataattccctgacccatcatggcatgagccaccttcatgaaaccggcgatattcgctcccttcacgtagttgatgtagccatcgggttctgtcccatattttacgcattgagcatgaattccgtgcatgatggcgtggagtttttcatccacttcggctgcactccagctgaggtgcatggcgttctgcgacatttccagtccgctggtagccacaccacctgcattgacagccttacccggtgcatacataatcttattttcaataaaaaggtcgatagcttcgggcgtacatcccatattggagatttcgcctacacatgtcaccttgttgtcaatgaggtgttgtgcatcttcgccgttcagctcgttctgggtagcgcaaggcagagcgatgtccgctttcacttcccacgggcgtttgcctgctacgaaagtagagccggggaattcgtcggcatacggtgctacgatatcgttgcccgatgaccggagttccagcatataatctatcttttcgccactgataccgttcgggtcgtagatgtaaccgtcgggaccggagatggtaaccaccttggcacccaattcggtagccttggtagcagcaccccaagccacatttccaaaaccggagatagccacggtcttgcccttgatgtcaatgccttttgtttgtaacatttggtttacgaaatacaagccgccgaatcctgttgcttcgggacgaatcagcgaaccgccaaattccaatcctttaccggtaaatgtgcccgtaaattcgcgagtcaacttcttatacataccgaacatatagcccacttcgcgaccgcctacaccgatatcaccggcaggaacatccatatccggaccgaggtgacgccacaattccagcatgaaggcctgacagaaacgcatgatttcagcatcgctctttccgcgcggagagaagtcggaaccacccttaccaccgcccataggcaatgtagtcaaagcattcttgaaagtctgctcaaatcccaggaatttgaggatagaaagatttacggaagcatggaaacgaataccgcctttgtacgggccaatggcattgttgaactgcacacgatagccgaggttcgtctgaacttcacccttatcatccacccacgttacacggaaagtaaagatacggtcaggttcaaccagacgttctataattttcgctttctcgaactcaggatgttggttatagatatcttcgatggaaagaagaacttcctttacggcttgaagatactcagactcgccggggtgctttgcctctaaagaggccatgatacgttcgatattcataatattacgttttaaaggttattaccttgttgacttcacgctattcaaacaaaatgtcaatgaataacaccgcaaatataagaaaacttttcaaaacagctaaattttacggttatattttgattaaagaatgataaaatgtcaaatccccggcattctctattcatacctaaatggtctattcttttcctattctgtcaacaattcgccataacggcataaatatagaaaaaattataataaagaaaataagaaatgacgaataatttacgaaaaaagacacaatcctcacggactatgcctttccaattgctaactttaattcttaaatgcttgtattaaatccgcaacataataattactatgtacggacaagcttcataatttcttcaatccttttacctcttcttttgttgcttctcgaacactgatagccacccctccactacttgccagaggttgacgcagcacactctttgacgttactatgccacgacggatgtcatagctctgcggattatctttccagtctgcatcccgaccatctgcataaacggtaacaatatatttccttccttcgggtaagaaagagaaaggaatagttgccgtacgaggatgttcgtcggtaatagcacctacataccactcttgttttcctttggcttgacgagccactgtgatataatcacccggttcggcttccagataccaagaattgctccaatccaccgctacatccttaataaattgaaacgcatcgggaaaacggcgataattatccggcaggtctgctgccatctgtaacggagagggcatcgttacatatagagccaattgttttaccaatgtagtacccgcctgacctttaggtttcgaaccattataatacgaaagttttgtctggaaaataccaggagtgtaatccatcggaccacccttcaaccgagtaaacggcaagatacaagtatgatccggatcattgccccccatagattcaaactcaccaccacgggcagattcttgcgctacccagttgggccaggtacggcacaagccggtgggacgaacagcctcgtgactatctaccataatcttataatcagcagcacgcttcaccacatgtatataatgattgttcatccattgtgaggaatgatattcactacggggaatgattgagcccacatatccggtctttacagaattatagccattatctaccataaattgaaaggctacatccagctgccgctcatagtcggcagcattagcagccgtctcatgatgcatgataatctttactccctttgatttggcataggcatgtagtaccgcaacatcaaagtccggataaggtttgtcaaaaaggaactgacgatccttacgataggatgcccaatcttcccaaccttcattccagccctcaaccaataccgcatcaataccattctccgccgcaaagtctatgtactctttcacatgttcagtattggccggatgatgtccattaggagttaactttgaatagtcggttatgccgggtttagccttataatagtcgctatatgcccatgtacctcctccaccagtaaacatctcccaccagacaccgataaatttctgtggcttaatccaagaagtatcttccagcttacaaggttcattcagattaagaatcaactgagaagcaaggatgctacgtgcatcgtcactaaccataattgtacgccacggggtatgcaacggtaattgcagatatcctttctttcctaatttatcgggagtaagatgagcagaaaagttaaactctttatcatccacattcagcaacatggcagaataatctaccaaggcagcttcatgaatattgatataaagtccttcggtagtctttatcataaggggtgtttgtactgtgaatgaagtcgctttagcttcatatccttttttacgtagattacgttccatagcttcgcgcacttcggaaatggccgcagtagtataggcaaactcattcgtatcataatcaccgggaatgcaatagagtgtatgattaccggtcagattgaattccgtcagttcgtcttttaccgtcagataattcatggttttctgctccggcaactcataacggaatccgagtccatcgtcaaacaatcgaaaacgtacaatcatcatacggtcgtgctttgccggttgtgagagagtgacagtaagttcattgtaatggttacggactttttcatactctccccatacaggcatccaagtttcatcaaaagtagaatttgttgcatcaagaatccggaagccatttgacaaatccgcttcttccataagtattcccaaggcagaaggttctacaaccggctctcctttgtaatataagctatagaccggccccccctcggaatcaagcacaacattgagtttcagattcccattgggagatgacaattcgtgtgccatcgccacacaagcaattcccagaaatacaactgttaataatacatgtttcatatacatccgttattgttgatatataaaatattgataaggttccatcgtcattactgtaggcaactccacatccacaccggcaatcacatcggtcatggtcttgccagcatgctccataggtactttcacttgtacagactcattggcagtattcaccatgaccaacatgccatgactgcctgctgcccgataaaatgaagcgacatctccggtagtataaacttccagttcaccaccacgtacactgctcgtagctttataggctctgatgatttctgccatctcttgcgcaaagacttcattggacttcaagtctataactccgtaattgaaaaagttaagtgaccgcggataggctacttcctgcgaactataaataagaggtattccctcgagcatagtcgtcaatacaaaagcagacatggcaccacgctcaccgccataacattctatcggtgaagcctcacttgcctggtcatgattagtagaatagcgtaaccgtaacgtacccttcggcattccctccaattcggaagtattcatagcataaaggtcagtaagtgagcatttaccggcataatagtctttcagtttactatggaagttccagccgtagagcagattgaaaccattgttcattaaagacgtttttccgccttcggcaagcatcagcaaattattgtcaagtgtacggagctcggcgattgctttcttccagaaagcatctggtaccccctcggcataatcacaacggtatccatcaataccaatttctgttacccaatacttcatggcatcaatcatggcttgctgcatgatttcgttgtcaaaattcaagtcagcaacatccgcccaaggctgttcttgaggttgtaccacattgccatttgcatcctgtgtataccaatccggatgctcagtcacccaagcattgtcccacgaagtatggttggcaacccagtcaagaatcactttcattcctttggcatgggcagcatctaccagttctttcaagtctttttttgttccgtaacgtgtattcagctttttataatcctttatacaataaggtgaattcacacttttcagtactcccggctcatttacaggcatcagccaaagcacggtagttcccaggctttgaatacggtcaagctctgctttgatggcagagaacgcattttcttcggcaaaaatgcggggatttgcctcataaatcaccatatccgaagccatgtattcttcctgtgggacgggaatcggttccatgtcactctgactatcactacaccccatacaagaatgtagcatcgtaaagagcagtgtcgcaattattacttttttcatatttctactttttatctatacttatactcattggcggaactgatatctgcaaaaggagcatccaaactctccagtgatgggcattggcagaaaagatactaagacttaatactaaaaatcccggaagccaatactaaaaaacaaaagagctaagagataacttcttcccaaggcttggtttttctatcccaagacttgggatagaaaaaccaagccttgggacatatatccgcaagattgaaaagagatatcctatccccaatctcattccaccaataggtcatttaacatcttcattactatacaaaactcatttcaagaaattattctgattagaaacaaaagccgcttcagattccggttcagagtctccgtccggattgttagggtcaatctcctcaccagctatgtccgtaatacggaaataataatctcgatcaagcgtcactgctgcgaggtcaaattgtgagcctccattgttattattcattatcagattgtaagtcaatcccttatttgcttcacctgtatcgtaataattatacgtgacaccttttatctcaacactaccggttggtaatattcctggccaactgccaaagagttccggtatatcatttccccacgcatatatggttgtttctgcccatccggactggtcttcaataaatatggcataaccatcatggataaccactgcatccggatctatttccgtccaaccgctttctgtgatttccaaatatatgtcacggtcaagagtaaagttctgtggtccatcaaattgtgaacctactccattatcgttaaatatcaaattgtaaaccaatcccttatttgcttcacctgtatcgaagtatttataggtaattccttttatctcaacgctaccagtaggtgaaataccgggccaacctccaaaaagttccggcaaatcatttccccacgcataaagtgtcagtgcatcccaacctgtattgtccatcacgaacacagcataaccgtcatgaatcacttcacttgggtcttccggctcctcaaaataagcattccagcgggttaccgttatatcagtgcgagtacctaccttagccgaaatttgatgtaaagcatccccattctgcaaagtacgctctataccttgtgtcttagaaacgaaataaaagccatcggcaagtgtctttccattaacaaaatcttccggatagaggtatatgccccatttaacatcattgtttgcagctttctccatctgccacttaaggtctccggaagcagcatcctgacctccattgaaatcgcctgcaatataaattatttcatcggcaccagttccttggggcataatcacctccagcaagatagcatcgctacgaagttcaaattgcggcaactcatggtcaaacacaatttcctccttgtcacaactactgatgaaagctacaaaaagcaacaaaagccatagcggattacatatatattttttcattgttactattattataggatgattaataattaggattctgtaccagtcccggatttaccataagggcagactggggcaagggataccactcgtatttgcggtcacgtttagccggatagcttaaaccgtcgtccgtggcacggccaaagaaccaccattgcccttgcgtaaacttatcgaaacgacgcaagtctgtacgacgacgacgcccctctcccaagaattcaagtccccattcactcaacatccaatccatatcaaaggatgtaaaaccaggaccgggctgctcgagagccgatttatctgtaaaatagcgtgttttaactctatataccagttctttagcaccttccgtatcacctgcacgcattttacattcagcaagagtatagaccacttcactcaaacggaattccacctcatcgatgttttggaaatcaatgcctgcactctccggataaaccggatatcttaccaaacggacacctgaattcgtttcaccccagcgaggtgacatgacagtctccagattacgtcctaaattaaggaatgtacccacctgatccacataaaccaaatcctgaccgtcacggtcggcatctgctttcaaagctgcacccttaccatagttggctttaatagcccctttcaagaaaatgccttgataatttcctgttgtttcattatacacatagttctgcttacggatatctttatcgtggaaacgttcataaactgcacctaacttatcaccgtagtcggtaagaaagctcttaggattgtcagtaccaccatacggctgtacatttccagaattatcccatgaaggtgccaagcatacacaattccatccgctctggctgtatgtacctccaaagtaatcccaacaattgtaaggcatgaaaggcatgttacgcatccaaccggtattgacctgaccgacttccatcgccaatgccattacaacttccggacattctacattgtttatcgaataaatatcgcgatagtcatcggtaatgctgtaagtaccataatcgccattcagaattttttggcaaagagtggcacactcattataactgttttgtttgataaacacctcagaattcagcaacaagcgcatcttaatcatacgattggcagcttggttcatgcggttacgagtctttccagaaccatcttctttcataagatctgtaactgactcatctaattcctgactgataaaatcgtagataatcttgcaccccttatcaaaatcagtatctgcagaaccagggatttccgcacccgaagaaatgttcaagggaagtgctccaccccaaatctcaaagatattgtagtatgcccaagcacgcagggtacgtacttcggcaatataactattcaaagcatcctcagtcatgcgtatagatgcggggctgattgcctgcaaatctgtaataagcgtattgcaaagcccaatagtggtccacgcattctcccaagtttggcgaataatggttgattctgacgtccaggtatgtgaagacaaagcaaacttcaatgcctcatcccatccccaaagtccaccgttccaactgcgccatgccacctggtcggcagaaaactcctgcaaataccagaagtattccaaataactatatgcagctttcgaatagatggctgccactgccccctgaacactcgtctcatcttgataataaattccggcatccacacgatcgaacacttcctcgtccaaattagtacaagagaaaagtgaacatgacataatcatcgccaataaccaacgacattttatatatttcatatctttcatatttttaataatttgtttctcatttatttgaagcgaagagtcacacctaaactcaattgagttgctgtaggataagcactattactatctactcccggctggataccattcacgtctataattgaagggtcattaccagaatatccggtcaaggtaaacagattcttggcagacagatatatgcgcatattatccagtaacttacggttcttaggagtaaaattatatcccaaggttacattttccagttttatgaagctaccatcctccaggaaataggaagatattactccaccaccggtacggatattcttatcttccagatacgcagagcgaagaacattatctgtaccacatccctgaagccccataccatatttacgcatattgaatacatcaaaaccgaatgtaccgcggaagaatacactcaaatcaaaatttctccaagtcaggttgttactccaagacaagaagtgcttgggagcaccattgccaatataacgtttatacttggcatcagcctgagaaatcggtatttgctcatctttatcattcaaaataagcatattgccattttcgtcaacacctgcatattcataaccgtagaactgccctatctctcccccttcctgcacacggaagaaatattcgctggaaccagtacccggttttaagtaaaggtcgagataagatgccttgtaaatatcgttagaaagtttggtcaacttagtcttcccataagaataattgattccgctcgtccacttcactgctgttttagtaaggatatcaccatccaaagatacttctataccggtatttttcgttgttccaacgttaaccaaaatagtggaatagacaaaaggcggttgaggtgccgtgtacgtataaagcaagtctttagaactacggtcaaaatactccactgaaccacgtaaacgattccatagaacaaaatcaacacccagattaatcgcaacgctcttttcccaagccaaatccggattagcattactagagggagcatagcccgttacccaacgcccgtcaaagagataactaccattggtattgtaagtagaaagtgatttataagcatcaaaatccgaacgaccggtaattccgaaagaaacacgcggtttcaaactggtcaacactttccgggtattcttcataaagcccatctccatcatttcccaagccaaagaagctgctgggaagtacccccacttttggttagcaccaaatttggaagagccttcatagcgcaacgaagccgatgcaaaaagcatatccttccaattatagttcaaccgaccaaagaagccaataagtgtcgattcagagcgaccgctatataaacttgccaaaccatccttcagataagagccactgcccaaatcccaatatttcgtattatcaaaagagaagtcgttgttactaccaccaatctgttcccagatagacttctcataagtatagcccactacagccttaatattgtggtcgcccaagttcagtgcataatttcccaaccactccaatcgattggtgtaccatttctgatacttcatttccgcacgtcctttataaccattccaataggactccgaaccggcagacgaagcataatattgttgcttcatgtcattgtaatgcaatgagtaacttaatgttgtattcaacaaatgcttttctgtctgcaaaatattcagtttagcctcagccgtacccaacaaatacatacgctggccgttgttatctctcaaagcaagctccgcaaccggattggttgcacccgtaggagaagtaggctgataatacgaaccgtctgcattatataccggcattgtaggattcattgtgagtgccctatcgaagaaaccatcatttccccaggtttcatttacacgacgtgcactcaacgaaccgttgaattgtaagcgattctccagtacacgctgttccatagaaaaacgacctccaaattcttcacgaccactcacgatgtcaagtccattggcacttttgtaattgaaggaagcaccatagaaaccattctttgtgctaccatcaatagatatatattggtttgtgtcgtatgctacatcacgagtaatcagtccataccagtcagtgtcggctccatagtctgtacctcgtctcgaacgacggaattcatcagccgacagaatatccggagagggcttagctacattaaaagcgatgtaactgtcatatgtgactaccgtttttccagcttcacccgagccacgtttcgttgtaactaaaatcacaccattagcacctcgcgttccgtaaatagcagctgaacccgcatctttcaataccgtaatagattcaatatcctgtgcagcgatgttacggatatcgccacctgccacaccatctatgacaatcaaaggactattacttgcagaaacagatgttgcaccacgtacttgtaatgaagaactggagttaggattggcagctgcctgcgtattgacattcaagcccgcgacttttcccgataccatttccatcgggttattcatagcccccaaattaaaatttttcttatccacttgtacaatggaactggaaacttcttttttactcaatgaaccgtaacccactactacaacttcttccaacacctgctggtcatcatgcaagacaacatcaattttgtttctaccggatacgttcagttcctgcgtttggtaacctacataagaaaaaataagtattgcatcaggattgacattcaataacacatagttaccgtcaatgtcagttatcacccccgaagttgtaccctttaccaatacacttgcaccgataagaccttcacccgttgcatcggtcacctttccttgtacctgaagttgttgcgcaacagcaacaccagtcatcataagaaaacccagtaaaaggatcatgcgctttttaaggcatctctttagacttttctttttcatcttattagaaattagttaaacaataaatagattgatgcaaatgtattatcaaaacaaacgcacgatttgggctgagataaaaatctaaagtcctgcaacaggcaatcaactataaaacaacgcattacaaaaatgctattgctactaatttctaaatcatttctaaactttttaaggcagaagaaagcctcaaaaggaggataaaatcaaaaagaagttattttcatcactcgttcttcaaagtcctctttacaaagagacttgttttttagcttggaacgataagtatagatggtagttatggaataacgcaaaaattctgcaatacgcgcactgtctgtaatacctaaacgaatcagtgcaaatatgcgcagttcggtaacaagcaattcttcatttttaggatgcaattgttcttcaactggcaacaaacgattaaattcttctacaaagttagggaatatcttaagaaaagatacatcgaaattgtgatagaactctttcaactcttgatttatgaaacggtcggacttcaatgtacgatataactcctcaagtttaccggtagcagcctgcttgttcaatatgcggcgatattcttccatcttacttatataagaggaacttaaactgaggaaacgtcccaaatactcttccttaatatgattggcttccgtaagagtctgattagtatgcaataatcgttcattagcctcatgttgagacttgttcagcttcttcaattcactattcaatatactcaattgagaattggcagcaacaacttttttacgggcataagacaattttttcatttgccatagcacacacagtactgtcaatagaaggaaaacagaaaggatacatatgcctgtaataaacattctctgccgctgttgctgtatttccttttcttgctgataagcacgatctatgagcggaagcatcttggaattctgcgaactacgcaaccgagtagtataataattagcatcttccatactaatcttgatatagtgattagcacgttccaaatcgcccattccataaagtaattccgctaatgcgcacaaagaataattttctttcaccactgccctaatgtcagcaatggcactgctaatacgtgcttccatttctttctgcttgttccccacgacatgataagcaaaagccagaattgaagtagctactgcatactcacgcgtattggatttcaaccgaggtaaaaaattcttcaataaacatatagcctcctgactttttccctggtcaatgagctgaggtgcatgcacgactacatatctataagtatcttccggtactaggctgattatagaatccctatacaaatttgctatccgaagataattgttcacgtagttccgatcagtggcgtactctgcctgatagagatataggttttcaaaacatacataatagtccactatattttcaccctccaacgtgttacgaggaagcgatttcagcaattccattgcttcaacaaaaaggcccgaagtatttagaatatgtactttatttaatatagaactatttatccattgcctattatttagccgtgtggcaataagaatattttcatttatataatgtaatgcagaatcactaatataagaattatattcggcaaaaagacgattttgtatcagataacgctccatgtcagtaagcctcccttgcttcaactcatcctttatcaaagaaatataccgttctttttcttcctcgtattgtctacgcatcacgatagtcttatccagaacagacaaaaggctatctattgcagatgcatacataccaagcgaacatggcaacagcattattattaaaatcaagatacgcatcataggttaacattgtgacatattcgagcaaagttactacaaaaaagtgaaatgcggaaagatatagtgatagaattgagttacaagggttttggttgaagtggcgataatccgtgaagccattacaatccctgccgaagccaaatcctgacgccgctacgttacttgttcgtaaccatgcccgaaaatgcgacaaacgggtacgaatagcgaaacaaggctctaaggaatagtgagttatccataactcatgcgaaaaatcaggttacggaaaaagattgcgccgttcctccccgttttgcgtaccaacaccggactcttcaccaactaattttgaaacccaaaaattaaggacaatgaagagtacattttcagtaatctactacctcaagcgtcaggtagtgaaaaaggacg

SEQ ID NO: 4411 - DNA, 81510 bp, Unknown
  gut microbiota DNA sequence
tatactatttcagcaaatataggtacttataagacgaaattgacagagcttcctgaaaacgtaattaataaatatccgggagatggtgtccgtgacttcgttattggtaggtctcccaatgtattttatggtcttgtagctgatggaattttcaagacacaagaggaagtggataaccatgctgaacaaccaggaaaagctattggtcgaattcgttataaagatttggatggtgatggtcgtgtagatgaattgactgacagaacgtatatcggaacagccgatccagatttctttggaggaatcactttcgatttcaaatatcgtaattttgatttgaatatgtttttccaaggtgtgtttggtaatcaggtaagtaatgattggaagcgtcagagtgatttttggcatatatcaggttccgttcctgtcggaaaaaatcatccgactagattattggatgcttggtcgtttgacaatcctgattcagatattccggcgatgacaaatgttatgaccaataatgaacagagaatgtctacttattatatagaagatggttcttacttgaagttgagaaatatagaattgggttatacttttcctgctaaaatcaccaacaagatgatgatgaaaaatttgagagtatatgcttctgcaagaaacgtatttactttgaagaaattctggggagatgaccaatttacaagttttgacccggaaatgtctggttatggatatttgactccattcacaatgactttcggacttaatgttacattttaattaaaaaaacacaatgaaaaagtttatatcatcattattgattttaaccgctacattcggcttgaccggatgtgaggatttcctacaagtaaatcccaaacaagttttggatgagaacttgcttgttaaaccaagtgatatggaaggctttgtaacagctgcttatgcaagaatgacagatattccgtcttgggattcaccattctcaccttggtggtctggttctcttcgttctgatgactcttataaaggaggaggaggcgtctgggacggcggcgatggatggggatatatggaaacctttgtgaatttgactcctaatggctggcctattgattacccttggtatgtttcttatcaagttatccaaagatgtaatactgcaatccagaaaatgcagccgatttctgaagaagattttccagtaaagaacagtcgaatgggtgagatgctgtttcttcgcggatttactcatttcagactgaaagagttcttcaaatatataccttacatggatgaaactataacaggtacttctgcagattttgaggctgtaccgaatagggacaagaactatccgaatgatcagtatctgtgggagagaattcttaaggatttcaaggatgcagagtcatatcttccagaagtacagatagataaaggaagagtcaataagaatgcggcaacggcaatggttgcaagaacattgatgtttatggcttatgagcaagatgagagacatcaggtgattaatgtaaacaaagaacggctgaatgaagctttgatttatctgaacaagttgacggaacaagaaggtaaagctttggacttatgtagcaattttggtgagaatttcatgattgagtctgataacaatacgaaagaatccatttgggagattcagtattctatcaatgataatagttctactgggggtaaaatcaatagaagtgaaggactgaatcatccgtggaattggggaggttttcagtgttgtggtttccatcatgcaagctatacaatgggtaatgcttttaagactggtgaaaatggattaccgttgtttgatacctataatgatgattgctatggtgattacataaagaaagccgatggttcggatgatattacacttgtagatgccggtaataaggctttcttcgaccgctacactttcgaccctcgtttcagtcatacgatatgtgcacccggacagccttggaagtatgacccttatttgatttttgaggctcgtggtattcgtaatggtgttgagtatggttatttgaaatctgtgaaggaattaccgcatcctaattgtgactgtttgctgtacgatggttggcagtttaactctatgaacaagagattaatcagatatgatgaagtgatactatggaaagcagaagtcctaattcaattggacagacaagatgaagctttgcctttgattaataaaattcgtcagcgtgccgccaatagtcttgagaatctgaaaactgcggatggaagctatattctgaactacaaatgtgagttgtataaacctggtgtgaattgtacatggaccaaagaatttgcatggaaggccatggaatgggaaaaccgtcttgaactagcttgtgaaggacgccgtttcttcgacttgcagcgttggggaactctggagaaaacgatgaatgcttattttgcagtggaaagaaatagatttgactggatgaatatagcacgctttactgctggtagggatgaattcttccccatatcacaggctcagatgaagtgggcaaaaggtaattatacacaaaatccgggatattaatattaaacttttagaattatgattatgaaaaatatagtaagaatatgcatggtaatatttacttgtttattgtttactggttgttacgacagagatgttgtaggcagtaaaggaacacattatattttgcctaaagtggaaaaccttgattattcagtacaagggaatacagtgaagttgacatggcaaattccagataatatacctgatgagtttttgaggcctcttgaagtaagtattcagaaagtggagaatgacatctatagagatgtgataaccattggtaatgaagggacatttgccgaaggcattgcaatcgatgcgaataaaaggtacagatttgttgtaaaattggtaggaaacttgacagacgaagttgtagaaaccggaatatccagcagaatatactccgaaggtcaggtaattgacattcaataattaaagtttgctgtatcatagatgcagtccggtatttctatgcttcccgtgtactgcatctatagatacagtaaactgacttaaaacagacgctatgaaaaatattctatttatggttctttctttctctatattcttgttgttttcttgttcggataaagaggaaaatgagccttttataccagttgatgagattatctctgcgaaaacttttctgattccaaataaagacacgaaggttgtttcaacgattctgaattttaagaatatagatgccatagattatctgatggttcgaaaaagtggaggaaatagttattcagtcaaaatagatagaaatgagttaactgcagattatgtatttaattatgtggttcagaagacggatccccagaattttagattgatattggtagcagtttataaagatggaaacaaatcgaatgacctttctttgaatgtggataaccgttggggattctttatccgaagcgtcagtcgtactgctcgtgtaactggtagttctatggacggagaaaacttcccaaaccctaataatactgcgacaaaatggaatgtaggaggaacagatcttggcattatttgggagatgcagcccggaaaatatggaattttctttggtgatacttttgggtatgactttaagcctaatctggctaatcctggacctaacggagggagttggcgtagtaatgtgctggctttctcggaggataatgatttagaagatggattgtcattcagcaatatggctactgatgataaagggtatgcccgcgagatagtatatgggggaaaagattcgtcaggtaatggtgattggacttctatcccaacagctgctattcgtgctaatggaatagattatgtgcattattttaatatgagaaattggacgggatggattacaaattattcgggaatatataagtcggttgataatggtttgacatgggctaaatgtaaagatataaccttctcatcttatagtttttttggccaggtagggtactttaagaaagatggatatgtttatatgataggtactcaaacggggagggatagcaatgctaaattagcacgatttcatgaaacagatattgagaataagacagcttatgaatattggaatgcttttactaatcaatggataaaaggcaatgaaaatgaggcaacagtattaatagaagataaggttggtgaactttcttttatatataacgagacacataagaaatggataattgcttatttcaatgcagatagatataatataactatgcgtacggcagaagacataactggcccatggagtgaaccctatgagcttgctaatggtagagagtatgcccaattgtatggttcttacattcatccgttgtcggtaactggtgataatttatattttacgatgtcaatgtggatgccttataatgtttttttaatgaaggctgaattggctgatatgggagagttttaattatattgataaatataatatcatgaacacacgcacattaattataacttttgtttggatgataatgtccaacataggcatctgtgctcaagagcattgggatgcacaagagagaattgagttgaataagggtgtttttccgaagaattttagtaaagctattgatgctatacagtatgatttattaggaattgagagaggaaaaagccatgtgaaagtgatagataacaacactttgtacataaacctttctttttcgcttaaaaactctgttcaacaaggtgattggcgtatagccgtaaagccggattttttaccttcgttccattgggcgccacatcttactcctactgatagaaatgtcatcgatcaacatgtattccgttctcctgcccttattgtagcagacgatcatcaaactcttattcttattcccgatttggatattatgcagaaggggactcctgtacgatggtatatggatatggacgcatcctctaatacacttattctcggaatgtgtaataaccatgtatccgaacacgttctgtttgagcgtgatcaagaaactacttacccaaaaggagatattgaaataggcttttatttgatgtattctgatagcaaggaagtattgcggaatccttttaataagccgttagaatttatgtggagtcgatgggggcatgctgcatatgagaaaggtaatccggtgaaggaaaacctagaaacgtatgtgaaacatacttataattgggcttttaattcatggtcagaaaatgtgtggcagcaatttgagttagatgggaaaaaagtgggtgctcccgtattcattgtgaatgttactcaaagtcctaattatccgggagagattaatgaacgtgaatttcgttctatctggaatcaggcatggttcagttcattgcgttctgcaagtggattatatcgatatgcaagaagaaccggtaatagggagcttcttgcaaaagcaaatttgacaaaagaactggctctgtcatttccgcagaggaatggttttttctatggacttatcggtacggaaatgcatgaagtagagattgatggtaaaaagtataatcggagcaaggggtggaatacctattattggggaaattccaacagaaatccttatacctggaatccgaaagaatctccgtatcatattcttgatatgagttggacagcattgttgatgcttcggtggtatgatgaattagaaaaagatgcccgtcttttggcttatgcagaagattatgcgatggctttacttggaatacagtatgaaaatggttttttccctggctggcttgacttaaagacaatgcagccgatgaaccatttgaatgcttctcctgaaacatctttatcagttacttttttacttaaactgtatgagcttacacataaggaagagtataaacgggcagcatttagagctatgaatgcagttatccatgaaattatcccggttgggaagtgggaagactttgaaacctattggtcttgttctcgttacggttcggataacttggtaggtaaaaaagttttgcggaacaatatgcataaacagaataatttttcaatgttctggacagctgaagccttactggagtgctatcgtcttacctcaaataaagaatatcttgattatggacagcgtacacttgatgaattgctgatgacccaagcatcgtggcagccgccatacatgtatgtaaatgtattgggtggttttggtgtgttgaatgccgatggtgaatggaatgattcacgcgaaagtcttttttccgaactcatcattcaatatggaaaacttcttgataagccagagtatatagaacggggatatgctgcacttaaggcatcttttgtaatgatgtattgtactgaaaatcctcaaaccaaacagcaatgggaaaaagttcatccgttctttgcttcagaggattatggattcatgatggaaaattacgggcatggcggccgtacaaatccggcaggtgaaggtatgggtgagtttacaatctatgattggggaaatggagcagcggctgaagcgtacaaccgcatccttgataaatttggaaaaatagaataatgattcgttaacattaataattcaactatggtaagatcaactttaaccttattggccctatttaatgtggctatactgtttccgggtaaagcaatgtcccagaacagtgaagggcgggagtttaacggtaagtatcaaaaggaatatctggataagattgcatttcctatagggggaatcggcgccggaatgttctgtttggagggaaccggtgccatttcgcatgtgtctctcagacaccatcctgatgtgatgaatgagccgtatacctttgctgcgatttatgtaaagggggttgagaacggagcaaaggtattggaagggcaggttccgacttggaagttatttggtcctgcacagagtggtttaggtaggggagacaagacgtacggtcttccacgctttgaagaagcggtattccaggcacgtttcccttttgcaactgtagatttgaaagacaaggatatgcctttggctgcaaagattacgggttggagtcctttcattccgacggatgtggacaattccagtttgccggttggagtactggaatatcaatttacaaatacttccggtaaggctatcgagacggtattttcttataataccaaaaatttcatagatggtcagggtactatccgaggggtaaagaacgggtttgttttagaatccgatcagaacaacagtgggctagctatttatgtggacaatgctgttgctgttgtagaccattgttggttccgtggtgcctggttcgatccgcagactgtggtttgggataatattcgctatgggcggattgctgataagcagccggttaagggtgttgctccgggagcatctgtttatgttccgctgacgttgcagccgggagagacaaaaacagtcaaggtaaacttctgctggtatctgcccgattcaaacctttctatcggtggtgccagaaaggtaggacaggcatttacgggaatgccctgcaagggaacggcttccggtcagcaacctgtgagcggctttgtcggcaagcagttgctgaactcgttcgataagggtggagatggactgacgggtattattcagtctcctgagttcaatattgggaaaagatatctgaagtttctggtaggtggaggcagtcaggctgaccgtacttctgtaaatcttgtagtagacggaaagattgtagagacggcggtcggaaatcagacggagactctgagtgaaaccgtatgggatttgaaaccttatcaaggaaagaaggcttttgtgaaagtcattgatttggatgtttacccgtggggacatattctggccgaccagtttgtgttgacagacaataggaatgaagatatttacaacttgtcttctacatccaccttacttgccgattttgaaagcaacagttggggagactggcaggttgtggattcttctgaggaagaaaaacaattcctggcagatgaaggagatgtcgaagctacctacagaccttggtactcggagcgtttcaagagtttgaatgaggttatcggctattgggatgcaaatcaggcgatgctggaaaagaacagccggctgttcagtgatgcattctatagttcctctttgccggcagaagtactggaggctgttgctactaatttaactatattgaaatctcctacggtattacgtcaatgggatggaagattttgggcttgggaaggatgtcaggattcttttggctcttgtcacggaagttgtacgcatgtgtggaactatgcacaggctttgccccatttgttcccgtctttggaaagaaccttgcgtgaaacggaattcagggtaagccagaatacggaaggacaccagaattttagagtcaacttgcctatttcggcaccgcctcacaacttccatgctgctgccgacggacagttgggcgggattatgaaagtttaccgtgaatggcgtatcagcggggatacacagtggatgaaagaccttttcccggcagtgaaaaagagtcttgactattgcatccgtacatgggaccccttgcataagggctatcttgaagagccgcaccacaatacttatgacatcgagttctggggaccggacggcatgtgtacaagtttctatttgggagctttgactgcgtttatagagatgggcaaggagctgaagcaacccgttaaggaatatacggccctgctgtcaaagggcaagaaatatatggaaactgcactcttcgatggagaatatttcatacagaagattcagtgggaagggcttcaggctcccaatccggttgatgtaatgtctttcgggggaagttattccgatgaggccctgaaattgctgaaggaagaagggccaaaataccaatacggtaccggttgtctgtccgatggaattttagggatgtggatggcttccgtatgcggactggatgaagtgctggacaatgaaaaggtcaggagccatctggtggccgtacacaaatacaatctgaaacatgacttggtagaccatttcaatcctcaaagaccggtgtatgcttgtggtaaggatggcggattattgctttgcacatggccgaagggtggtatgctgtcactgccttttgtatacagcaatgaagtctggaccggtatcgaatatcaggttgccagtcatttgatgatgaaaggtgaggtggaaaagggcttggatattgtccgtgaatgccgtgagagatatgatggaagagtaagaaacccattcaatgagatagagtgcgggcattggtatgcacgtgccatggcaagctatggaatgttgcaggggcttacaggagtgcggtatgatgctgttgacaaaaccatgtacatcaattctaagattggtgatttcaaaagtttcatcagtactgataccggtttcggaactattgaatggaaagcaggaaagcctgtgttgaacgtggtttatggcaacattgatgtgaaacgctataatgtttcaggcaagattgtggattgaggtcaattaggatagggatgtacaatcaaagacagattaagatgacagagaagaagaaacttcttgttttgtgtgttgcactattttgttttatagctgtttctgcacagcagagaatgtctgtatcgtctcctgacggaaaacttagattttctctgaaagtaacgccggagagtgtttcatatgacatcgactataggaagcagtctcttatagcaaattctttgcttggtttcagctttgatagcggagagttcggaaggaatcttaaagcaggaaaggtgcagcgtaaaaagattgatgagacatacaagctcattgtcggcaagacaagtagtgtacgtagccgttgcaatgaaatgaccgttcccatgcaggaacggtcagattccggccgtctgataaacctggttgtaagggcattcgatgacgggatagcattcagatatgaatttccggaacagaaagcatgggattcatacgtgatgtatgatgaaaggacacagttcaacttgcaaggaaacccgatggcgttgctcatgtacctgcccgggtatgtgaatacacacgaaggggtatacagtcatgtaagatatgacaaggtggcaaggaaaaggctgatagagatgccggcgacattcgagttcgacaacggggtggcagtggttataactgaagcggccataagggactatgcgggaatgtacctggtgaaggagaagggtggactggtgggaaagctctcgccaaaactggggcaggagaagataaaggtcgagacagacagtttcccgcaccgtaccccgtggcgcgtaatctccgttgcagaccgggtgggaggattgctggagacgaatatactaacaagcctgaacgagccctgcaggattgaagacacttcatggattaagccttgcaggaccacgttcacatggtggaacgggaatgtcgtgccggacagcacgttctctccgggaaacaacttcgatacaaacaagtactacatcgattttgcagcacgcaatggcttggatgcacatggaatctacggatatgcggagactccttggtactatgatgacaacttcaatttcggatgggcgggacccaatgcggacgttacaaaaccgataccgtgcctgaacatgccgagaattgtggaatatgcaaggagcaagggggttggcatacatctgtgggtacactggagaccgttgtacgacaaactcgaagaagcctttgcgctctatgagggatggggagtaaaaggactcatggtggacttcatggaccgtaatgaccaagagatgatacgcatccaagaagagatactggaatgtgcggcaagacacaggctcttcatacagttccatgggtcgagcaagccttccggactggtaaggacgtatccgaatgaattcacacgggaggggacactcaactatgaagtatgcaaatgggacacgctggtgaatgcggaccatgacattgcgatacccttcaccaggatgctggcgggagcgacggactatcacctgggagggttcagggcactgccgcgctcggagttcaagatacagtatgtaaatcctcatgtaatgagcacacgctgccatatgttggccatgtatgtggttttggaaaaccatctcacctctttgtgcgatacgccaaaggcttatgaaggtcaaccggggttcgaggtgctccgtaccgtgccgggaacgtgggatgagataagagttccgctggcaaagatgaatgagcatgtcacggtggcccgcaggagcggttcggactggtgggtaggctcgctaaacaacggtgcggaaaggaatctgaaattggaattggacttccttagtgagggagactaccaagcaacgatctataccgatgcagaggatgtggaccggaatccaaaccatctggacagacaggtacggaaagttacaaggaaggatatcattgaactgaatctggcaaaggatggaggagcgctattacatatcagaaggttataagggtgatgtttatcagttgaaattgtatttcaatcagttgttagtttgttaggataagaagattgttccaggataatatttttaatcaatggatttataacatgaacagaagaaattttataaagagagtgggccttttgggggcaggatatgcgctgaataaaaacttgatgtttgcgaattcaggcgtagcttcgacagctgcctctttttcgtcgtttccaacagtaaggaagcctatatcggaaaggaacttcaaaagtcctgccattgaaaaggccattgctacttttaaacagaaggtcaagaatgaagaactgggctggctgtttgggaattgttttccgaatacgttggacacaaccgttttttattcagaaaaggatggccgaccggatacatatgtgattaccggtgatattgatgccatgtggttaagggatagttctgcccaagtatatccgtatttggatttcatgtctgaagataaaaacctgcaaagactgataattggcgttatcaataagcagacctcctttatattgaaggatccgtatgccaatgccttttatgatgatgatacgaagtatacaagatggaacagcgaccatacggagatgaaaccgggtattcatgagcgtaaatacgagttggattcgctttgctatcccattcgcctggcatatggatactggaaaaagacaaatgatgcttctcctttcgatgcgcaatggaagaaggcgatagaaaccgttttaagggtctgcaaggaacagcagagaaaagatggtaacgggccttatagctttcgcagaacttcggaatgggctatagatgctgttcctatgggtggagtgggctataaagtaaatccggtcggattgatttgctctactttcaggcctagtgatgatgccactatctttccttttctcgtcccgtccaatttctttgcggtggccagtttgaggcaggcttccgaaatggttcaaaagataaccaaagacaatgtactggctgatgaactgttggcgttgagtaaagaagtttataatgctttgcagacttatgccgtggtgaatcatccgaagttcggtaaaatctatgcttttgaaatagatggctttggatcggcttatcttagtgatgatgccaacgtccctaatctgctggcgttaccctatctgggtggtgttgatagtgatgatgcaatttatgccaataccagaagattcgtgtggtcggaatacaatccttatttctttaaaggttcttattttgaagggataggaggacatcatattggtacggacatgatatggccgatgagcctgataatgaaagccctgactgctcaagacgataaagagttacagcaatgtatccagatgctccagaaaacgcatgccggtaccgggttcatgcacgagtcattccacaaggatgaccccaagaaattcacaaggagctggtttgcatgggccaatacattgtttggagaattgctgtggaaaacattcaatgagaaaccatatttattggaatattaatcatctaattaatcaatgtaaacaaaaatttatgagaagaattacaaaattcagtttgttactctcccttgttctgggattgtactttcctactgtttttgcacagtcgaacatgacgaacgaaatgtttgacttggcaaagttgaagtcgggtgtaaaaaacaaaagaatctccagtacagatcctaccggaggtaacagagatcacttggagcccttcaaaccaggtgagaaacgcatcattgcagacatcaagggaacgggagtcatcaaccacatttgggtgacgattgcgcctccacctcccactttgagcagaaacgacattatcattcgcatgtattgggacggcaacgattatccttcggtagagtctcccatcggccctttcttcggacaaggctgggatgagagatacaactacgcatccttgcctctttcggccggtcctgaaaacggtaccggtctgtcgtgctatttcgctatgcctttcgagaagggcgcacgcattgaaattgagaaccagagcgaccgcaacatagatgctttctacttctacgtggattatctggagatggcgaagcttcccaaggacatgggccgctttcatgcctggtataaccacaacctgactgaagcacttcccgaaggcgagacggagtggggagttaccggtgcccagaagccgaacaccaccggcgaacgcaactatgtgttcatggaaacccaaggcaagggacactttgtaggtatcaattactatgtgcattgtcccactcccatgtggtatggcgaaggtgacgacatgtggttcattgatggagaaaaggttccctcgctgataggtacaggtacggaagacttcttcaatacggcctggtgtcctaaagaagccttctcgcatccttacttcggttatccccgtgtgaacaatgatataggctggctgggtcgtacccacgtttaccgattcttcattgaagatcccattttctttgaaaagagcctgaagggaaccatcgaacatggctccaacaacaacttgacgttggatttgtctaccgtggcttattggtaccaagattcggctgtggctcttcccgaagctcctacaaaggcacagcgtgctccgaaacctttcatcaaccatgttgatatacatcgttggcgggatgcctggcgtaagtccaagggtaacaaagccactctgtggggcaacgagtaaacttttgtaacgctctttttttatacgttcataggctgatatttatatccggggttttgccattatattggcaaaactgtgtctctatattggcaaaactgtgccactatattggcacgactatggaaaaatagttctacggagcagcaaattcaataaatcattaataaaggtacgaaatgaagaatattcccaaaaagcaatttgcgggctggatgctgatgctactgttgtgcatcagtatctcggcatttgcccagtcgcctaagaaggtgaccggacgtgtgatggatgcacaaggtgagttactcatcggtgtgaatgtgacggaggcggcagacccttctaatggtgtggtgacggacatcaacggtacgtatacgattacgttgaaaggaaataaaccgtcattgaagttctcttatatcggcttcaaggacaaagtggtagcggtaggctccaaaggagtgcttgatgtagctttggaagaagacgtggcagcccttgacgaagtggtggtagtgggcttcggaacgcagaagaaagcttctgtggtcggctccattaccaatatagagccggccaagcttgccgcggctcccagccgttcgctcagtaacaacctggcgggtatggttcccggtgtgattgcggttcagcgtagcggtgacccttggttcaataactccgacttctggattcgtggtatcagtagctttactggcaataccaatccgctggtattggtggacggcgtcgagcgttcgctccacgacatcgaccctgaagaaatcgcctccttctccgtgttgaaggatgctgccgccagtgccgtctatggtgtgcgcggtgccaatggtgtagtgatgattgagaccaagcgcggcaagattggaaagccgcaggtgaacgtccgcttcgaacactcctttacgcaacccatcaagatacccgactacatcggcagtgtgaagtatctggaactgattaacgaaatgtatgccgagcaaggtagagccccctttgccagcgaagccaccttgctgaactacaagaatcagaccgacccggaactctatcccgatgtgaattggtgggacatcatctccaaagaccatgcagacaacacgaaggcaaacgttagcgtcaacggtggtacggacatccttcgctatgcgttggtggcaggatattacaatgagaacggtattattgaacgcgacaagaaccaggagtgggactcttccctgaaggtgagccgatatacggtacgttccaatgtagatgtgaatgtgactcccactaccttgttccgtgccaatgtgggcgtgttcctgcaaacccgtaacgctcctccgggagacacggaaaccaatcagggcattttctatcaagccatgcgtgtacctccttacgtgcatccggccatctatgccgatggacgcattccccgtgtgatgtacaagcagaacccttgggcgtgggccacacagcgtggatacgaaaaactaaaccacaataagattgaatccctagtatcgttggaacaggatttgaagttcatcacaccgggactgaagttcaagggaaccttctcttttgacaagttctcggcaacttccgtgacacgttccaagaatccctattactacaatcccgccaccgcacgcgatgcagagggcaacatcatcactgatgtgcagaccaccggacaagagttcctgggctatgaaaaaggagctaaatggggcgatcagtccatctatctggaaggaatgttctcgtacaaccgcattttcggcaaagtgcacgatgtgaacgccatgttcctctacaaccagaaggagtatgacaatggtgatgcgcttccctatcgtacccaaggcatagccggaagattctcttatacttacgacagccgctatgttgccgagctgaacttcggttacaacggctccgagaactttgccaaaggcaagcgcttcggcttcttccccgccgtggcgttgggatggattgtatcttccgagaaattcatggagccggtttccgatgtcatctccaacttgaagctgagagctacttggggtaaggccggtaacagtaacattggtggtaacagacgtttcgcctatatttctaccattgtcaataccggttcgtacagatggggtacagatgcggaaatctatcgccttggacgttcggaaggcgaaatcggtgtgaacaacttgacatgggaaaccgtgaccaagatgaatgccggtatcgacttaggtctatggaatggtagcgtgaacctcgtagtggatgtgttcaaggaaaagcgcgatgacatcttcatgcagcgtaagaatgtgcctggttctgccggattcaaccgccctgtttgggccaattatggcaaggtcgagaatcagggatttgatgtgtctttgaatgtcaaccataagttcaatagcgattgggccatttccgctatggcaaactatacctacgcacacaataaggttgtggaaatagacgaacctgccgccatcttgggtacataccgttcgcaaactggtaaacctgtagggcaattgtttggcttgatagcggaaaggctctttacggaagatgatttcgatgaaaacggtatgcttaaggaaggaattccggcacagaagttcagtgatatgagtaacctacgtcccggtgacattaaatacaaagatttgaacggggatggtgaagtgaccgcagtagataaaacagccattggtggtacacgtattcccgagattgtctatggttttggagctacagtaagctataagtcgttcgatttgggagtattcttccaaggaacaggtaaaacctaccagctcttgggcggagagacctggttgccgggttcttccttaggtgctggtaacatctattcgaacattgacgaccgttggacacctgaaaatccgaggcaagatgtattctggccccgtatgggagacaaggctgtggcaaacaatgaacaagcttccacatggtggttgcgtgacatgagtttcctgcgcctgaagaatctggaacttggatatactcttccgcaacgttggactaccaaaattggcatccgcggctgccgtttgtttgcaagaggaaccaatctgctgacgttctccaacttcaagctttgggaccccgaactggaaactaccgatggattgagatacccacagatgaaatctgtatcagtgggttttagcatcaatttcaacaattaattaagatacgaagaaaatgaaaaaatataaatctatagcaaaagctgtcttattgtcgtgcaccctggcattgacaacgagttgcaacgatttcttggacaaggctcccgacgaccagcttaccatggagatgattttcacggacaagataaggactgaggactggttggcaggtgtttattcatccattcccagccccatgtgggggtatttcaaggagcaaggttataacattatgggcgatgatatcactattccccaagattggtcgccgtatggatggagcagtgtgtatgcctacaccaccggaaactggagtcctatctcaacatgggccccctattattgggtagaattgcacaagcgcatacgttccggccttatcttcttgcaggaggcaaaagtacttccggaaaaagacctgacggaatcttatgtcaaccagatgaagtacgaagtccgcttcttgatagcctactattactctttgatgattgagttgtatggtgccataccgtttactcccggtgtgcttgttgccgtcgatgcgcccgaatcggagatgatgacgccccaaagaccctatgccgaagtggtagattggattgacaaagagctgctggaagtgtcagaacatctgcccgctgtctatcccaataataccgattggggcagggccacctctatcatggctttggcaatacgtgccaaaacactgttatttgccgcaagtccgttgttcaatggcaatccggacctcaaggactggaagaactcagaaggagaattcctttttgatgccgaagccaaaccggaaagatgggaaaaggctgccaaagctcatctcgacttgataaaggcagccgaagcagccggacataagctgtactatgaatataatgtggatggaagcattgaccccttcatgtcttactataacatgtcgttgaaacgcttctcagaaggtaataaggagattcttttcggacgccccgaaaatgagaacctgaactcctggcaggctcatcatctgccgaaaggtatcggtggaaatgccgctatgggtgttactcaggaactggtggacgctttttatatgaagaacggtgaaatgcctatattgggatataacgaggatggttcgcccattatcaacccggaatcggggtatgtggaaaacggattctctaccaatacagagtatagaaccacgaagtggccgggcggtggaccttcgaaccttgccaataaagaaaccggtgtaagcccggtaacagaagaaggtacctacaacatgtattgcaaccgggagcctcgcttctatgtttccgtcatctataatggcgcatggctgggagttgataaccgtcgtgtgaacttccttcaaggaggccgtgatacggatatgactttcgactctccgcagaacggttataatgtccgtaagcgaatctctttggatgtatttcccagagataaaaagcatgtatatcagccgggtatcttatacagaatggctgaagcgtatttgggctatgcggaagcattgaacgagtcttcgccagctcccactcccgatgtatataagtatgtgaacttgattcgtgaacgtgccggaattcccgctttgaaggaagggctgagtaaggaagaaatgcgtgccgccattcagcaagaacgtcgggtagagttcaattgtgaaggtatccgtttccatgacctccgtcgttggaagattgccgacaaatacctgggcggcaagctttatggtatgaatcatgacggttctgagaagagcgatgatgtgaacaattcgaaggctttttataagagaacttactacaagagccgtaccttcaacaaaagaatgtatttatggcccgttccgcaggctcagatggacatcaaccccaatttgagacaagctcccggatattaataaataattagagaacaagtatgaaatcaataaaattcattttttgtacgatggcgttagcgtttaccacattgatgtcttgctcggatgataatgaggtggacttgtccaatcgtaagtttgtccgtatcgatcaatcggcagtttatgtggagattgacgagaatgtcactgtcaccgcttccgttgacactttggcgggtgattcctatctgttgaaatggagcgtgctcgattccgatgtagcgaccattgaaggtgtagaaaacaacgcagccgtcattacgcctattgccgttggaaaaacggttatcaaggtagagacagccgatggcaagttgtgctactttagtgacttgactgttaccaagactcctaagacgtgttacattgactttggtgtcattgattctccggctccgtttaacaactataggaatcccagagaccccggattggtaaatatgctcgaccatagaggtcgtcctactactttcggcatcgaggtggacaaaccgttttccggaaaattggctcgcggtttgaataataatttgggtcttccaaaaacagcttctgaggatatgtttttcagcgacggtattaagattccgctcagtggatttaaggtgacaggtctctctcaaggaacaaaatatacgttcagtttctatgctcacatcaatgaccgtggaactgaaaccgagttccatgtaatcggaaagaacgatggcgttgcttatttggttaatgactataatttagatagaacggtagagattaagggtattgagcctaatgacgaaggtgttgtttatatcgagatgaaaccgggcccgaacaatgtacaatgggccaaattctttggcgtaaataccatggtactttcagaagaggagaattgatgtggttttatagaccataatcctttctattgaaataatactgtcagtgaggagagataccgtttaaacaggcattctctccttgcctttttaaaaaacatatagtaaaatagtttatgaaaattaatttgaaagaagtttctgttttcttgtctgccattctattggcaggctcgtatgccgtggctcagaacccatacagatggacggatgagctggagttattgaaaagagtggataaattgccggagtatcgcactggctcttatgtggagcagttctcgagttacgaccgtaccggaggcaatgatgatggttttgcgggtacttattctttccttcgtaaggaaggtgataagttggtgattgctgagatggaaggccccggagtcatcaaccgaatctggactcctacaccgacggacaatatgctctatttctattttgatggacagaaagagcccggtctgaaaataaagttctcggatttgttttccggtaaggtttatccgtttacaaagcccgtttgtggtaatgaaatcggtggtttttattgttatctgcccattacgtacaaaaagtcctgcaaaattgttttcgatggacctaaattggaattcattcagatacaataccgtaacttgccggaaaagaaggtggaaacctataccggtgaattctcacagcaggataaggatttgttggctgaggtgaatagaatatgggctgacttgtctcctgctgtaacgaattatacctttggaaaatcagctggtgtacagacggaagaaaaggtatttacactgagtccgggagaagaagtttctttctttgagatggcagaaccgggacgtattgtaggtatgtcgattgatggcggaacatctttcgaaggtttatacaaagatgtgattctttcagctaaatgggataatgagaaggtggaggctatttatgcccccgttgctgatttttttggatatgcctatggaaaaggagcaatgcggagtatcttaatgggtaagcaaggtacttccaactactgctatctgccaatgccttttgacaagtcagcttctatgaagatgatttataaaaagagagaaggtattcagcaatctcctatttctgtaaacgttaaagtgtactataacagtaataagcgtaatgtgaaggaagagggtaagttctattctgtatggcgtagagagaaaactcctctcggcattttccataagtttgctgcacaaaaaggaaaaggacattatgtaggaaccatccatcaggcacaaggcctgcgtccgggaatgaccttgttcttcgaaggggatgacagcacttacgtagataataaaatgcgtctgcacggcactggctccgaagactattacaacggtggctggtatgctttattggatcgttgggacagaggaaacagcctccccctccatggttgcctggattattcgcttccgatggccagaaccggtggataccgtttcttcttggccgacaaaatgtcctatgagaaggaaatctatcatggaatggaacatggtgaagtaaaaaataatttcccggtagattatacatctgttggattcttctatgcagcccagccattgcaaggcagagaagagcctactgctgaattacgcactgtatatcagccgacagaacatatctatttccctcaactgatgcagctgagtcttggtggaggtgtccaggtaacaaatgagcgtggaatccgtatgaccacccagcatggaggagtagtgcgcatcatgctgaacgatgtgcccgaaggaaaatataaagtgctgataaactattttgagaaaccgaatggtgccgacttccaggtttggcaacgccagaagcaactgtccggatggatctctactaagaaggacaaagaagtgtctaaagacagagtacatgtaggagacatcaatttgacggaacaaaccaattcagtcactttccatgtgagaaataataacggtggggaccagtttgaactgggactgattatcctggaaagaataaaggaatagatgtgggaatgtgtacttgtatatggaattgataagaatgagaactaaacaaattttactgttcgggcttgttacctgtagtttgacgggcaatatggcttgtaaggatgctgatagtgaaaaaacgctgtgtattgataatgtacgtatgatatcccgtgtcacgggtgatcctttgccgggagatacattgctgaatcccaataataccggacctgactttgatgtatatggaacggatttggggttaatgtggcatatggatggaaaccgtgtgggcatgtttttcggagataccagtggagaaggttttgtcgtgaataaaaatggtggcaatggttccaactggcgttccaacgtactggctttttcatcggatacagagcttacagacggtcttaaaatagattcaatgctgcttgatgccgatggtaaggcgcttgaggtatgtgcgggcggtaagacgaatccggaggtataccagacttccatccctacgagtgctattcgggccggtaaaacggattgtgtccatattatgaacatctatgattggggagcgcctcatggacgctggcttaccaatttttcttctgtctatacttccaatgatgacggtcggacatgggagcggcgtgaagaggtgactttttctcccgacagtcatttctcgcaagtggcttatgccaaatgtgacggatggatttatatgctcggcacacaggccggacgtggtgatgctgcgtatctggcgcgtttccttgagaaagatcttctggatatgaaggcctatgaatactggaacggtgaaagtaaagagtggatacgtggaaatgaggctgctgctactccggtattgagaggtcccgtaggagaagcgtcgctgatatggcacaagaagtttaagcgttggattctgacttataattatgatccgaatcatgacgagaatcctttgaccaaaaggcatgccattctttattgtacatcgaaggatctcgtccagtggagcgagccgaaagtattggcggaagcggacagatatccagctttgtattgcgcttacatacatccgttgaaagacaatgatgaccagctttggttcatcatgtccatgtgggggccatacaatgctttcctgatgtgtgccgatatgaagctggaataataatcacttgacttgaattggatatgaagcttaggaatttatttttattaatagctctctcgttaccggtttgcttgtctgcacagacaagcaaacaaatctatctgcaacgagccgattctttgcttcagcagatacttactctctataaagtggagaagtatggcctgctgacggaaacttatccaagaaacccggagcagagaattacatatacggccaataccggcgctgttgttaaccagcaggaggtctctttcttgtggccttattcagccttggtatccggttgtgtttctttgtataaggtttccgggcaaaagaagtacagaaaactgatggaccggcagataaagccgggactggacctttattgggactctacccggattccccattgttaccagtcgtatccggcttttgcaggtcataatgatcgttattacgatgacaatgactgggtggccattgatttctgtgattactatgaacggactggtgacaaggagtatctggaaaaagccatccagctgcatgactatatttattccggatggtccgaagagttggggggaggaatctattggtgcgaacagaagaaagaatcaaaaaacacttgttcgaatgctccggctactgttctttgtatgaagctgtttaagttgactaaggatgcaaaataccttgagcaagctaagaagacctatcaatggacccgtgacaatctttgtgacccttctgactttgtatattgggacaacaagaatttgcagggaaaagtggatccggccaaatatacttataacagcgggcagatgattcaggccggtgtacttctctatcaggtaactggagagaagcattacttgaaggaagcgcagcagacagccgagggtgcctgccgtttctttctgaaggtacagcctatcgcaacaggagagatgaaattcttcccgggaactccttggtttaatgtaatcttgttcagaggtttgaaggcgctatatctggtggataggaatgaggcgtacataaagaccatgattgagaatgcggattatgcctggaactatacgcgtgatgagaatggcttgtttagtaatgattggtcgggaaacagaaaagagcagttcaagagtctactggagaatgcctgtatgattgagcttttcgccgagatcagcgaattgcaatgaataaaacctttaaacacaataaacaataaataaacagaaaatgaaaagacagattgcagtattggtatccgccttgctaatgggtggcggtacctatgctcagaatggtgctcaggcgcaaagaccgaaagcctacatggtgtctgatgcacatttggacacacagtggaactgggatatctagaccacaataaaggattatgtatggaacacgatcagtcagaatttgtttctgctgaagcagtatccggaatacatctttaattttgaaggtgcggtcaagtatgcctggatgaaggaatattatccggcgcaatacgaagagatgaagaaattcatagagagcggtcgttggcatatcagtggagccagctgggatgccactgatacgctggttccttccatagagtctgcgattcgtaacatcatgctcggccaggattattaccggaaggaattcggtgtggagagcacggacattttcttgccagactgtttcggttttggctggacacttcctgccattgcgtcccattgcggactgatcggcttctcctcccagaagttgcagtggcgcaacaaaccgttctacggtaacgacaaatatcctttcactgtcggcttatggcaaggtatagacggctctaccatcatgatgacccatggatatgattataaccaacgttttgaggacggggacctgtcggaaaacaaggacttgttggaattgaccggccactctccgcttcacatggtctaccgctattacggtacgggagacataggcggttcacctacattggagtctgtacgtgccgtagagaaaggcttgcaaggcaatggtccgttgcagattgtcagtgccacgagtgaccggatatataaagacttccagccttacgcaagccatccggaactgcccaagttcaacggtgaactgttgatggatgttcacggtaccggatgttatacttcccaggctgccatgaagctgtacaaccgtcagaatgagcttttgggggatgcagcggaacgctcttccgttgtagccgaatggctgaaccaggcttcctatcccggagctgcattgactgagaactggcagcgtttcattttccatcagttccatgatgaccttacgggaacaagtataccgcgggcttatgaattctcatggaatgacgagttgatttccctcaagcagttctccggtattcttacttcctccattgacgctgtggcaagaaagatggataccagggtgaaagggataccggtggtgctttacaatgcgcttggattccaggtttccgatgtggcagaggtagaacttgccttgccaaagaaaccgaaagggattaccgtatatgatatgaatggccggaaagtggccgcccaattgctgtcctatgctgacggtaaagccagactcttgatagaggctattgtgcccgctaccggttatgcggtatatgatgtccgtacttctggtccgtcggctgacacccgggtatctgtggattccaatgcattggagaattccatttataagataacgctggatacaaagggtgatatcgtttcgttgtttgacaagaagaacggcaaggagctggtgaaacccggtaaatccattcgtctggcactcttcacgcagaacaagtcctacatgtggcctgcttgggagatcttgaaggagactatagaccgggaaccggtttccatcacagaggatgtgaagatgacactggtggaggatggtgagctgcgcaagtcactctgcatcgagaaacgttatggagagtcactcttcaagcagtacatccgtttgtatgagggtagccgtgccgaccgcatagacttttacaatgaggtggactggcagttgtccaatgctttattgaaggccgaatttcctttgaacatggcaaatacggaagccacctacgatttgggacttggaagtgtgaggcggggcaacaatacggagactgcctacgaagtctatgcacagtattgggccgatttgactgaccgtagtggaaactatggcgtgtctgtcttgaatgacagcaaatacggctgggacaagccggacgacaacaccctccgcctgaccctgctgcatacccccgaaacagacaaggattatgcttaccagaaccgccaggacttcgggcatcattgctttacatacagtctggtgggtcatgccggtggacttgacaaggctgtcaccatagagaaggcggagatattgaaccagaagctgaaagctttccgtaccgataaacataggggtacattgggtaaggagttctctttcgtctcttccaataaccgtaatgtcattatcaaggcattgaagaaagccgagaactcggatgagtatgtagtgcgtgtctatgagataggcggtgagaaggtgcaggatgcggtactttcttttgcaggcgaaattgccagtgcctacgaagcggatggcactgaaaagagtatcggttcggccgaattcagtggaaacgggctgtctgtaagtataaagccttattctataaagacattcaaggtacgtttgaagtcatcgggcgaggacgcttatcaattgcagtatgcctctttaccgttgtcctataactgtaaatgttcctcattcaacgagttccgcggtgaagctgattttgagtcgggttattcgtttgcggcagaactgttgcccgaatccctgactgtaaacgggattcctttccagctcggcgagaaagatgccgccaacggaatgacgtgcaatggtgatactattgttctaccggaaggtaaaaagtataataaactgtattttctggctgccgctacggacggggactatgccgccactttccggtgcggagggaacaagagtgaggtcattgtaccttcctataccggatttgtcggacagtggggacattcgggacataccaaaggttatctgaaggatgccgaagtggcttatgtgggaactcaccgccactctcctacagccgatgaggcctatgagtttacctaatatgttcaagttcggtgtcgatattccggcaggtgctgccagccttatacttccgaagaatgaaaaggttgttctttttgctgccacattggtggaggaaactctgaaccccgtccaggttgccactagcttgttccatacagccatccgtgacaatgagatggagttgaacagtgtggaggtggaaaaagaaaacctgttgaagggtgcgaagattatcgcctattccggctattttaatgataatgagaagcccgaacgtatcgttgacggggatgtcgataccaaatggtgtgaagtgggaagtgtgttgaattatgtggattttgatttgggtgaggcgaaaactgtgagcggttggaaactggtgaatgcaggccgtgaggacaaagggtacattacttccgcttgcttcctgcaaggcagaaacagccagactgaagaatggaagacacttgacaatatagatggaaaccggcagaatgtcgtatcacgtatgattgacactccggcgcaggtacgctatgtacgcttgatgataacccgtcctatgcagcatgcaggaggaaaggtgttacgcatcaatgagatggagatttactaaaataatcggttatgatgaaaaaactagtttttgtaattcagttgatatttctctatagcggtttggctatggccgacccggttatctctcttaagacattgttgcatgagatgacagaccgttccgtgctggcgcgttggcccgaaaatgcctatacgtgtaagcagttcagcagctacgaccgtagttcgcataacatgacggataagcgtgcctggtttggtaatttcgaccaaggacagtttatccgccaggaagagaacggagggaggacggaatatgtgatgatggatgccgaaggccccggtgccatagttcgtttctggatgactttctccggcataaatcggggacaagggactctgcgtatctacatagacaatgaggaaaaaccggtaattgaaggcaatgtacgtgatatattgagcggacaagtcctttgtggagaacctctttcaacttcagtacccgatgaggctccgatggaagaaagagggcataatttatatttgcccataccttatgccaagcggtgcaaggtgactatcgaatcgccggacttgaagattactccggaggggaaaattgagagtaagaccattgtatactatgctatcaattaccgcacttatacttctccggtcaaggtgatttctttctcggccaaagagttgaagaagaatgcccggctgatagctgctgtcaataagaagctgtcggaaggaacacctggtattgatactccgcttgcgggaagagaaagtacgctcaatctggcggcttctctggctccgggtgaaagccgtagttttacgattgacggctctcgtgccattcgtcgtctttcgatgcggattgatgccgatgaccgtcgccaagcacttcgctctacggtcttgtccattgcctttgatggggaactaactgtctgggctccggtcggtgagttttttggggtaggctattatcccgttgcaactggtacgtggtatacgcgggccgtgcaggatgatgtgatgagtgcatggtgggtgatgcctttcgagcggaactgtacgattaccttgaccaattatggggaacagccggtggagatatccaaggctgctgcagttagtggaaagtggcagtgggatgagcgctccatgcactttggtaccacatggcagcagtttacgcatatccatgcccggggcgatgagtttgcccaggaccttacgtttgccgatcttaaaggtaggggcgtgtatgtgggagatgcggttactgtctataaccccaacttgggttggtggggagaaggagatgaaaaggtgtatgtggacggtgaaacctttccgtcacactttggaacgggtacagaagattattatggctatgcctgggggcgctatgaaccgtggataaaccatccttttgttgcccaacccataggagatggttgttatgctcacataggtttggcgcagaatacccgtgttcgtagtttggatgcgattccgtttacccggagcctgcgctttgacatggagttattcgattggtcgaatatacaccttaattatgctccgataaccttctggtatatgcttcccggaggcgaaatacagccaaaaccctttgtgagcgatgtacgcgaacgggttgccaaccaaccgtcagatattttcggttcagggatgagtctggttgtggagggcgaagtcatgcagcctcgtccggggcatatgggttccgttgaattgcagaccaacttccaccccttgtggagtgagggtatgcagctctactggaaagagtttaaaccgggagataagctgtcattagtttttgacagtgaagtggaaggaacttattatgcgaaaatacagttcactgtggcgcctgattatggtacatttgcccttcgtgtaaatgataaggtgattactccggaagtcagtctgaccaatggagaagtgtctctgcttttggtgaatcttgggcgggtcaatttgaaaaaaggaaagaatgagttgcagattgagtcgattgcactggctccgggacatgataccggtttctttgggattgataagttgactcttcgcaaataattctgtagacgtctctatcgcagggattgtacttgtatggatagctttggataaataaaagtccaaggctatcttttttgtatcagttctttttctatgataaaatgctatctttgtcctcaaaataataggtaagatgaaacttcgttcactctatatcctttctattgtagggctgctactggtaattgtggtgcagattggtggtatgatgtatgcttacgacaataccaagaaagaggcggaacgcgcactgaacgaatgttttcgtctggcttttatcgaaacggtggacaacgagattaataatttaccgtttcctgacatgactatccctttttactcgtatctatccaaagacagtatcaggtctttcgaagatgagatgtttttaaactatcagcaggcagcttcctttctcgaagatgtatatcatgtcgccattccattagatgtgatggcgaggttggtagagaagaaactgaaatggaaaaatatagaccggactgtaaatatccgtcctgcgacggacagaagcaagcgttcggtatatgtacggttcaagtctgttctttcggaaaaagcctggttgaatgagaagaaaggagaggccattgaagctgtcatgttttctccttttataccgcttgtcaaggatatagtctttttgttccttcctacgcttctcttggttgtttttctggtgtacagttgggccaggcaaatggattccatacttaaacaaggtaatgatattgagaagcagcggtctgctttttatgtgctggcagagaagatgaggttgccgataggtgaggtacgtagtcagatatcggagagccggtgggcagatatagaagcctcggggcaacatttgctggacatgacagaacatacgcttacgggagctaagcaaagcgaacggcagcggcaggtgcgcaagcaatattcttttaaagtcttttcgattgtcgggttgattgccggctgtctgctgatggtagtctggtttgtctatctgtaccgtgcttctttcaaagaaactgcctatcaggtaaatgattgttttgaagcagctttttatgacgaggtcttgaaacgccgcctttctttgctctacgaacagactgatagggatggaaaggatgaatgggaagagagtgttgaatcgccttttgcaaaggagcaaagggaatttctggagaaagagcagtcgaagtataaggtgaaccgctttggagtggtacatatgtacaatccggtcgatttgaattatcgactacgctctgctttgattatgcagcgcagcatcaatgaaagcggaatggaacttcctctctccgtgcagtacctcgattctgcttttgcttccaggttggaagccttgggaatgacctataagagtggtatccgccagtactacgctccctccgatagtacagtggtggaagcaggatatgcctcggcaaaatatcaggatatttcttcccggtttataccgttgaaggaggacagcatcctttgtatacaaggtgtggtgaagaatccgtatcgctacgtcataagttccgtatggtatctgtttctgcctctttgggtgatgtttttggtggtgttggactgtattctcggccaggtgaaagttttgcgtacacagcggcatttggagcaattccagaaggattttacttatgctatgatacacgacatgaagtctcctctgagttccatcctgatgggagctcatattctgaatagcggcaaattgtccggtaagcccggaaaagaagagaaataccggcaggcgatgatggaagagtgtgagcatctgcttaccctttccaatcgtgtactggtacttaccaagctggatgagggacatttggaactccatcaggaagaggtgcctttgcggcctttacttgatgatatgattgccaaaatttctctgaaaaccagcaaaagggtagaatttacgaccgtttatcatcgttgtgaaatggtgtatgccgatgccttctgtttgcgtgaagtgttgggcaatctgctggacaatgccattaaatattcccatgaagaggtaaagatagatattatttgcgaatcggagaaaggcttctgcaagataaaggtgtgtgacaacggattgggtattcccttaaaagaccagtctcttatcttcaaccgttttgaacgttctgcagcagtcgggcgaagtggaaggggcggtgctgcaggttttggtctgggcctgaattatgtacagcaggtgatgctggcacatggcggcagggtagaagtggaaagtgaagaggggtgcttcagtgaatttacactctactttcctattgagactgtataaatttaccacacgtggagattcaatccttctgatttgtcagtaatataggagtctccgccgaatgagcgtaattgccagaggatgtaaaggtcgtcgaaactcatgacagccagtaatattccaaatcgtgtgacatcataattgccacttgtcataccatatataaggggcaatatacccagtagcaggaagggcagcaggcatgtggtgcgatattgccacatgcgtatcggcgaaaacaatctgaacaacagtttatgtaggaatagatttaccaggacagctgccaatatacacatgaagaatctgaccagcgatagatggctggttgtttctccatgtatcgactgaaacagaatcagcattggtactgcaaatactatggcagctatgatgccgtatttattaatcctcttgcccgaaactactatctctgtcccttttcggctttttgttattgaaatatctgctttcatagtgtggattttttgtattgatgttgcaaaggtagagtggggcacatgcttcataagttatcgctacgttaatattaggttaagaggcgttgttttcctcgtttattttatagcaatatgactgttgcattcattcttttccttatttttgcaatatataataaacgcattatgataaagttattgttggtagaagacgatgcaagcttgagatatatagttcagggagggttggaagatatgataggcggttatgaagtgattactgccgccaatggcgaggagggcttgaaacagtggaaagaacaacatcctgatgtgatagtatctgatatagaaatgcccgttatgaacggttacgagatggtgaagcgtatccgcgagacagatggggaaactccgattctgttctcctctgccctgatatctcctaaagatgtggtaaaaggttatgaaatcggtgccaataactatataaagaaaccgttcattcccgaagaactggatgcacatgtccacgccttattgaagctttccaaaggcaaaaaatcgaaagacacgagtcaatgctacaagataggcaaggaatatgtgttggatgccacacatgccactttgaaacatgcttcgggtgtaaacaagactttgactgtgcgcgagacaggtttgttgcagatgctttgtgagaagcggggagacgttatccgccgggaagctatcttggataaattctggaatacggaagatgattactttgcttcccgcagcctggatgtatttgtgacgagacttcggaaatttctttcggaagacgagtcggtaaccattaaaacagtgaaaggagtaggattgatactgatagaaaattaataatgtatccttctatattgcaataatttagcagtacatgtactgttcttctggtttattttcgttatttttgtatagcagtattatatgaatataaagaaggagggtatatgcgtataaaacggaaagtcagtatctcttgtcttggtggtcgtttgggaatctgcctgctgttggcttttgtgccgcaattgctttttgcgcaggaagacagtgtacgtttcattcgtgacagtatacagatacagccggaattcaatgaatctctattctctccttttgagcttccttctgaaaactctgccccttcttccatgtttcatccggagcactcctattccctgcccgatttttcactgaaagagtctcttcgtctgccttatcagaccaatccttccctgctatttcggggagattacagtacaagcggtgtattaagacagtttcctcacggtatgttattcggttccggtgggcagaccagcgtatcgggtatcggacgtttcaacaatgcttccctgggatatcagcatgcctttaaccaaaggctgacgctccagcttggcgtagatgccatgaagataaatatgattcattccaccgggcaggctttcaatacttcgggagctttgcggtatcaggcttcggaccgtgtagcttttaaggttttcggttcgtatgccataggaaatacttacgggatggatacccaccgctacggtgccaccatgtctctggatatgtccgaacgttttggtatggaagttggagtacaacgttattacgatgcttatcgcggtcgttgggagacggttcccgttgtgattccctattataatttcgacaagtttaaattaagtctggatgtaggtggaatcttgtatgagattctgcgtaacaccgtctttgataatagagggggcagtggcggagcgactattgccccaccacgttttcagatgccgccattgagataagataagtataaatcagctttttgtagggacaatcatcaaacagtttactactgttacataatattattgctaatgtagaaatactttcatgatatttcgtttattttttgttttgctgttcgtttttgtgcggacagttgtccgaaaatggacattactataaaatagttattctttgataatcagtgatttaattctttggcacgcagattgactatatataggcgaaggcggttacgaaacaacaacctcctcagagaaagaagtaataacaataaaaaataacgattatgaaagcaacagtattttcaaaagcagtggtaatgatggcagtggtaatggcaagtgtaatgaacttttctgcaagtgcggcaactcctgccgattatgtgaaaaacgaggagatgaccggcgaactgatgaccgccaagactatcttccgcaatgaggacggacaccttttccgtcacctccgctacacttacacttatgacagtgagaaccgtgtgacgagcaaggaagctttcaagtgggatagcgtaaaggaagcctgggtgccttatttcaagctggatgttgaatacactgacagtgaagttgagttgaactatgcccgttggaacagtagaactaatggttacgacagctatacgcaaactaccgtttacgaactgaatgacagcaatgcggctttgatgttggcaagtaccaaataaaggataatatatcaaatacaaaagagccaagtatcgtgaggtgacacacctttgatacttggctctttttcgttgaggaaatgtattattgtttctctgttatcagtccgacagcataattcagcactgtatcttcatccttcatgaaatctgctacggtttgggatacttgatgatggggcggtatgcctataccttccatggggaaacctttagaagagacgtccggctggcgggtagggatacggaaataggtccgctgtttggtacagaaaggacgggggccattgccggtatcccctccggtagcttcgccgatgagggtgacatttccgctttccttcatgtcgagtgtgaagctctcggcagcagagagcgtatatgtgtcggtcagcagatagattttacccttataggcgtcggcttcgggctgcatgaagtagttcttgctgacgcagtgtggttgtgtttcgcggatgaagtacttgcagatgtttactccattcatgctgtttcctcctccgtttctacgtacgtctataatgaggtatggtaaatccttgactttgggatagaccgccttgaaatcttccatgacggggttcatcatggttttgatggtaaggtaaccaatgctgtcttgtaatatcctgctctccacagtttgttcttcgttatccggaaaatagtccctttgtttcaagggaagggtgacggtcagagtatcgccccctctcagcagtgtatagtttcttagggtgtctgcataactacggaacgcatcataggctgtacggagccgtctgtgggggacggtagatgcttcggtatatttttcgttctgttcaatccattgtttataggggagtccgttgatagctataattcggtctttgtcctggaagccgtattctgtcagatagtcactgggtttgtcaacgaacaaggaatcctctataaaggctacgcgctgattggctgtgtacctcttgtagcaggtaatggcgtgggcgcattgtaaggcagagatgtattcctgcactatcagtccgtagtctgtggtggtctgcgcctggcgaacgcgggcgtcacaagcttgatacaatgaatccatattcagatgcttggcttggtataatgaataattctccatgacaatctggtgtatttctttgaaatcttcttcaaactgcgaggggggtaacggtagttccgcgatgtagaagttttctacatcaatctgcttgtcattatagaaatagttggcataaacatacaaaccacaccaaatggttgccagtacagccattacgatgactattacttttgaaatttttttcagaatcttcatgttttatagagtttagtcgatatttgctttttcggtaaaaatagtaataatttttgttaatcttatttttctaactccttatttgccaataatggtaacatggaggtaactaactgagcttcaagtgccttcttgtacgatgtctggtagttggctaactttgcagccgtaaatcaaaacatactaaggagaagtgattatgaagaactatcaaaaagtaaatgtgcccgcaggcgaggcacgtgtcgagttgcacgattcattgaatctgactggtgcagaagtatctatcagcaatttgccggctggtgcaggagtaccttttgtgcattcgcacaagcaaaatgaagaaatttatgccgtcctctccggacgcggcaccatggtggttgacggagaaaccgtagaactgcaggcgggtgactggcttcgcgtggctccggcaggagaacgccaattgtcggctgcggcagacagcgccatcagtgtgatttgtattcaggtgaaagccggctctctggaaggctttacgatgacggacggtgtggtgaagtaagaggaagtcacacaagtaaaattaaggtgataggggatggtctgtggtgcaggctattccctattgtcatatgatgtgcagtgatttattgactgcgatttgttttaagtcaaaataatcatatattttgtactatacctaagaaaacagactatgtcaactgatgcaataaaacagaaattatgattaaattgaagaaagagcattgtttctgtcacataacgaggacccaatcaaagagcttaaaactaagaattgaaaacataatatcatgccccagcataatgccatcaagcttttcgaagcgaagaaagtccgaaccgtttgggacgacatagaagaaagatggtacttctcaatagtagatgtggtgacagtctgctgtatgcctatccagttacgtctccgatagattggaaaaggaaagatataagaggaaacgtgttttcattttgttcttgttttgggcgcaaaagtaataaatatctccgttaacctaacattaacgtaacgataacctaaaagctttttaccacctcctatctttgcaatgtcgaaagggaacaactcccccaaagacaagaacttgaaacaaaatgtataacttaaaaaatagaaccattatgaagactttagtaatttcagcaatcatcgcaatgacctctttagtaaacgtagtaagcgcagcagccgttaaccgtacagacaactttgcctataataccgaaaccaacgacggccgtgtggaaacacaaaccgtattcaaagtggagaatcagaaattcctgcaccgccacctgaagtacaattacatttacgacaactccggtcgcatctcccaaaaagaagtgctgaaatggaacgaatccacgcaaagctttgagaagcaccacagtcttaacttcttctatacggacgacgtcactgtggaatacgccctctggaacgagcaaagcaatgcctacaccgacatcaagcagaaagccgtctatcggcagaccgacagcagtgtcttgcgctacctcagttacgaatgggacgaaaagaacaatgactggagcttgacagcagaccatcacatgacggatgaatctgtgcagctattggcagagaaataagaaaacacgatttctattctatttattttaaaaaccaagacattatggcaatattatttcgcaaacacgaacgtttaagtaatttggcacagaattctgtaaaaaggtatatcctacaattatatataaatacagcaatccggcaagactgaaagaagtggcaaaggaaatcagcaccatgtccagtgggagtgagggtaattcctatagtgtgctgaaagttatctgaagaaatcactgttggcaggtcgtatcgtgactgagtaaattctgaaaatatagagactatgggcctcctttctacactgtgtgcgggagggaggccttcttctcttccaaaaataacggattgcctttcttgaacaaacaattataaatatctttggagcattattcactcattaaactaacagaaaacaccatgaaagtcacaaacaaatcaacagtgagagtaggcgcggcaggagtcgcagtcattggaattatagtattgttcttggtcatgtttgccgtggagcgtattgattcgggacagacgggcatcatcgtcaatctggccggtagtgagcgtggagtagatgatgccaaggtggagaccggatgggtggtttacaaccgttttgccaagcagctattcgaatatcctgcatttgcgcagattgtagactacgaacctttcgacattcaggacaagaagggaaccatcttcaagacagaccctactatagaatacttcattgagcgggaggatgccaaagtagtttttctacgctatcgcaagactaccgaagaattggaacagagtgttatcctgacggaagtgaagaacgcttataaggacgtggcaggactctatgagacggattcgctcatcaacaaccgtccggctttcgagaaggaggtggaggcattactgaaggagcgtctcagtacccgtggctttacgtttaccaacatacagtcgtccgtgaaacccaacgatgtgctgcaagctgccattgacgaaaagaatactgctgtgcagaatgccttgaaggtggagaatgaaaagaaagccgctatagccgaggcggaaaaggtagtagctgccgccaagggtaaggcagatgccaaccgtatccttcaacaaagcatcacgccggaattgattcaactaaaggctgtggagaaatgggacgggaaattgccgttgtctaccggtggaaatacgttgccattcctgaagttgcaatgacaatctctatgagaccccattggcaacttgattcttttggggaggtactgattgtgtgcgcggataatcacaaataaatcaagcggtaagccatctatctctctatttgctaagatttattcgtccgatacttgttgaattatcgtccgacagccgttgaattatcgtccgacaattgtcggacgataattcaacggctgtcggacgaataagttttagtaagcaagaatttaaaatgcagtattgcaggaattgttgcttaaatagggaatgtagtaaatgggagacaactgttgctcatccttgttgggatcgcatgaacaaggttttcaagaagataaagggcgtttcgccgagtgaatatgtacttttgtaagggaaaaggggaaagatacgaaaggtatgggcataaaaaaaggagtaccgctgtactccaacctttgttaaccttaaatctaatactatgaaaaacacattgcaaaggtacgaaccttttgcttatctccaaataaagcaaataaaaaagactgttttataacatgttttaggaaaatgcgtctctttgttaaggcttgctaaggttttgaagcctctccgtggctgttttctaaaaaagaattatctttgtcacattaagttttgggtcttacttgacgatttcctgctctcttggctcaaagctttggaaattaaaaattaaagacttgtatgcacgaagatattgtccttaccccgatgatgaagcagttcctcgacttgaaggcaaagcatcccgatgctgtcatgctgtttcgttgtggtgacttctatgaaacctattccaccgatgccgtcgtcgcgtccgaaatcctcggtattaccttgaccaaacgtgccaatggcaaggggaaaaccatcgaaatggcgggtttcccgcatcatgcgctcgacacctatctgcccaagctgatacgtgccggcaagcgtgtggccatctgcgaccagttggaggacccgaagctgacgaagaaactggtgaagcgcggcatcacggagctggtgacgccgggagtttccatcaacgacaatgtgctgaactaccgggagaacaacttcctggctgccgtgcatttcggtaagggtgcctgcggtgtggctttcctggacatatctacgggcgaatttctgacggcggaaggacctttcgactatgtggacaagctgctgaacaactttgcccccaaagaggtgcttttcgagcgtggcaagcggctgatgttcgaaggaaacttcggcagcaagttcttcaccttcgagttggacgactgggtgtttaccgagacatctgctcgcgaaaagctgctgaagcatttcgaggtgaagaacttgaaaggcttcggtgtggagcatctcaagaacggtatcatcgcttcgggagccatcctgcaatacctcatcatgacgcagcatacgcagatagggcatgtcacttcgctggcacgcatcgaggagaataagtatgtccgcctggataagttcacggtgcgcagcctggagttgatggggtcgatgaacgacggtggcagtagtctgctgaatgtgatagacaagaccatcagcccgatgggtgcccgcctgctgaaacgctggctggtattcccgttgaaggacgtgcagccgattaacgagcggctgaatgtggtggaatactttttccgccagcccgatttcaaagagttgatagaagagcagttgcatttgattggcgacttggaacgcatcatctccaaagtggcggtagggcgtgtctctccgcgtgaggtggtggcgttgaaggtggctttgcaggcgatagaacccatcaaggcagcttgcatggatgccgataatgccagcttgaatcatataggcgagcagttgaatatctgccagtctatccgcgaccgtattgaccgggagatagacaatgacccgccgttattgattaataagggaggtgtcatcaaatccggtgtcagtgccgagctggacgagttgcgccggattgcctactccggcaaggattatctgttgcagatacagcagcgcgagagcgaactgacagagattcccagtttgaagataggctacaacaatgttttcggctactacatcgaggtgcgcaacacgcataaggacaaggtgccggcagagtggatacgcaagcagacccttgccaatgccgagcgctatattacccaggaattgaaggaatacgaggagaagattctcggcgcggaggacaagatactggtactggaaacacaactctatgcagagctggtacaatctttgagcgagttcattcctgccattcaaatcaatgcgaaccagatagcacggttggactgcctgctctcctttgccacagcggcgcgcgagaacaactatatacgccccgtcattgccgacgacgatgtgctggaaatccatcagggacggcatccggtcattgagaagcagctccccatcggcgagaagtatattgccaacgatgtgatgctggacagccagacgcagcagattatcatcattacgggtcccaacatggcgggtaagtccgctttgctgaggcagacggcgctgattacgctactggctcaaatcggcagtttcgtgcctgcggagagtgcccatatcggtttggtggataagatattcacccgtgtgggtgccagcgataatatttccgtgggcgagtctacctttatggtggagatgaacgaggcggcggatatcttgaacaacctttctccccgcagcctggtgctgttcgacgagctgggacgtggtacttctacgtacgacggtatttccatcgcctgggcgattgtggagcatatccatgagcatccaaaggcgaaggcacgcaccttgtttgccacgcactaccatgagttgaacgagatggagaaaagcttcaagcgtattaagaactacaacgtttcggtgaaggagatagataacaaagtcatcttcctgcgcaaattggagcgcggtggcagcgaacactccttcggtattcatgtagccaaaatggcgggtatgcccaaaagcatcgtgaagcgtgccaatgacattctgaaacaactggaaacagacaaccgccagcaggggatttccagcaaaccgatggtggaagtgggagagacacgcggtggtatgcagctcagcttctttcagctcgacgacccggtgctgtgccagatacgcgatgagatactgaatctggatgtgaataacttgacgccgctggaggcgctgaacaagctgaatgatattaagcggatagtgaagggaaagtgatttttacttataggagaaaacgtggaatttcaggacttgtacaagtttttgcacaagccttgaaactccatggttaatagttttttctctaagattattcttccaggattatttccagttctgctacggcagccttctgacctttgtcatgcgccgataatcccgatagtttcacatagcgtgcccggcagggcgcgaattctacggtttgcgttgctttgcccgtggcgaaagtgccggaagcaatcggtttgccccaattctgtccgtccttgcttgtatatacttcgtaggaagctatccgtccttcttcgctgtcttgccgcggagtgtagcggatgccttttactgtggcttcttgggatagggcaagatgcacctcatgggggtagggggctatgtagaactggttgtgtaccgtgtgccaatagctgtttatgttaccgtctgccgccagcttcatgctgttgtccgcatcgctgtctgcggagaccactgtctgtctctgggatgctccgctgatgtttttcaggatgcttacgtccagttcggctgccgaagcccacttcctgccgtgcatttcggacaaggggatgaatttgaagtaacgggcggtgacgggtgtttccaatgttatggtttgggcggacgtcagattggagaatgtgcctttgacggtgccttcccaattctttccgtctttgctgaagcttagctcgtagtctttgacgtggccgttgtcattggaatgtcgcgccgtgtagatgaacttgtccactaccagcagggaagccatgtctaccacaatgctgtgagggaactccggaacgggttcgtgccagcgggtgtgccaatgtgtggaagggtctccgtcgatggcgttttgcgcctcttctccttggctgtcgctgctggagaagactatcttccatgccgagtggtctacgaatatgggtagttccacagtggtgacaaggctcttgcccaacttttcggaaacagcgtatgtctgtacctttccaccgtcgatgaactcgaacggtgccgtgtattcccggtatccgttgccgtcaaggctgtagaagatggtggcttccggagttccggtactcatttgcagatagccgttgttgtcgcgctctgccattacgggcatgcaggcaggcatctgtacacgcgctttcctggtaagctcgctttgcgtgtagcttctttccagaggcatcatgatgaagccgaatgctacgggagctgcttgcagttcgtatttcttcatcgggccagggccgcagcttgcgttgcccaggggacggttgtgggcatcgaggcaaagaactgtctccttgcgcatcgggatgtcgtatttgtgaatcagtttttgcagatggtcggggtctgccatgtcttgcgctctgacatgcagggcggaagccgccatttggccgcctgccacgaacacgaagcccataccgtcggcgttggtgatggaaatccagcgcacctcttcgtggttgcccatctcctgaggctttacatagtccacccattggtccgatactgtgctttcgtatacgcctattggagtggcgtccttgcggtctgtgtagttttcccatgggccacgtccataccagcgcatacgctcgaagccttcgggcagttccatccgatagcccacgcgcggaatgatttcgccgtcggataccggcatgatgacgctgttcaccatgatggaaccgtcggcatttacggtgtattccatttctgtgcgatactcaaagccgagtttgcctttgtggcagttccggatgtgcagggttattctgtcctcctcttggcgggtttcccatttgccggtttccgtttgcagttggtaaaggcctttgcgttgccaatcgccgctcacttgtttatcgttgtcggtgggagcacggaagaggttcagttcgagtcctttgctcatcagggggacgttgttcagtgtatacgccgacaaagttccttctttcttggagaagacggcttcgaaacgctcgcctttcaccaccaatgcgtcggcagtttcgtttagattgatgtttcctttttcgggtacgaatataggtttctcgctgcttgatagcttgaattgttcggtggctacctcgtagtcggcttttgcccattcggtatctcttttttggcagaaactgaaattgataaagtattctgctccgggtaccttcgttgcgggtatgtctggcagggtgatgactttgcttgcctgtgcttccagcttcaaatcttccagattgcctgagcagacggtccttccatcttccgttatttcgtatctcccgtagaggtcttccatattggcatggaatcgcttgttgctgattctatatttgccattccctaatgcttctatgcggatgggttgatgtatcttcttcatttcataggatttggcagataatgtacggtcggagaagatgacgccgttggtacagaagttaccgtcgttgggcttgtcaccaaagtcaccgcctacggccatgtagaagcctttgccgtcgggagtgggcatacgcaggctttggtccacccaatcccaaatgaaacctccgatgagtgccggatagcgttcgtaggtttcccagtattccttgaagtttcctatggaatttcccatggcatgggcatactcgcatactacgtgaggtttcacgatctcgcccttttgtattttctccaatcgttcacggcctacgttttccagccagtccacacttgggtacatgcaactggtcacgtcgcagaaggaactgtttccctcgtagtgggtggggcgggtagtatccaaacgtttgatggccttttcagcagtggagaagttgtttccgtttcccgattcgttgcccatggaccacattacgatggaagcgtggttacggaaacgtttcacttggttctcgttgcgctcggtgaatgatttttcccactgtggctcgtgtgagagacgcatttcgccgtggcactctacattggcttctgccaatacatagatgccatagcggtcgcataggtcgtaaaagtaagggttgttggggtaatgggaggtacggacagcatttacgttcagcgctttcattagttgtacgtccttttccatctcttctttggagacggtacggccattcaatgggctgtgatcgtggcggttgacacctttgaaaagagtgggtttgccgttaatcagcagttgtccgtttttggcaaactctatttcgcggaagcctacctttacactacgtaggtctgtcacttttcctttctgttttagggtcagggtcaggttgtagaggctgggtgtttcggctgtccatttcagtgggttcttcacatcgaattccagatgggtactacctatttttgtggcgtggatagtgcgtgatagcacttcctttccttctgtgtcggagagcttcactatgagttcggcagaacttttcttaccggtgatttccacgtccaaaaaaactgtagcattacgataatctccgtccaagtcggttcggaagaagaagtccctaatttgcgtgcgtggtgctgaccataggaatacatcgcggaagataccgctgaaccgccagaaatctagacattcaagaaaacttccatcggtgaaacggtacacttcaactgccaatgtgttttttccttcttgtaaatagggagtcagattgaactcggcaggtaagtagctgtcttctgaatagcccacttttttaccgttcaaccaaagatagaaacctgcttccactccattgaagcgaataaatacatctctgtccttccaagatgtgggcaaagtgaattcacgtcggtaactgcctacgggattgggcatgttggcaaaagtatagtctgccgggcgaggttggatgacgttgggccattgtactcctttactgtaatcacagaaagggtaaatggtattacaatacaaaggcttgtcccagggcttattatggcgtacagcctctatctgccatgtggcgggcactttgatgttatcccagccacttacgtcgtagttgggcttgaagaaatccttcggccgtttttcgggatcggccacccaatggaatttccatgtaccgttcagagtttgataatagggggattcctcgatgctcaggcgtagggcttgtccttcgtcggcaaagggaatagcggtttggcatgccgtttctttgttcactcccgaaatgttcaggtcattccattcgggttgttcgtgagtttgtgctgttgcggtagcaagcagcccggtgaatgcgatactcaaaaaagagcttcttttcataaatacagatggtataagatgattaagtattagtgatttcctgtccttccttcacgttcttcttttgctgttcgcagtattgacggggtggcattccgtaacgttgtgaaaaagctttatagaaagtgcttcggttggtgaatcccgtgcggtccatcagctcttcgatggtgaagttgctggagactaacaagcgttccgccgtggagaggcggtattctttgatgatgtcggcaggcgatttgtcagtaagtggtttcagtttgcggtagaactgccggctgctgtagcccatttccttactcaaaagttctacttgcaggtctggattggctaagttcttttcaatgacttctgtcattttctctaagaattcttgttcttctttgtgcaagcagcttccttctttccaggtaaaggtgctgagtgccgaactataatattccttcaggttttcttcgcggcggatgagatgatagaccatcttttccaaatatttcacattgaaaggcttggtgacataggcatccgcccccgattccagtccttttacttggtcgtcttcgtgatgcagtgctgagagcaggattaggggaatatggctccacagcttgtgttgcttgatggtggaggtgaaggataacccatctatatcgggcatcatcacgtctgagatgatgagatctggctgtcgttgctccaggctgtctaatgccttttgggcattattgaaagagagtacgttgtatttctctgtgaatatttcggatacgaaccacagcatggaagggtcatcatctatcaccatgaccgtctgcttgtttgcgtcgaattcttgggtgtatttttcgggcaattcttgcacttcttcggtgggaatgcttggagaagccgcttcgtatgcagtttgcggtacttcttgtccgtttggggggagcgagggaaggcttacagtgaaggtggtcagttcgcccggtgtgctttcgatgtttatgtctccttccaacagggtcaccatgtttttgcagatggccaaccccagtccgtttcttgagtttttgccgttcatctccacggagtcgagaatcttatagcggtcgaatatctttccgagattttccggtgtgatgcctttgccggtattggctatcttcaaaataagacgttcgtttttcgtgtacaatgttacgctgatgttccccttgtcgggtgtgtacttgaaagcgttggatatgaggtttccggctattttgttgaagcagctcaggtcggtgttccatgtcagttcgggggctatgtcaaggcagtagttcatttctctgttttccgccatgtcaccgaaggattcggcgatgtcccttaacttttcggaaacaggttgcggctgtatggagagcattttgttttccgtttccagtcttctgaactccagcaattccacaatgagaccattcagcttttccacattttgctgaatcatcttggcgtagcggtgcgtgtagatatctgtctccttgtgggtgagtatcttctcgcacggtccctgaatcagggtgaggggggtgcaaaactcgtgggtgatgttggtgaagaagcgtagttttgattcatagacttcctcttttttctgtcgttccattttcttcatcatgtgctgccgcttcaggcggtaggtatagaatgcataggcgactatgcctgtacataatagtaaccctaacaaaaagtagcccacataggcccaggtactgagataccagggaggaacgatgtaaatggtgaaggcttgcggatggctttctttaccgttgatgttgttgcggtatttcacaaacagagtatattctccgggggaaaggttggagaagatggcattgggtgaaactccgttttctatccattggtcgcttgcttcctttagtttataggagtagaaatagtcgtttccgttaatgtagtctgttatccggaagttgagctggaagaagttgtgtttgtagtccagttgtagcacgggcttcccgtttttgtaatgtaaaaagtcatgcaggttgtattccttaccgaagatggaaagtcctttcaggctgatttcgggcatatagtccgtggtgatgtaagaatcgggcttcacggtgacgaagccgtttacacctccaaagaaaaggattcccgtagcattgtctttgtagaaggctccatcactaaattcggtcacggccagtccgtttccgttgttgtaggtctgcttggtctgttcttggggattgagtctcattaatccttgattggtactcacccagagattgcctcggttgtcctccaagataccatgtacggtgctgttggtgtagagctttgcactgatgctgtctgggtttccgtcttcgtttgagtagaagcggagaagccctgatccagtgcccagccagtagccttgctcgtttttgtgtatggcgaacacatcgttggcggtttggctgtttaccaagttgttgaagcggaactgtgccatttctccagtacgtacatcaatgcggtaggctccgagccctctgttcccgaaccacagcgtagagctgctttcacggtaggaggtgaaaaaatagtttgatgccatatgtccgttactcaccaaagtccgtgtagcatgcttcacaataggatcttttctctgattttctagtgtcacctttacgattccttcgcccacggtggaaatccaaagtgtactgtcattggtttgatcaatggagtgcacatatttcactttggttccattggcttgtaccgccagttctttcaattggtgggtagagtaggaataataattgattccgttttccgtacctatccaaagtcggtcttttccaccgggtgcaaaacagtagacggagttgtcggtcaatgtgctgttaccggtgatgagacgatcatgtttttcgggtgtattgttgacaagataattcggtatacgcaatatgccactgcctttggttcctatccataaggtttgctgtgggtcgaggtaaaggctgcgtaccgggttgttcacctgatatgcgggagtgttgagcagggtgttggtcatggtgaatgtgtcattgtaaagcatgtataacccttctccgtcggtagctacccatacgatatcttgaaatttgtctttcatcagacagaagatgcccgactgtatttcagtgtattctatacggtatttaatcttttggtttgcttcatatttcagtactatcaagccgctgcttttgaaaccgatacagaagtcattttctcgtttgatgatggaagatacttcacctcgtttttctatttcgtctttcaggtcggcaatgtagtaacactgtcggttgctgaaactatattcgtagagggcataggtttcatcaatgaagtaggctgaatcttctccgatgaaggcatgcttcaagccgtgatgtccaaatggcttttccggaatcagtgtcacgctttttcccgtgtggttcagacgatagcaacgagtgttgtttccagttgcgaatatccaaagcaggttgttggaatcaatggtcatggacagtactttattaaaatccatggaagagatgtttaactggagaaatttctggttctcttgttggtagtgatacagatttccgtcatctttcagcactaacatgcacttgtttttgcttcgtgccaagaagatgttgtccttgaattcggtaaaggtccggcaggtctgtcggtatgtatccaatctgtctaacccgtagttggtttgtaaccacagtatgcctggctctgattctacgatctggctgataatgttgcctgacaataggttgcgtgacacatcaacgggcgtatataggtggatattgttgccgtcaaacacgttcagtccgtcgcatgttcctatccatagtacaccttggctatcttggtaaagggattggatggcactattggaaagaccgtttttattggagaattgccgtaggctgtaagcgtacacaaaatccggaaaacagcataagaggctgataagcaataaaatcgtatggcctttccagtatatgtctttcatgtggcttgttgtattgattttaagttgcaaagatatattttaaggtggaaacagtcaatatttgcaatatatttctttagttgtaggcttacagtttgctttgtatctgctccgtatccttagaaatgtatttgtacggagcagataggtatggatatgattagcgaatgaccgcagcgaatccaccgttgcgtgccaaacggactgtgatatggttgcctttcttcaaggattgttcttgcttgcgatagtccatggcttggtggtcagcgttgatgccgtcttcaaaagaggtcatgagataattttttccttcttgcaggaaatcaagggagatgttaaagacccgttcacgttcgcggttgttggtcatgcctcctatataccattgttctcctttgcgtttggccacgatggcatattctcctgctttggcttcgagagcgatggtttcgtcccatgtttggggtacttgggtgatgaaacgtgtacactcgtcgttgcgataatagagggtaggattgtctgccatcatctgcaggccggtttcaaaaagaacaaagagtgccatctgataggcacgtgtgccgatgctggcagaattgggacgttcggaatggtagacttcaggctgcatgctaagcatggcgccgggagtatagtccatggctcctactgcgttgcgtatgaaggggaaatagacactgttgtcgggacggcatccgcccatttgctccatacctcttacgccttcgtaggagagtacgtttgggtatttgtattctaatccggcaggtttgaaagcaccgtgaaagtcaacgaagagatggtgtttggcggcttcatgtgctacgcgttcatagaagtttaccatccattggtcgctacgatccatgaaatctatctttacgcctttcacaccccacttttcgaaagtttcgaataggtcaaagtggttttctaccgtaagccaagtgagccataacacaatgcctacgtttttttctttgccgtagcggatgagttcgtgtatgtctaccgagggattgggtttataggggttgcgggtgttcatggcccagccttcgtccattactatatattctacgccgtagtgggatgcgaagtcgatgaagtatttgtaggtgtcaaggttgcaacctgctttgaagtccacgtcggggccgtagggtgtggctccgttccaccattcccagctggctagtcctggtttaatccaagaggtgttttctatgacattcttttcagcgaggcgataggatagagtgttttctataagtttgcggtcatcgtcggtaatgacgaagtaacgccatggataactgcgcttgcctgcggtacgggctatgcagttggcttctttcagaatcttgagactgcggtcaccgtcttctccgaattcaagaggcagacgggggaagacggcggtaatgccgccttgtccatcgtttttcagaaacatggcgggatagtctgtcagattggtttcactcatgaggattttgtcacctttgggtgtgctggctaaaaggggaagcagagccatgcgattggagtttttccactcgctgcttgtttggtggcgatattcttcttcataggaagtcttaaagccgtcaggttgctgaagatgtagcaggcaatcatccacaaagttcaggcggaggatttcattcattatttcttgctcgcctttcaggtcagtaaggaagcggtaggcgaatccgtcatcaaaggcacggaactctactgaatagcctcctttaaacttcagtagcaattggttgtagcggttggttatagtagagaatttcaggggtacgatgggagtcagttcctcgtttacattttggcgtactactttgtttagtttaggatggatgcccagctggtggttggcagtttccagaccaatgacacagttgtccatcagtgtttgatttccttgggttacatcatattggatttgatcggtcagctccaccgagatgcggatgtttccgctgggtgaggccagttgatgtactttctgtccgaaagcggtcagtgagaggcagagaactgccgagagtaggaattgttttttcatgttcttagcttttggatttttacaatatacaaaagtagtttgtattctgtaggaaatgtatgctatttatgacataaatatataaaatcatgccacagacgactttttacatatctatgtcgcgaatctgtacagtatgagagtgaaggatgggctatttttgttaccaacattccacatgtcagaaaactattgttgccggatggaggctaaagagagaaggtgaaagagcggtttgcggttagaggaggcagcacatttataacaaagaatgcggtggtttatatcgaattgacattatcttttacgaaaaaacaataataacaaaaccatgaaaaagagacgaatactgatggggaagacccatctgatagcgggagccgtgatgttggccgttgcaggaggacaattatcggctcagaccgttgcaccgaagaaagcaaaagcgtacatggtggcagatgcccacttggacacgcagtggaactgggacattcagactactattaaggattatgtttggaataccttgaatcagaaccttttccttttgaaccagtaccccgactatatctttaattttgaaggtggagtgaaatatgcttggatgaaggaatattatcctcgtgaatacgaactgatgaaggcttttgtaaaggcaggtcgatggcatgtgagtggggccagttgggatgctaccgacactttggtgccgtctgttgaatcgtttattcgcaacattatgctggggcaggagttctatcgtaaggagctgggggtagaaagtaccgacatcttccttcccgattgcttcggattcggttggacattgcctactgttgctgcccattgtggactgataggtttctcttcacagaagctggattggcgtaacaatcctttctacggtaagagcaagcatccctttaccatcggactgtggaaaggagtggatggagcgtccgtcatgctggctcacggatatgattacggtcgtcgttgggataatgaagacctttcagaaaatagatatttgatggaactctccaaatgcactcccctgaataccgtttaccgctactatggaacaggtgatgtgggcggttcacctaccatcgcttctgtggcttccgtggagaaaggtatcaagggagacggtccgttgaagattatcagtgcagccagtgaccagttgttcaaggattaccagccctatggcagccatcccgagctccccgtatttgacggtgaattgctgatggacgttcatggaaccggctgctacacatcacaggctgctatgaaactctataatcgtcaaaatgaacttttgggtgatgccgctgaacgtgcttctgtggctgctgcccttttgggggttgccgaatatcctggcaagagtctgacggagtcttggcagcgcttcatattccaccaattccacgatgatttgactggtaccagcattccccgtgcctatgaattttcttggaacgatgaacttctctctctgaaacagttctccagtatcctgactcattctgtgggaagtgtggcaggcaagcttgatactcgtgtcaaggggattcccgtagtgctctataacgcttcgggcttcaaggctacagatgtggtgaccatcgaagtggaggcttctcgttttcccaaaagtgtggctgtatataacgaacaaggcaagttggtggtttctcagttggtttcatatactgatggaaaggtccgcttgttagtagaagccactgtacccgccaatggatacgcagtttacgatgtccgcctctccggcgaaggaaaagagatgtctgctgttgaagctgcaagtgttgaaaattcgttctacaaactgacattgaatgagaacggtgacattacttcactgttcgacaagagaatcaacaaggaattggtaaaggctggtaaggctattcgtttagccctcttcactgaaaacaagtcattcgaatggccggcatgggagatattgaaagagactgtggacgctactcctatctccatcaccgaggatgtgaaagtgactctttgcgaaaacggtgcattacgtaagactctctgcgtggagaaacgtcacgatgattcttttttccgccagtacatccatttgtatgaaggtgtattggcccaccgcattgactttactaacgaagtggactggcagtctaccaacgctctgttgaaggctgagtttcccctcaatttgaataatgaggtggccacttacgacttgggcgtaggcagcgtgcagagaggaaacaacatcttgaccgcttacgaagtatatgctcaatattgggcagatttaacggacgctaacggttcttatggcgtttccatcatgaacgacagcaaatatggctgggacaagcctgataacaacaccctgcgtctcactttgctgcacactccgaagacaaaaaagaactatgcttatcaagatcgtcaggacttcggtcaccatacctttacttacagcttggtaggtcatgtgggcgctttggacgtagttcaaacccgcgagaatgctgagttgctgaaccagcgcatcaaggcgttcgttgttggaaagcatcgcggcgaattaggtaagagctattcattggctttttccgataaccggaatgtacttattaaagccttaaagaaagccgaaagttcagatgaatatgtggtacgcgtgtatgaagccgcaggcaagcaggcgcagaaagcctcgattgtctttgccgacaaccttgtggctgctgtagaagcagatggtacggaaaagaccatcggtaaggctacattcagtggaaatcgcttggaagtgtcagtcaatccaaacagcattaagacctacaaggtacgttttgcttccaataaaaaggtgcagacggtggccgaaccattgccccttgtttatgataagaagtgcttcagttggaacgagttcaaggctgctgccaactttgagtctggttattcttatgctgctgaattgatacctgccgagatgaatgtgcatggagtgcctttcaaattggagacacgtgaagagctgaatggtatggcttgcaagggcaatgtactgaaactgcccgccgactgtacttataacagactctatatccttgctgctgccgcttctgataaagatgtgaaggggatattccgcgtaggcaagtatgtgcaggaagtcattgttccttcttatactggcttcatcggtcagtgggggcacaccggacatacggaaggttatctgaaagatgctgaagttgcctatgtgggtacgcaccgccattccggtgaaggcgatcagccgtatgagttcacttacatgtttaagttcgcaatagacctgccagaaaaggctactgaggtggtattgcccgataataaggatattgttatttttgccgccactttgactgatgttgctgctacttctgtttgtcccgcttccgaactgttccgtacggcaaacaagtgcaatcgctatcagacggaaagctccacagagagagtgaacattctgaagcaggacatggtaatgggctattcaagctatgtgaacgagaaagagaagccggctttcatggtagatggcgacgaaaacacaaagtggtgtgctattgctgaaatgccccactacgtagactttgatttgggcggtgaaagaagcattaatggctggaagttactgaacgctgccggcgaaaaccattcctacgtcacttcctcctgctttctgcaaggtaagagcgacaagaatggtgaatggcgcacactggactatgtttctggtaatggtaagaatgtactgaatcgcacgctaaataagtctgaaagtgttcgctacctgcgtcttttagtgacacagcccatgcaatcggcttctggtaaagatgtgcgcatttatgaaatggaagtatacgaataaacagttattatattcccatttttcagatccttgtgtctgtcaccacagacacaaggatctgatgattctcaggtgtaagtgcttaatgtgagtaagttaacaactctattgaagtaaatttattggaaataacaaataccttgaaaaatgaaaattaaaatatttgctgttgtatgtttattagctgctaatctctttacaatatctgctcaaaagtggtttacgcctgaggcggagaaacaagtggatgctcttttgagccaggtagtagaaggaaactacaagaataatcgctatcctctactccgtaagcccttaatggaacttcctttaggcagtatcaaacctaaaggctggttgcacgaaatgctggttcgtcagaaaaatggcgccagtggtcagatggatgttctttacccttcggttatgggcaaacgcaatggttggttaggtggtgatggagaccagtgggaacgcggtccatactggatagacggtctacttcctttggcgtatatactggatgatgatgtcttgaaagccaaagtgcaaccttggatagaatgggctttgcagagccagcgtgaggacggattcttcggtcctgaaaaagattatccgggagagcctggactgcaacgtgataactcgcaagactggtggccgcgtatggtcgtgctgaaaatcctacagcagtattattcggcaacgaacgataagagagtcgtcgcttttatgacaaaatatttccgttatcaactgaataccttgccgcaaaaacctttaggacactggagcagttgggcagaattccgtgcttgtgacaatttgcaagctgtatattggctttataatcttacgggggaggattttttgcttgaattggggcatttgctgcaccggcagagtttcagtttcatagatatggtagataggggagacttgcgcagaccctgcactatacactgtgttaatttggcacaaggcatcaaagaaccgattatttattatcagcaagataccgaccggaaatatattgatgctgtcaaggaaggctttcgagatattcgccggttccacggacagccgcaaggcatgtatggaggcgatgaggctttgcatggaaacaatcctacacaaggctcggagttgtgttcggccgtagagttgatgtactcgctggaaaaaatggtggagattacaggagacatagactttgccgaccatttggaacgcattgcttttaatgctttaccagcccaaatatccgatgactttatgactaagcaatatttccagcaaccgaatcaggtgatggtaacacgccatcgtcgcaacttcgaccaggatcatgaagggacagaccttgcttttggcactctgaccggatacccatgttgtttttcgaatatgcaccaaggttggccaaaatttacacagcacctatggtatgccacacctgataacggcattgcagccattgtctattctccgtcggaagtaacagccaatgtgggtgataatgtaccggtggttatcagtgaagatacttactatccgatggatcatcagataacttttaccattaaagaggtgaggaataaggtgaaacaagtgaaatttccatttcacctgcgtgttccgaagtggtgcaagcaagctgaaatacgggtaaatggaaagatggagcaaactgtcaaaggtgggaaaatagctatcgtagaccgtatatggaagcggaatgataagattgaactgtatctgcccatggaggtctttactagcacttggtatgaaaacgcagtatctattgaaagaggtccgttggtatatgccctgaaaatggaagaaaattgggaaaagaaagagtttaaggatagttggtatggttcttattattatcaggtgacttcttcggatccatggaactacggattggtggattttgaccgtaacagaatgaacgaggtggcccaagtaagtatcaatagccaaaaacagcaattggactttccttggaatcaggaaaatgcaccggttgaaataaagatgaaggctcgtcttatccctacttggacagtatataatgaaatggcagggccccagcctttctctttctgtggcagtgccgaaggaggagagcaagaaatcacgctgataccctacggttgtacaaccctgcgtatttcagaatttccagttgttgggaaatgatgtttccgaagtatgggggaaacggtgtgtctgttttgtgacaaacttgttttagaattctgccatgtccggaatgtggacggttatgtcacggatttatagttggcttttaaccttactgtctatttttgcaatcgtttttaatagggtttatatattatataaaagaagactcctgcaacggagtgaaaaacaagtcgaacaatttaatgccgtagaaaaaagatgaaaaattccaagaaagcactcctctgcctattggcatgcgccttggcagtaaccggatgcaagacacagaaagaaccggctgtggcagacaacgcaatgctggtcagatctacacaaacacttgattccttatatgctcactattccgcaccgggcacttgtctgttgcgtgagaattatccttcggacgtggaaggctataccgctacttatctggcttccgaggaacagaagaaccgtcccaatctctactcttatttgtggccttattccggtaccttctccgcagtgaatgcgttgatggaggccactaaagataacaagaaagatttcgggaactatcagaagttgcttgatgagaaggtgcttccgggacttgctgaatatttcgatactcgtcgtatgcccgaagcgtatgcttcttacatcaaggacgctccgttgtccgaccgcttttacgatgacaacgtgtggctcggcattgacttcacagacgtctatctgatgactagccaagagaactatctgcagagcgccaagcttatctggaagtttatagaaagcggtatggacgattgtttgggaggaggtatctattggtgcgaacagaagaaggaatcaaagaacacttgttccaacgcccctggttccgtctttgccctgaaacttttcaaggctacgcaagacagctcctattttgagaaagggaagagtttgtacgagtggactaaagcaacattgcaggacacaacagactgcctttacttcgacaacatgcgtttggacggtgagataggacgtgccaaatttgcctataacagcggtcagatgatgcagtcggctgctttgctctatcagcttaccggtaatgggcagtatctgaaggatgcgcaagcgattgctgccgcttgccataattatttcttcatggaattcacccccggacagggagaaccgttccgtatgctgaagaagggcgatgtgtggttcaccgccgttatgttgcgtggttttatagagctctatcaggtggacggtaacaaggtttatcttgattcctttgcccgcagtctggactatgcttggacgcatgcccgtgaagataacggccttttcaatactgatttcaccggcaagagctgcgacaatcgtaaatggctgctgacacaagccgccatggtagagatgtacgcgcgtttggccgtgttcgctaatcagtctttataattaaaacgaatcagaccaaatgaaaaagagaaacattaccttgtgcgctgttgccatgctctgtatgcaaggctatgctaaggcagacacttttaccctgaaaggtgacaacacttgtgtggagaactatgctcagatgactgctgcttacaagagcaatcgtccaaaaatgaagaaacgccttttcacctcaaaagcggtggaagctgagattcttcgcgtgaagaaactgcttaccaatcctaagttggcgtggatgtttgagaattgctttcctaatacgcttgacactactgtacactttcgcatgctggacggtaaacccgatacttttgtttataccggtgacatccatgctatgtggctgcgtgactccggtgcgcaggtgtggccatatgtgcagttagctaacaatgatgcgcaattgaaagagatgctcgaaggtgtcattcgccgtcagttcctttgcatcaacattgatccgtacgccaatgctttcaacgacggacctacgggtggcaactggatgactgacttgacagatatgaagcccgaactgcacgagcgcaaatgggagatagactctctttgttacccgcttcgtctggcttaccaatattggaaagtaactggtgacagcagtatcttcgacggtgaatggatgaaggcaattactgctatcctgaagactttcaaggaacagcagcgtaaggacggtgtaggcccttaccgtttccaacgtaagacggaacgtgctcttgatacgctgaataacgacggcttgggtgctccggtcaaaccggtgggactgattgtttccgctttccgcccatcggacgatgccactacgcttcagtacctggtcccttccaactttttcgctgtctcttctttgagaaaggctgctgaaattctgacggaagtaaacaaggaaacatccttggccaaagaatgcaccgatttggcagccgaagtggaggcagccctgaagaaatatgccacttacaatcatcctgagtttgggacaatctatgcatttgaagtagatggattcggcaatcatctgttaatggacgatgccaatgtacccagccttcttgctatgccttatttgggtgatgtggacgtaaacgatcctatctatcagaatacacgccgctttgtgtggagtggcagcaacccttacttttttaaaggtaaagccggtgaaggtatcggaggtccgcacattggttatgatatggtatggcctatgagtatcatgatgaaggcattcaccagccagaatgatgaggagataaagatttgtatcaaaatgctgatggatacggatgccggtacgggattcatgcacgagtctttccacaaggatgaccccactaactttacccgtgcatggtttgcttggcagaacacgctgtttggagaattgattctgaaattagtgaacgagggtaaagtggatttgctgaacagcttgtaaaaataggaattatttaaaatcaataaagtgcgctggaaggaggattaggatacaaattgcatgaattggttgttcgttggtattatttgtgttcttttcctttttttatcgtgatttattataatgtttaatcttaaagaatatgaaaaagaatcgagtgtacacagtaaattcattgctggctcggataagtgggaactataagttctggcttattgccttgcctgctgtgactatgctggcgcaggctcctgcggtttatgcacatgcggagactattactgtggtgcagcaaaacaatgccacggtgagaggttccgttaaggatgccacaggtgaaagcctgattggagtgagtgttactgttaagggtaaagaaggtgtgggtaccattacagatgtggatggaaactattccattgtttgtagtgcccaagatgttctcgtcttttcctatgtgggatatgccactcaggaaattgctgtgaaaaatcaaaaacaattgaatgttgtcttaaaggaggataccaaggtgctggatgaagttattgtcatcggttatggtactactacccgcaagagtgccgtaggtgctgtagaccaggtaaaggcttccatgatcgaagaccgtcccgtggctaacatgacagatgctttgcaaggggctgcgcccaacgtggttatccagcagcgcagtagcaatcctaatgatcgtaagactaactttaatatccgtggtatcagcactgtgaatgacaatagtccgctttttgtcatagacggattggtagctgatggcggtagtttcgataaattgaatcccaatgatattgagaacatttccatcttgaaagatgccggtacagctgctatttatggttcacgttcttccaatggtgtagttttggttactactaagaaaggtaagaagaaccagcgtgcgacagttcggttaagtggtatgatgggatggcagaatccggatatcttgttttctccggtgaaaggctatcagaacgctactttgcgcaatttagctgccaccaatgctggagaggctcctttgtatacacccgatcaaatccgtgacctggctgcccatcaaaatgaagaaagctggttttttgatcagatagtccgcacagccttacagcagaattacaatctaagcgtatctggaggtagtgataaaactacttacatggtgtccatgggttattatgaccaggaaagtaattatgtgggcaacagtgattttggcgtgcagcgttataattttcgtaccaatgttagcacggaagtgggacgtttgaaactgaatgctattttggcttatacacgtaataatagtgtaagtaccaccggtgggagtttggaagtggatgccgcccgtgtacctacttattattattacaaaatgaaatcggaagatggaagatatttgttaaatgatgtattgactgaatttaacccattgggagcattggaagctggtggccgtaacaagtatcgtaacaattatctgaacgctaatgtcaatgctgaattccggcttattgacggattgaagttgcgtggagtgttgggtgcggatgtgataaacgacatgcgttctacccgcaatttgggcgtatcctattacttgaatgaagaggctaccgaaccacgtccagtgaaagatactgactatcggaccagtaactggaatcatacggcttaccttattaatagccaacttttgttggattacaacaagacattcggtaaacacaatgtcagcgggctttttggagtaaccaatgaatcgtttacttcgtctagcaatgagattgagaagaagggggtagatcccgacttgggtatcggtacagacattaccaatagtactgtgggaaacatcacaggaaaaacatttgtagatgaatccaaccgtaccagtctgacttctctgttgggacgtgtggggtattcttacgctgacagatattatacagaattcagcttccgttatgacgcttcttccaagtttcataaagactaccgatggggtttcttcccctctgtttcattaggctggcgtttgagcgaggagaactttatgcaggcttacaaggaacgtgtgggtgacttgaaactgcgtacttcttttggtatcttgggtaaccagtctattggtacttatgaccgttttactgtttacgaactgtacaacaactcttacgcatataataaccagacagtatcaggcgcaggttttaagttaggtaaggataatttgacttgggaaaagaccaaaaccttcaacgtgggtgtagacgcttcgttcttcaataacgctttgaatgtgacgttcgactatttctacaagcgtacgagcgacattttaatgaagccccttgtgccttcggtattcggtacggatatggcgatggacaacattggtgagatgcagaatcaaggttgggacctctctatcaactatcgtttgaaaacgggagccgcaaatcataacttcaacttcaatcttggtgactcttggaatgaagtgctgaagtaccctggtcacgaaagaatctcacaaatagaggagttgagccgtatcacccgtgaaggatgtccgttggagtcttactacggttacaagatggacggctttttccaaagctacgaggagattgaggcatcggctattcctgtaggtggaaaggtacagccgggtgacgtgaagtttgtagaccgtaacgaagatggtgtcatcgactcgaaggataagtttatcttgggtaatgccttccctcgtcttactttcggtttcaactacaatgtagaatggaaaggattcgatttcggtatgttctggcagggtgtgggcaagcgtgacatgatgcttcgtggtgaattgattgaaccgttccacgccaattactcttataatatctataagcatcaactggatttctggactcctaccaacaccgatgcacgttggccgagacttactgctccgggttctacttccaacagaaacaactacggaaacggacaaggttccgacctattcttgatggatggaaaatacctgcgtctgaagaacttgcagattggttacacattccctaaaacatggagccgcaaggtgggtatggaaaaggcacgtatctatgtcaacggacaaaacttgctgactttcagtaataactcgtttattgaccctgaatcttctgagttcgactctaagatgggtaatagtggcgccaattctggtagaaactacccgacgctccgttactatggtttcggtatagacattgaattctaaaaacaacagataactatgagactaagaaaatatatagcttttgccggaatggctgttctgatgctttgcagttgcaacgagatggagaacgcaccgacaaacaaatttacggataactcttattggacttccaccaccaaagcccagtatgtggtgaacatggcttacagccagatgtacaatgcaggccgtatgtggagcgatgaaagtttgagtgacaatgcttacgacggtcgcagtgtggacgaccaacgtgccattcgcaaaggtatggctactccctcgctcgacatcttcaagaatgaatggaaagacctttacggaggcataaagacctgccacgtgttccttgaaaaggtggatctggtacccaacatggacgcatctgttaaagcacgtatgattgccgagatacgctatatccgtgcaagcctctacttccgtctgactaacctttatggtgcagtacctttctttacggaggacatcacgctggaagaatcgcggagtgtaagtcgtacagaccgcgaaaccattatcagcttcattcaccaagaattggaagacatcaaggatgcgcttcccactcgcgaccaattgcccgaagaagacaagggcaaaattactaaaggtgccgtttgtgctttgcaggctcgtgtctacttgatggatagcgactggaacaatgtgatgctttattgcgacaatctgatgaacaaacagggcgaatatggtacttatgccttatttcctgattatgccgggctttttgatgaagccaatgagtataatgaagagattatcatggaccgttcttatgtacccaatttgattacttggggtgagatggtagacatgattcctttgtcaagaggcggacgtgccgtgaaccgtgtgccgcagcaatcgttggtagacacttatctgatgcttagtggaaagactatcagtgaagccgggacagattataaccctgcttatccttacgacaaccgtgacccacgtctcaccgctactatcatttatgatggctatgactggagtggcaatgtggacgatggcagtaaagacgtagtcatcaacattcgtccgggttcgggaaccgatgcctacgatggtggtggaaacggcacttctaccggttatttcacccgtaagtattataatccgcaggctcccggtgaccagaattccggtatgaatatcatcactatgcgctatgctgacatcttgctgatgtatgctgaggctgttcacgaaacaagcggtatgactgaagaggtatggaacaagaccatccgtcccatccgcgaacgtgccggatttactgccgatgcagccttgaactttcctgccggaaagagcaaggaagagatgaggcagattattcgcgacgaacgtcgtgtagaaatggcgatggaaggtttgcgctggtatgatattaagcgttggaaggctggtaacgaatacttgtcgggcaaggtgcgcggtgcaagcttcgtggacgagaacaagcttgacactcgcaagttcgaagaggcaagagattatctttgggcagttcctatcagtgaaatcaatttgaatcccaatctggcgcctaacaatccgggatatggaaattaacgtgtatctaaactcattaaaaacaatagaacaatgaaaacaatattctcaacaatagctcttttttcggcagtcctctttgctacgtcttgtacggaagacatggaatacaaggattccaaagtttcctcagtaaatcagttgtatgaacccactgacggcaaggaagtagtcttgcaatcgtcggccagcgccagcctgttctttgaatgggagtcggccaaggctgaagatagcggtgcccctctttatgaagtggtattcgataaagaaggtggagatttttctaagcctatttacaaagtgctttctgacaatggcggttctttgagctatgctaccatcagccacaagacattgaacaaggttggtgcggctgccggattgaacagtggtgagacgggtacacttgtttggacagtaatggcttccagaggtttgaattctgtaatggcaaaggaaagcaagaagctcaccatcactcgcttggtgggatttgaagagattccggcacagctttacttgaccggaagtgctactgaaggtggtatggatgcttctaaggctgtggcgtgtgcttcacccgaaaaggataagttcgaagtctttacgaagttggaaggcggaaagacttacaaactggtagatagagcagccgaaggtgccaaggtgttttatatcaatggcaataagattatggaaggcgaaggcgagacaaccgtagaaaagacgggagtttaccgcattgagatggatttctccattgcatctgtaaccgtcagggaagtaagtaagatggaattctacttctgtccgagtggtgccgcaacttttgaattgccttatgttggaaacggtgtgttctgcggtcaggataaaattgagttcaagcaagaaggatgggggcgcgaccaacgctataagttcttgatgacttatgctgatggtagtatacagtattggggaaccaagaatactacagactctaatcctggtgcggctactcccgaagatccttatttctacattatggagactcctgataaccaatgggatcagaagtggaaactgaacaatgaattcgatggtgcggccgatggccacaatccgggtgccatcaccaagattagtgtgatattcaatgtggagaactatactcataaagtggaattggccaactaatttaaggagagattatgaaaaaaatattattttgtctgcccctgcttcttttggcacttcaatcgtgcgagatagaagatgagtatatgtatgataaggggctttacaccatagattgggatgcggctgccgacagcagttctgtgaccctgatagatcgtttctggaatacggaagagaattatttcaactacgggaatgacggttcaatcaaggatttccattattggccgcaggctcatgctatggatgtgatgatagatgcttacaatcgtaccggagatagcaagtacagcgacttgttcgacaaatggtatgtcggtatcaaggcaaagaacggtggcagttattggaacaacttttatgatgatatggagtggattgctctcaccatgattcgcttgtacgaagttactgatgaaaacaagtatctggaaacttctcaagagatgtggaatgaaatcaagaccggttggaacgattacgcaggtggtggcattgcttggactcacgaccggctatggagcaaaaatgcttgttccaacggtcctgctgctttgattgctgctcgtctttaccgtattaacgggaatcaggaggatttggattgggctgtcaatatttataaatgggagcgtgaaaatttatttaaccctgctaccggcgccatctatgataatgtgaacggtgaaacgggtgagttgagtacactttctctttcttataaccaaggtacattcttgggtgctgcttacgaactgtataagatcacaggagaagagtcctatttgaaagatgctcgtaaggctgccaatttcggtatcagtaatagcagcatgatagatactggaaacaatttacttcgtgatgaaggcgatggtgacggaggtttgtttaagggtattttcatgcgttattatgtgcagttgattatggaaccgaatttggaccccatatataagaagaaattcatcactttctttaacaataatgctgaaatcttgtggcgaaagggaatcaataaacttgatttgctgtataatactaactgggcaatgaacaatagcggtaacaaccatttgactacgcagacaagtggttgtactttgattgaagccaaagctctctttgaaaagagcctgaaataagttagcaattaaaagtgtgtcgaaactcaatctggttattgggtttcggcacatttttttttagagccagttttaattggcagttattttggaaataatgtttttagagacaacagttttttatataaaataaacacaaaagatgaaacagaatcaatatttatttctactgttcgccctgattgttctgacgggctgtggcggtacgcagaagaaattaaccgaatatgtcaatcctttcttgggtacggctactttgtgggagcctgaggacttagggtatacgcgcaaaataaagtcacgtacatggggtgcggaaacttatccgggtgctaccttgcccaacgcaatggtgcagctcagccccgttacacagtttcgtagcggtgcgggctatcaatatgaggacactgtgatttatggtttttcacatactgctaaagggcattggaacttgttgcatgtccccatgttgccagtggtgggaactatcgctccgggtaattattgctccgggtttagtcacgagaaggaatctgcgcatccggggtattaccaagtttatctggaacgctataaagtgaacgccgagttgaccagtaccttgcgttgtgcctaccataaatatactttcggcaagggcgacgataagtcattattggtagacatccgccgttctaataatgatgtccgtgattggaagattgagaaggttgacgataatacgttcacgggttatcaagatggcgatggtaaaatctacttttacgctaagaccaactataaaataggccaagtggaaatggtaaaagacgacaaacatgaggtggctgtgctgcgttttatcgacagcaaaggtgttgaacctttggaagtgaaggctggtttctcgtttgtgagtatagagaatgctcaaatgaatttgaaggccgaaatgttgaacaaaagttttgcacaagtggcagaagaagccgatgcggcttgggaagcactcctctccaagattcaagttgcaggtggcacggaacgtgaaaagagattgttttattctactttcttccatgcttttaaatggccggctttgcgtagcgatgtgaatcatgaatatactgatgtccgtggcgaagtagtgaataacggcttccactattacactgacccttctttttgggacgattatcgcaacaaactggtactcataggtatgatttctcccgatgtgactactgacatcattaggtctattattgacaaaggcgagaagcgtgacggctacatgcccaccttcttccatggtgatcacgcttccacttttatttctggttcttggttgcgtggtttgcatgatttcgatctggagcgtgcttataagttgattctgaaaaatgctacggtgcccggtaaaggaggacgtcgctatttggatgagtatatggagcgaggttggattgctgaaaaagacacagtgaatgtacccacatgggacgaatacaaaggggctgtgaccaagacccaggaatatgcttacgatgactatgccgtagccttggtagccaaggagctgggagatgaagccaactacaagctgatgatggaacgctccaacaactacaagacgctattcgacccctctaccggcttttggagaggtaagattgacgatggtagctggattcaggatttcgatccgtattatccctattaccagtacatgtaccgtgaggccaatgcatggaacgccctcttcttcgccccccacgaccccgaaggcatgattaagctctatcccagtaaagaggcggtggaggctaaactggattccttattcagcgaaccgtggagaggttacgaggcccacaacctgaccggattcatcggaaactattgtcacggaaaccagccgggacacagcattccttacacctattatttcatagacaaacaagagaaagcccaatgcattctcgacagcctgatgaaccactactatgacatgggtgccgacaagctggcttatgcagggatggatgatgccggcgagatgtcttcgtggtatgtgctcaatgctattggactttacacttattcgcctgccgatcctgaatatattgttactgttcccttgttcgataaagtgacgttcaatctgaatggtcgtccctttacgattgtgaagaaaggaagcggcaagaagattattgacattacttatgacggtaaaaagattgacggttactttatcacccatgaccaactgagggagggcaaggaactggtgattactacggaatagataaacaatggagttatgaaaagaaatatactgcttctattcacattctttgcttgcattactgtacaagggcagactccggttcgtttggttgatctgaggagcgaacatcttgacagacctataggtttggataatcccgttccacgcctttcttggcggatggaagatggtaggcagggagctgtgcagacttcctggcggattgtggtagacgaagactcgttgaatgtggtcaatggctgtggcaggatgtgggatagtggaaagaacgattcccgtaatctgcttgtggcctatgcgggcaaaaaactgcagcctttcactagatattattggaaagtaatctgcagcgacatggaatataaggagactgcttctcctgtctcttactttgaaacgggcatgatggggatgcaacattggcaaggtgcttggattggcgatggcaaggatattcattatgggcctgccccttacttccgaaaagagttcaagaccggcaaaaaggtaaagtcagcgcgtgcttatattgccgctgctggactatatgagctttacatcaatggcgagaagataggagaccactgccttgcccctctctatacccgctttgatcgccgcaacttgtatgtggcttatgatgtgacttcacaattacagaatggtgacaacgctattggcgtacttttgggtaacggctggtataaccatcaatccaaagcagtgtgggacttcgaccgtgccccttggcgcaaccgtcccgctttctgtctggacttgcgcattacttacaccgatggaagcgtggagactattcccaccgatctcagttggcggacagcgtcgggtgcaatcacttttaatagtatctatactggcgagcactacgatgcacgtctggagcagaaaggatggagcactccggaattcgatgattccaagtggcgcggagtagcctatcggagtgtaccttcttccaatgtcactgcccagcaagtacatcccatccgtaatgtaaagattttccccgccgtctctttccgcaaagtggacgagaaaacatacatctatgatttcgggcaaaatatgtccggtgtgacttgtattcatgtttcgggtgaacggggaacggaggtcagaatcaaacatggcgaacgcttacatccaaatggccgcctcgatctctcgaacattgatgtctactttcgaggcgataaggagaaagacccttttcagacggacattctcattctgagtggagaagaggatgagttcatgccccgatttaattacaagggatttcgttatgtggaggtagtggcagataagcctattgagcttgaccaaaacagcttgattgcttacttcatgcacagtgatgtgccggcagtaggtagcttggaatcttcgagcccactgataggcaagctgctccatgctgccaatcactcttacctttccaatctgatgggctaccccaccgattgccctcagcgcgagaagaacggttggactggtgacggtcattttgccattgaggcagcattttataactttgatggaattaccgtttacgaaaaatggttggccgaccatcgtgacgaacagcagcccaacggagtgctgcccgatattattccaactggtggatggggatatggtacagacaacgggctggactggactagtactattgccatcatcccttggaatatctacctcttctacggtgatagcaagcccttgagcgattgttacgagagcatcaaacgttatgtggattatgtggagcgtatctctaacaatcatctcactacgtgggggcgcggagactgggtgccggtgaagtcaaaatccaataaagagctgacttcctcggtctacttttatgtagataccaagattttggccgctgctgccaaactcttcggcaaacaggccgattacgaatattataatgccttgtcggaggagataaagcaagctgtcaatgataagttcctgaatcgagaaacaggcatctatgccgaaggttcacaaaccgaattgagtgttcccttgcaatggaagattgtgcccgaagagttgataggaaaagtggcagctaacttggcacataaggtagaggaggacggttttcacttggatgtgggtgtattaggagctaaagctattctgaatgcactcagcgaaaatggttatgctgaaacagcttataaggtggctgtacaggacacttatccttcatggggttggtggatggtgaacggtgccactacgctgctcgagaactgggatttgcaggctactcgtgacatctcggacaatcatatgatgttcggtgaaataggtgcttggttctacaaggggctgggaggtattttccctgatcccgcgcaacctggttttcaaaacattctgctccgtccccatttcataaagggattgaaacggtttgaagctcgtcatcggtcgccttacggtgaaattgtttctcgctgggaatggaaagggaaatgtgtgcattatgaagttacagtgcccgctaacagtacagctacactcactttacctgacaaggccgagaatgtacgggtggtggaactggcggcaggaagatatgagtttattgtaaagtgaccctgtacttttcatttatgcttgcaaatatgtaattagcgggtttgccacgttgttgtggcataactcgctaatttttatagtcggtatgttaagggatggctttttcattcttatagcctgatctttccctccaaccgtatatcttccgatgaagcccctatcagcagcttcaccgttccgggttctacaacgaacatctgctttccttcgttccaatagccgagctcttctttgggcacggtaagcgtcactttccgggtttcgccggccttgatggggatacgcctgaaggcgcgcaactgcttggaaggacgttccactttggattccggatagctggcatagagctgcacgacttcttccccgtcgcgtccgctggtattcttcactgataccgtcacgcggatgttcttcttgtcttgcttgaaggattcaatcttctcgtatgcaaagtcggaatagctcagaccatagccgaaaggatagagcaccgggccctggtggtacatatacgtgcgtccgttgcggatgtcgtagtccattatgtcgggtaggtcagtgatgtctttcacccacgtctgtacggtacgtccggctggattcaccttgccgaagagtacgtcggccagtccgttgccctgctcctgactgcagtgggtgatgtggacgatggcaggcacgtgctcctggctccagttgatggtgtaggggaagctgctgacgagcaccagtatggtattgggattggccttgagcaccagcttcaccaagtcttcatcgggcagcatcagcgatttgcggtccacggcttcgcggccgtcactggggacgggagagaacttccagtccgcacgcgtgccgtaaggatggtttcctacacacacgatggcaacgtcggcggctgcagcagccttttctgcctggcccatgcggttgtcttcggcgtggatgatttcggttccttctttcacagcattgcgtatgccactcagaatcgttgtttcgtaaggcggggtaccactataccaatcttgcacgattttgtccgaatacgggcctataacggctattttacgcagctttccggcatcgagtggcaggagttttttgtttttcaataacaccacggacttggcggtgacttcccgtgccagcctgcgggcttctgctgtcatgaaaggcggtgtctccgtactgttctttccgatagagagataagggttacgggagttgtccccgtccagcaagccgagcttgagggcgacgaagatgttcccgcggatagccttgtcgatgtcgacttcggtcagtaatcccttttccagagcttccttgacgtaaggaacgtatgcgtcgagaaattgtcctgtggtggcttttactacggcagcggcaccctccgcaaagctcggaaaactcttgtgcgcttcaatcagcagtttcagggcaccgccgtccgtacagatgataccgttgttgccccactgcttgcgggtaatctcttcgaggcagggatggatggacatggggatgccgttccaactgttgtaggcggccatgaaggcacggctgcctccctcggtgatgcctttatagaaaggataagcatagtattcatggaacaagcgcgtgtcgaagtcggaggaagtgctgtcccgtccgtcctcgttgctgttggcaaggaaatgcttcatcagagaggcggttttccagtagcggggatgattgccttgcaggccgcgtacgctggcaatggtgagttgggcggtgaggaaagcatcttctccgaaactctcctcggtgcgtccccagcgtgggtcgcgggcaaggtcggcattcggagcgcgcatcacgagggcatgacgcttgttgccggtggtctgcatgtagtagcgggcttcttcagcggcttgttccgctactttctgcaccaaatcggtgtcccatgtggagcccagaccgtaggattgggggaatatggtggtggggcagtctgtggggactactttcccgtcttccgttctttggcgtccgccccacatggcaggcccgccgagggtcagcccgtgcagtccttcgtagtgtccgcaacggggaatgttgaggcgggggacaccgaggtcggtggaaagaaggtttatcttttcatccaatgtcaggatggaaagaagatggtccacgcgctgttcgtcggtgagcgtggtatcttggaaggcttgtgtttgttgtgcgcttgtctgcaggcaaagcagcagagagaaaatgaggagtagtgacttgtttctcatggttcattagggtttaatggattcaatgtagtgggttgtcatagcaaacattcttggttgttatctcaatctataccttttgtctgcacgagatgtgcatctcatgatgtacgagatgtatatttcatgcaacttgagatgcgcatctcgtacatgaaaggataggggattatgggatggacattcgttgcaaccgtccgtcctgcggcaggcagagcaacccttcggctttcttttcgtctgccagatacttcttccacgtaatcttgtcccacttcatctggtctgtgcattgtgccacggggatatgggggatggccgaaccgtcctttacaagaatgatgatgggcagggtgccgcactcgatatggttccatcccggagcatacacctttccggtctggtagtctatccatttctgccgtccggggaggtagacatcccgtccgctgccctcttcgagcatgggggccacgaggagattggagccgaacatgtactcgtcctctaccagccatgcacccgggtcgtcgggatactccagcagcagggcgcggagcatcggccagccgttctcggtgcactctttggattgtgcgtatacatagggcatcagtttgtacttcagctcggcgcaacggcggaaatagtctgtgaactctttcccgtagtaccacggctcagtgggaggtgctccgtgcacgcggctgtggctggtgaggaagccgaagggcagccagcggcggtagaggctttcggggctttgggtcacgaagccgcctatgtcattgctccagaagcagaacccgctcaatccgatggagagaccgctgcggacggttccctcgaaaccggtttcggtggtggcggcatcaccgccccagtgcagcggatagcgttgtgagcctgcccatgcagagcgtgcccagatgatgttttcgccgtgcagcttcttgatgatgtcggccacggttttgttgtagcgcagcgggtagaggttgtgttcgtacagtccgctacggccgttggcatagatggcatccagtggggcaccttcgccgaagtctactttgatggcgcttacacccatttcaatcaggttgccgagcttcttttgataccactgcacggtttcggggttggtgaagtccagcaccacgtcctcgtaggggagctgtcccttgccgttgcgcacgtacagaccgcgttctaccaactcagggaagaacttgtttttcggagtgaagtagggaagttgccagaggcaggtgcggaaaccttgtgacctcaggtcggtgagcatctgccggggattgtcgaagcggtcggcggcaaaggcgtagtcgcattgccagtccacgctgaaccagccggtatcgaagtggatgacatcgctcggtatcttgttctcacgcagtttccgggctacgtcgcggccctctgcttcgctgaagtaggtgatgcggctcatccaggtgccgaagctccacaaggggggcatttcgggccgtcctaccagtgcggtgtattcgctcagcatctccttcggcgaacctaggaagatgaagatgtccatcgcttcgtctgccatgaagagtttggtggctccgatgtaggaacagccgaagtcgcaggtcacgggggcggaagtgtgtatgaacatgccgtagccacggttgctgaagaagaaggggatgggcttgtacatgtccggggtttcggggccctgcgggtcggtgacaaagaggttgaccttctgcccggccttgttcagtgcggtggcggactcgccgcaaccgtagattttctcgttcggcgcgaggctgaatacgggattgatgctgcgtgagttgtccgagccgcgcttgatgaagctgaatggaggtaccttgacctgcgtagagtcgttgtcgctccagcaacgggtctgtgtcagcaggcgtccgtcggcgtctttcagtaccagacgccagggatagttctggatgagcaggctgccgtatcgggaggtgtacagcgtacctttgtccgtcttctcggctttccagaaggagcgtccgtcggcgggctttcctatgagcatggggtcatcggcatcttctttcggtacgatgggcgaggtaagcatacggatgcggagggtacgttcgctgaccggttcgacggtgaacgtcagttgtggattgttgtcgtaggccgtctctgggaagtccagcgactggaggggctggtgcaggtaggtgtttgcattgaatgcctggcggggcatcagttgctggcgtttccactggacagtccccttgccggtggaggtgtcgaacgataccaggctgtcggcgaagaaataggtgttgctgaggtccagaaaatcctggctcatgtctttcgactgggaaagcaggtattgcacgccggcatttgttttcagttgggcatgcgcaggtggggtggcagttgctgccagcagcataaaagctgcccctttcatcagttgtctctctttcatgataaatatatgatttacggttactgtttcgatgccgtaaaagtagagaaatccacacagatgaaaggggtgggtatgttgcttatgtagggctgaaatgtttatttggaagctttcttcccgtagaaacacatgaaatataccccgataatcacaaacgggatactgagccactggcccatgttcagcgtcatgctgtcctcaaagttcacctggttttctttcaggaactcgatgaagaaacggaaggtgaaaatctccgtcaggcagagtccgaagaagaaaccgcggtgatagggcagggaggcttcggcctgcacggtggttgatttccgcttggtggtgctgaaatctgtttcgagcttggtctcttgtttcttctgcccgcgtttgtatagccagaccattcccaagaagaaaatgaagtaggcaatggcttcgtagagctgtgccggatggcggggcaacatgtcttcccgctcgaagatgaatgcccagggcacgtcggtcggtttgccgatgatttcggagttcatcaggttggcaaggcggatgcagcaggcggtgatgggagtggcaacagctatcatgtcgagcacgtccatgtagtgcatcttcgttttgcggcagtacatccaaagggcgataatcaggcccagcgtgccgccgtggctggcaaggccggtgtagcccgtcatcttccaactgccgtccggcaggatttttatggggagaatcatctcgaggaaatggtcctggtagtaggcccagtcgtagaatatgcagtggcccagtcgtgcgcctatcagtatgccgaagaagcaatagaagaagagaggttcgaatttcttttcgtctattctgcggtcgctatactggcgttgcacgatgaagtaggcaagagcaagaccgataatccataacagtccgtagtagcggatggatatgccgaagaacttgaacagttcggggtcgggattccagttgatggtgagtaatgataacatatttattgaagaattaaattaccgaattacggggttgtccgggacaaaggtatgaaaatatcttattgggtgattctttgtgacggtttattt

SEQ ID NO: 4412 - DNA, 35800 bp, Unknown
  gut microbiota DNA sequence
aaacaccctttaaacaatattgcccccaaggcatggactacatgatttgctatgactaccgcacgctcgatttcgatacctccatcctggagcaataccggcaagtgaacgtagtggcatggtccatgggcgtatgggcagctcccatcgcactggcttccgtgcccaaggagaaactgctgcttatagctttcaatggtaccattacccctatcggtgacacagatggaattcccgaaaagaccttccgagacaccttgagcggactgactcccgcctcgctccagaagttcatgcgccgcatgtgcaaagacagcaatgcctacaaagccttccttgccatcactccccgccgggacttcaacgaaattaaggaagagctggaactcattgagaaaaaatacacccaaatgagagggataaccatcgatgaaaacggcaattatatctactccaatgatgacgagatggatgcctatgtaaacgataaataccaatacatcgattatgactacgctttcataggcgtcaacgaccgcatcttccctttagaaaatatgaaactaaatttcgattacatgttcgatgacgacaaactgattgttgcagactgcgcccactatgacgaaccaatgttccgcttcttgctgcaagacatgtggtcgatgcccattgacgattttctaagccatctgagagaactggatacataacaaaaggattgaaaaaaatgacagatacccctacacaccccatagacaaagaacttgtagcaaaacgcttctcctactcgcgaagcacctacgaccgcgaagccagcgtgcaacggcaagtagccgaaaaaatgatgcgcctactgaccgatgccctgctttccgcaggcataccccgtccgcaacttcctacacacttccgccacatcgtagagcttggttgcggaacgggcagctactcgcgcatgttgctgaacaccttgcaaccggaaacgctgttgctgaacgacctctgccgggatatggaggaatgcgtcagggagctatgcactacgcgcactccccgcgtcagcttcttgccgggtgatgccgaagctctcgacttccccagagaaaccgacctgataacctcgtgctccaccctgcaatggttcaacgacccaggtgctttcctcacccgctgccaccaagcactggtggcagacggcctgcttgccttcagcaccttcggcaccacaaacatgcacgaaatacgccaactgacggggcatgggctggactatctctccgttgaggagctgcaagccctgctgtctccccacttcgatattcttcatgccgaagaagaggtgatatccttgcccttccccactccccaggcagtgctgaagcatctgaagcaaaccggagtcacgggtacggaaaaaaggatgtggacgcgtagtcgcctgcaatccttctgcaaagaatacacaacccggttcagtgatgccgcaggcaacgtaagcctgacctatcatcctatttatatcatcgcacgaaaaaaaacaaaataatggaaacaaaaaacatctacttcatcagcggcattgatacagatgccggaaaaagctattgcaccgcctggtacgcccgtgagcttatgcaacgcggcctgcgcgtcatcacccaaaaattcatccagaccggcaacaccggtcattccgaggacatcgacctgcaccgccgcctcaccggaaccggctacctgccggaagacaaagaggggctgaccatgcccgagatattctcctatccctgctctccccacctcgccgcccgcatagacaagcgcccgatagacttcggaaaaatagagcgtgccaccagggaactttcccatcgctatgataccgtgctcgtagaaggcgccggcggtctgatggttccccttaccgaagatttcctgacgatagactacattgcggagaagcagtacccgcttatctttgtcacctccggaaagctgggcagcatcaaccacaccctgctgagcttcgaagccatcaagaaccgggacatcgcgctcgatacggtactctacaacctctatcccacggtagaggacaagactatccaggaagacacgatgaaatacatcaagcagtatttgtccaagcactttcccggaacaaagtttgaggtagtgccggaaattgtgtaaatttgcagcacataaacgtcctactgcacatggaagcatttacattagattcaactgaaattatcgtactcgctacggcgggtggtctgttccttattcaaattatctactacctctgtctctacaaccgtattcatgcgcgcagccgtgccgtgaagcagggagacacgcacttcacccaggaactgccccccatatccgtcattatctgcgcccgcgaggaatccgagaatctgcgccgcaacctgggcgccgtgctggagcaggactatcccctatttgaagtcatcgtcattaacgacggcaacactgatgagagcgaagattacctgaccatcctcgaggagaaatacccccatctctaccacagcttcgtgcccgattcctcccgctacatcagccgtaagaagctggctgtgacgcttggaatcaaggccagcaaatatgaatggctggtgtttaccaatgccaactgcatgccccaaagcaaccaatggctgcgactgatggcacgcaacttcacatcacgtacccaagtggtgctgggatacagcggctacgaacgcggcaaaggctggctgcacaaacgggtggcattcgacaatctgttcacttccatgcgctatctgggatttgccctggcaggcagcccctacatgggcatcgggcgtaacctggcctaccggaaggaactcttctaccaacagaaaggattctccgcacacctcaacctgcaacggggagacgacgatttgttcatcaaccacgtggctaccccggagaacacgcgggtagaaacggatgccaatgccattgtgcgcatgcagccgcttctgcgtaccaaggactggaaagaagagaaaataggctacgcctccacagcacggctgtatcatggaatgcaacgctggctggccggttttgagaccctgacccgcctggcattccacgcatcctggatagccgcgatggtcatcggcattctgcacttccactggctggcagcaggcgtcgcttttcttttgttcctgttccgtttcaccatgcaggcagtcattgtcaacaagactgcccacgacctggaagaacagcgcagatattacttcacactaccggctttcgacctattgcagccgatacagtctttacgttggaaatggtactgtctgttccgcaagaaaagcggttttctgagaaagtgattctcttattcgtaacggatggaagttgccggatggatgcgtgtaatcaggaatgatgggcccagcaacatcaggaccgaagccagcaatgtgccggcattcagcagcaggaacagccagatattgaaagataccggaacagtagccatgtaataggtttcagggtcgagcttgaacaagccggaccagcgctgcacgaaatagaacgcaaggccgattatgttcccccaaagcatgcctttcccaatgaggaagaccaaaaaccaaaggaagactttacggatggtaaagttattggctcccaaagacttcagcacgcctatcatggaggtacgctctatgatgataatcagcaggccggataccatggtgaaccccgccactccaatcatcagaatgagaatgacccagatgttgacatccaagatgcccagccaggcaaagatttggggattgagctgctctacattgcggacgcaatactcggcaccatagcggtcgggattctcgtccgtatcgacagctatctcataggtggtttcttccagcttgtcataatcgcgtatttccagctccacaccgctcacctggtccggctcccagttgttcaggcgattcaccaaatagaggtcggtaagcaggaataggttgtcgtattcggagaagttggtttggtagatacctacaatcttcaggcggcgagcacgcacatcgtcctggatgaagtaggtgtctatcttgtcaccgagtttcaattgcagcttgttggcaagagactttgagatgactacgcggttggacgaagcggaatcgctgaattgcggaaactccccctccagcagatggcggtggaaaaaggtgctgtcatactcctgccccacacctttcagcaccattccctgaaaggcatcggcggtctttatcatccccggcttggtggagtagcgttgtacatgcttcacttcgggataatcggaaagcgcagccatcatgctgtcgcccaccaccaccgggcgcgtctcataagagcgtgcagcatccaggttgcctatctggatatgggcaccgaaacccacgattttatcccttacctcgctcttgaagccaacaatgacggacacggcaataatcatcaccgccagtccgagagcaatacccaccatggcaataaggacagccggacgggaaacttgcttgcccggctccgagttgcgataaatgcgcaacgctataaagcgagataagttcatgggtcattattttttaggcgcagattacacggaagatttgaaacaaacgtctttatcttaagttttccgtgtaatccgcgtaatccgcgcctaatgaattatttcattttattcggttcgtcctggataggcttccaatgctttttgcaatacaaacaaggcgcggttcaagtcgtctttcttcagtacgtatgcgatacgcacttcgttgcgaccggaacccggcgtagtatagaatccggacgcaggcgccatgaataccgtctgtccctcgtattcgaactccgacagacaccaggcacagaacttgtccgaatcatctaccggaagctttgccaccgtatagaatgctcccatcgggatgggcgaatatacgcccggtatacggttcaatccgtcaatcaagcatttacggcgttctacatattcatcgtatgtgtcgcgcagataatcctcatcggcatccagcgatgcttctgcggcaatctggcctatcaacggaggactgagacgcgcctggcagaacttcatgacagcatcccggatttccttgttcttcgttatcagggcaccgatgcggatgccgcactccgaatagcgcttggacacggaatcaatcagcaccacattgttctcaatgccctccagatggcaggcagagatatagggagaacccgtataaataaattcacggtacacctcgtccgagaagaggaacaaatcgtacttcttcacaaggtcgcgaatctggttcatttcacggcgtgtatagaggtaacccgtaggattgttaggattgcaaatcaaaatagcacgcgtgcgctcgttaatcaactcctcgaacttctctaccttgggcaacgagaaaccctcttcgatggtcgtggcaatggtgcgtatcttggctccggcagagatggcaaacgccatataattggcataggccggctcgggaacaatgatttcatcccccggattgaggcaagccaggaaagagaacaacaccgcctccgagccaccggaagtgatgatgatgtcgtctgcagtcagattgatattgtactttgcatagtaacccaccaacttctcgcggtaactgcgatatcccgcactgggactgtattccagaactttccggtcgatgttccgtatcgcttcaatcgcgacttccggagtaggcaggtcgggttgaccgatgttcaggtgaaatacatgtatacccctctgcttggcagcatctgccagaggagccagttttctgataggagatgcgggcatctccattccgcgaatagatattgttggcatgaggtttatttactatttgacgatttatgatttactatttaatagagtatttataggtgatattgctatcactttatcattaaagttgcaaatgtagcgaattatttgaaaccaaaaggaaggcaagaccataaaaactttaaaaaacttatctatcgtaaaaactctatgatatgtaaacagaaacttgtatctttgaaaaagcaaacgagccaagtagaatcaattgtaaatagtaaatagtcaaatagtaaataacaccatggtcatcaaccttataacttttgcttccatactgcataaacaagcatcagtccgtagctcccacgaagtgatattgactgaattggaaaaatactttaccgtcaacttcattgattacaaagacatagacaagttatcacccgatgacttcagtattatattcattgccaccggaggtgtggaacggctggtaatccagcatttcgaatcccttccccgccccgccatcctcttggcagacggcatgcagaactcactggccgccgctctcgaaatatcttcctggctgcgcggccggggaatgaaaagcgagattcttcacggagagctccccgagaccatcaagcgtatttttgtcctgcacagcaatttcgtggcacaacgcagccttttcggcatgcgcatcggcgtaatgggcactccgtccagctggctcgttgccagcaatgtggattatctgcttgccaaacgccgctggggtatcgagtacacagacgtctcattggaccgcatttatgaatactacggacagataacggacgacgaggtgggcgaagcatgcgccggactggcaggaaaagcgcttgcctgccgagaggcaagccccgaagacatgataaaagccatgcggctgtatcgagccatcaagaggattgtagaggaagagcgactgagcgccattaccctcagctgcttccgcctgatagaccaaacgggaaccaccggctgccttgcccttgccttgctgaacgacgaaggaatcattgccggatgtgaaggcgatttgcaatccgtcttcaccatgctggccgtaaaagtgctgacggggaaaaactccttcatggccaatccttccatgataaatgcccgtaccaatgaaatcatattggcacactgcaccatcggcatcgcacaaacggagcagttcatcatacgcaaccattttgagacggaaagcggcatcggtattcagggaatcctgccgacgggagatgtaaccatcgtaaaatgcggaagcgaaagcctggacgaatattacttgagcaccggcacgcttgttgagaatacaaactacatcaatatgtgccgcacccaagtgcggataaaaatgaactcccctgccgactatttcctcaagacaccgctgggcaaccaccacatcatgctgtatggcaattacgaggatatattggaagagttcctgcaagccaatgcctgcaaacggattgaatgattactcgttcgcatccggtatcaccacctcgaaacgcgttccttttcccaactctgaggagaccgagatagaaccatgcaggcggtctacgatggtctggcaaatgctcagccccaaaccggcgccctgcgtaaagctgtcttctttgtaaaagcgttcgaagatatgtttctgggcgtcttcagagataccgcttcccgtgtcttcgacaaagatggtggtatatccttcccggttcgtgacatagccgaaggtgatgctgcccgttaccgtgaatttcttggcattgtttatcaggttgttcacgacctgcttcaagcggacggaatcggtgatgaccaatttgtcttccccttccggaatctctatacgcagctctacatcccgaggcatactcagacgctgggattcatggacctcctgcatgataaacgccaggttgaatgctccgaacttaaagtccatcgtgcccgattctatgcgcgagaggtccagaatatcgtttatcaacgccagcagcaatgtacagttgatgttgattgtttcgacgaactgctttacctcttccggagaaaaagcgtccaaatccttcaacaaatccgagaagccgacaatggcattcaaaggggtgcgtatctcatggctcatattggcaagaaacgcagatttgagcttgtcggcctgcaaggcacggtcacgtgcggcaatcaaggcctcttccgtatccttgtaacgctggatgctctggcatactcccaataccatgtatggggtatcaaccgtcagtccgtcataagcggtactgcggaactcccaccattcatagctcccatccgcactcttcaaccggaaactcatccgtgaattgatttcattgcccaacagaatggcatcaaaattcctgcgcgtatgcagcaagtcttccggatgtataagggtgtccatctcatcacgtgccagcaagtccgtatcatcggtatacccgaaacggcgcagcaatccacccgggaaatggaaacggttcatatgcatgttgtactgccacggataaatggagctttcctccaccgccatattgaagaagcgtctctgcatctcttcttcggagatattgcggcatacaatcgccattcccgtcatcttttcattggcaaagataggtactacctcgccggaaacggggaaatacgttccctgatggttttcctgcatgaaggctttctccggaatagaaataggtctctttccggtacgtactttcttcaacaagtcctgcaggatgttttctccattcatgtaaatcctgaaaatggagccggccatctgcccttcatagaaacgggacgtataggtttcggaagaaagtcccaacatctgtaacaacggacggttgacaaaatggatgcgcaggtcggtatcatacgtaatcaagccgtcgcgaatggaacagaagatattgtcgaactcgtcgcgctgctccaccaggcggtgctgtatcaacaagcgggtctgggcatgtatgcgcttacgcgactccctgcggttggcacggaaaagccaggcaaccagcagcaccaatgccccgacaatcagcgaatagaacagaatgaaccagacacggtaacgctccatcaacggtatattcaaaatgatgcccttgctctccgcacggttcgtgtccacacggaaaaactgcaactgtttgtaatcgaacagcaacttgcccccaaagtcctttacttccaatgaggcgggtgacttgcccttcaaaatacttgcagcctgccggccggcagcaaaagcatcctctccgggaacggcatcatacacacacagaacaccgttcgtcatagccaggttctggctggtaaacacgggggccttcaacttcaaggaaagaaagggaatccatttgggagcaatgacaatatgcttgtaggcattgtagtcatagcaaatggaagtgatgatagagttcaaggacttggcctgcacattcagcactttcaactcatgctccggatagttgctctttatgcgttcccaggattcctccacagccttaacccctttaaggctcaggaaactgctgtcggacagacagaccaactccctgcgggaaggaaacatgcggacagccgcatccagcaagacatcgaaatccgttttcgaaacatagccggagacgttgggcattctttcaaagactctctcatccgggtatttgatacccgaaaccactaccggtatctgataaggcagggaatcaccgcaatgggtcaatgtgaagaaagcctcatcgctggaggtcacaatcaagtccgttttccgttgcctggcacgctcgcagatgcggcgcatgatgaagcactcggaagcgaaagaccagtaatcggcattcagatattcagtagtgatattggctttaactccccccttgtccagtccgttctccaaattttctgtcagaaggctgtgccaaggagtattttttgtataggactgtatgaaaagtacattgtacgtacgttccgtagccgaaagtgttcccgacatcaaccacaacaagcctgcaaacaatggaaagaaaaggcgtttcatcataatatagattttgtatactcaacgcaaaactcttattcgtcacgcaaatatacaagttatattgagaatgagcacagattattcaaaaaaaactcactcatcgtgcaatgcttcggcaggctgtaccttcatggcccgtgaagccggataccagattcctgcaatcaccatcaatgccatcaatatccagacaatagaaacgcatatgacaaatctcccccaagtggcatccgtggcttccgtaaaagtgacatctgccataaccatattgatacatatcatcaaagcggggatggaagcaagtgccaacagcagcaacccttcacccagcaattgccagcgtattcttccgcggctgctgcccatggccatgcgcaaagcaatctcgctgcggcgatggcgggtacggaaccaaaaagttcccatcagcccgatgaatacattgaaaacaaagaatatcacaatgagccttgcgctgcggatatacggggtgattccttcggcagcatcccgctctatcttctggtccttatagctctgtatgtcgaaaagatagaatggagcgacctgcagctgcgacatcatatcctgataaaaacgagctgcaaaattatccgtatccgcctccggacgtatccgtagggagatgaacgggaggtactggtcctcatagaaccaaccggggaaaggagtcaggacaaaaggtccgtaacgggcatagtcatccgtcttctgcaaggcacagactgcagagacacggtaacggagacctccgctgtaataatccagaaactcgcggcccaccgccccggcacttgtctgaaaaagactgtctgccaaatcacgggtcaccacggcaggcagaggactggcagtggaattccaatccgagacattcccctgcaacagcggaatgcgcatgacgtcgaaatattcgggagacacatagcgcactgtagtctcgacaacatgcacgctgtccgtcgtatacccctggtaaacacgcccgcgggtataagtatcggtacccagccacgtggcagcactttccactgcaggatattgcctgatacgccggagcacttcctccatcggcttgaaccagaaggtctgcaggctgtcttccgacgtgcacggcactatctgtgtgggattgcaggaaatccttatcttatagacatgctccaaatcataccccttaggctgccgttctgcatgggcaaagccatagagtacatccacacaataccacatcaatgtaaatacaatcaacagctcggcaaacagccagccgttactgcggcgctggttccatatctggtgtaaaatagaatgtatcatactcgttactgttttaattgggattcgtttatccgctcattctccgccaagaacctcggctatagggcgacgggtggcatgccaggcaggaataaacacagaaagcaggttgaacaacagacacaccaccaatacagccacgaaaaccgcaggacggaggaagagccagacgcttacatcaaaattcgttccgggagcaccatcgccaagcatccagtccttacccagccataggaatatgcacgaaaagagaaaaccgagcaatgcgccggcaaatgccaaggccaggttctcgcggagcaactgcaccatcaaggtagaacggctggcgccgtatgctttccttaccgcaagctcagccatgcgacgggacatttgcgaagatataagtccgctgacattgatagcgggcacaataagcaatatcaaacccaggatgatgcaggttacggcaggactcatcgtgtcattacggaagaactgccgttccgtataggtgctgaggtcgggaagctccagttcatattcgaccagtatctcgttgaagcgggcaagcgactgttctatctgccgcttgagttcctctctgccgacaccgggcttgacaagggccacagcctcgaaatctccccgtagcccttcactgcccagaccggaatcccgggtggaataaggcatccacaactctccataggcaaatgtgaacagagagctcacatccttggtgaccccgacaatgcgcttagggcgaaagttgacaaaataatttttgccaatggctgcttcggcagacccgaaagcttcgcgggcaagctgttcgcctataaccacgacatcccggcaagcatcgaactcttcggtactgaaaagacggcccgccacaagagggatatcgtagacacgccaatagttcaaatccacctgacgaaccgtacggcgcattccccgcacgggcgaatccccacagtatctaagataggtaggtcccagataggtgacaagttccgcacccggaagttctgcaaaaatagcgttgacagcccgataagacatgcccgtattggaattgctgtggtcggacttgcggtaagagtatccataagaagaatataccatgctactgcggtgcgactcgggagctaagtcagccgtctggatgtcatacaccatgtaaatgaccatgacaaaggtgatgctcactgccgtaccgatgacggaaacagcactgaaaaagggattctggcggataagagctaaaatttgtttcatagctttctattcatcgtgcaatgcttcggcaggctgcaccttcatcgccttgcgggcgggaatacctataccgatgacaatcattagggcaatcagcacaaagctgatggcggcacatagcagcaggcggtcccactccaacgtcgtaccgttcctccaggagttcaactccaggtgtgcaagattataatcgatgagcaatgcaacgggggtgacaattgccaacaacaatatcccttcactaagcagccggctgaagatggcacggtctgtcgctccatgcgctttgtgcagtgctatctccgaacggcgttgctgcgtacggaaccagaatgttccgagcaagccgaggaaaatgttcagcagcaggaatcccatacccatcacatagttacggatgtcattggtccatgcctgctggtagttgcgacgaatatccttgaaagaacgtatctccgaaatgaagatattgcctatgcggaactggctctcactgtctgccttcagcctctcaatgaagtcattgtcctgcccttcacggacgcggacacaaagttcgagaccgatatagtagaaactctgcttcaccatcatggaatatgagcttcgcgcctggtcataatcgtgatagcgtacattttgcagtgcagcacccagccggtaggtcttcgtagtatcaccaaaaagatagaaccgctggcctacgagatctgtcatccggcagtcgtatttccggtagaggttatccgaagccataaactccccgcgctccaacatttcagccaattgttcgggtgtctcgccacgcgtgccccgatagcggaatacacggggaaagtccggtgtcactaacctgcggatggtccaaccgggagaacgcaaagtgtcatagcttacttcagcgcctgaattgcttccgttgtaaggatatgaattctgcgaaaggctgaccgcttctatctccggccgacgacgcagacgctccaacaactcggctatgtcatcgtgggtctgctgagaggtatgcccggctatgtagtcgggacttttgggtgtcagttcccccaactctataaggtagcagtgctctatattaaagcctctcggctccagataggtggcggcgcgcgtgtagagatagtctaccacgtaccacatcactacactcactaccaataactccaacaccaaccataggtttgagagccattcattctttatctgtgtaagaagtttcttagtcattttcttcaatgattaatgttttgtgatggagttatttatgcaaacgtccgcccaatgcatttacaatccctattcttgatgcacgccatgcgggaataccggaacttagtaagtttagcacaaagcagaacaacaacgcccagccaaaggtggagccatgcagcaatatgctcgcatccactgccggaggactcagcgtctggctgaattcctgcgcaaacagcagtgtatttcccaaataagcgaatgctacactcagcaacaatcccatcacccctgccagcaatgtcaccaccagattttctgcaatgatttgccccatcagttccagtctcgttgaaccgaatgcccggcgcacaccaatctctgccacacgctggcgcagacggctctgcgtcatcgagctgaggttgatggcaggaacaatcagtagaatgatgaagataatgagacgctgcctgcgtgcctggtccacgtccggttcgatgttggcagccattcctgcggcatttttctcctggtcataaggacggttacggtaaatcaacgaataaccattctcgccaattacagtgtcgtactcctgacggcggcgttccgtctcctcacgaatagcgggaaaatcatcacggcttttcgccagaatggtaacgctcatcatccccatatgctcatcactccatgtgcttttcgttatctcagtagaagtatagggcacccatacctgcgcataggcagtgttggccaaagtagaaacatccttcactacaccggacactgtataaggagcatggttcaaaaggaattcgcgaccaacagcctccgttgtctggaataacctgcgcgctacactttccgtaattaccgctacaggtagtccggcatcgaatgtagcctggtcataaggtttcccggcaacaaaagagaaatcaaacacacgccagaaagtatcatctgtctgcaacaggtcgatacccgttgcaggttgtcccggcagattcacgggggtagaaatgaccatacaggtataaatcgttactgcttcgggggtcttcagcgatttgaagcactcaagcgcagtctttatccccatcggtccgttggaactgtttccctctccccagcttttgttggtgatgctcatataatgcacatgtagaaagcggtcgcggttgctctccggagcaaacggagctaccttcacctgctgcatcatcaccaccagcatgatgaggaagatggcaagtgccgtaccggctatgctgacggcactaatcatcggttgctgccgcaactgtgcccaggcttgtgtgaagtattgctttatcatattgatatttacgattagacgatttactatttacgattggtgttaccgctactcaacggcccaccttcaggttacatgtattcactccgcctatgcctcctttagaaatgtcagcatgcccggcagttccgctcaaagtgacgtcacccacaccactcattctggcagtcaaataatcgcagactacatgaatatcggcgctacctactccgcgcaaagcaactttcagctcgtcacacgtcaaatcggatacattcacttcacccactccctttacttcaaatgacacctcatccagtttcaagggcttctcacaattgaactcccctacaccggtaaactccaccttcttcaaatcaggagccgaaatccaaatggtcacgccatctttctgatttctcatgctcttgtttttcctatccttgaagcctatcagcagacagccgtccttcactgtggtttctgtattcttcacgtgcttctccttaccttcaatcttgaaagaataagtgtcactctgtgtaaaataaattgttcccacagacgttatctcaatggacgaaaaggcatccactttgcgcacttcactcactttggtatcttgtgcataaacactcagcatacctacaaatgtcaatatcaatgcaatgataatacctactatattagttttcatttttcttcttttttattgttaatcctctattgtttttcatactactcttcatgcaacgcctctgccggctcaatcttcatagcctgccgtgccggaaaccatattccaatcactaccatcagagctatcagtaaccaagcccctagagaacctgcaaggaagcgtatcacactccactctatcggccaagtggatatgagagaggtacgtcctatagtaaattccgccatccccacattgtagcatacaaccatggcaggcaatgtcactaacgccaataacagtaacccctcacctatcagtaaacgaaacacaccgccacgcgtactgcccatcgccatccgtagagctatctccgaacggcggcggcgagtacggaaccaaaaggtgcctattaaccccaaaaatacattcaccagcaggaagagcaccaccacagcctgactgttcaccttatccgtatcgccattcatcacctcgaactgcaactgttgttcagtatagggagcggcatctgccacaaacgcattgtccgtgtccagtttaggcgctatttcgcgcagaaacttctcccgataatccggtccgtcggcagcaggcttcacgcggaaaacaatctgcgaccaattgtcggcaaactctgccttaatcatattctctcccaaatgataaaagaaccaaggttcctcaactccataacgataggaacggaaagcaccggtcttccccatctgcttgatgattgtaacagaatcaccattacctaacggcgtagtctgcgaaaactccggcattttcttacgaaaacgttcaaaagcggcattactcagtgtcacattgttccatcctgcgggagtgtcccggaacgggtgacgcgggtcctcacttatccggaaaacatccatatatcctccagtcgtataaatacagcgtccttgcacccaggaagtatcttgcacaaccaacgcattgtaactattactgccactcatcggaaggctccaataacaaagggcagctgcctctacggaaggctcttgttccaatttcgccaatatacccagatatttatcggcatcagtcagactcgtatcccgactttctccacctacaacggtggataatttatagacatgttcaatattataacccagcggacggtagaaagtatatttcatgcatcccagtgagtcacagaggaaccacatcacgatgaataccaagaacaattcagccaatacccagccgttactgctgaagcgtgcctttatcatacgtaagttatgtatcgtaaatttcatatcaagtacctccttctatttatcattcaaagaatctacaatagtgtgccgtgccgctatccatgcaggcagtgccgcactcaacagattgatgaccacacagaaaacaaatgccagcaggaatacccacggactaaacagtgcctccatgttcaagctgaactcgcccgacgtacccacattctgattattggtgaacagccacatacgcatggcatatactgccaaataactgaaaagcagtcccactactccacccagtaatgtcaacatcagattttcgttcagtatctgccgcacaagcacacttttcgttcctccaaaagccttacgtacacctaattcggtaatacgttgctgcatgcggctgttactcaagccacacagattgagtgacggtaccaacaaaatgataaataaagctacagcatattgaagataaagcattgtcaagtctggccctacattagcccatacgtggttgacgtgcgccacgatattgtccggctgttccatgatgtctatctgtttattacccaatccggcattaacacgttccacctgcttggcaatgccctcccggatggcaggaaagtcatcggatgtacgtgccaatacagcaatctgcatgcctcccaaataactgtggactccggtaattttcagttcgtcggcactgtacataccccatacttgtgcatatgcatccttagcagtgacggaaacatctttcaccactcccacgatacgcgcaagttcccggttcagcaggaattcctgtcccactacatctgtacttccatacagtttccgcgctacagacgcacaaactactacagccttgctttctccagcacggtcggcttcgctgaagccgcgtccggcaagaaactgcatgctgaacactttccagaagtcgggatctgtccgcatagcatccactttcacccgattgttaccgtcagtcaacgaagccaacgacaaaccggctggggaaaatgccgtacagtattccacttcgggcaccggctgcacgcattctttcataaatgccgccgaaggattactccaattattattgccgtccttttccttgtcgtatacgtgcatagcggaaaagtaaagacaccgactgcggttcacttccggttccaagtcagcatattttgtctgccaagtaatcacaatagccataatcatggtgatagcaaaggccgtacccaatatggaaatcgtacttagcagcggattctgcttcaagattgtaaaagcttgtcttacggtttgcatttcatttattgatagttgataattaatagttgacagttggctgttaagcagtaattattccacctgacgtccgtcgaagaagcggacggtacgtgaggtctgtttggcctgctcttcattgtgggtcaccatcacgatggtacgtccgtcttccttgttcagttgatgcaacagttccatgacttcggcacccatcttggagtccaggttaccggtgggctcatcggcgaggattatctccgggttgccgataatggcacgggcaatggctacacgctggcactgaccaccggaaagctgtgtaggcatgtgacgcatgcggtggctcaaaccgaccttcttcaatacctcttccgccagatgacggcgttccttggcagacacctttctatacagcaaaggcagctccacattatccagcacattcagcgaattaatcagatggaaagactggaacacaaaacccagcttctggttacggaaagcagccagctccttgtccttcatgccgtccacttttgtaccggctatttcgatggtgccgctggtaggtgcatccagtaaacccataatgttcagcaacgtagattttccacaaccggaaggtcccatgatactgagaaattctcccttgttcacttcgaggtttacattttccaatgccacggtttcaatctcgtttgtacgataaatcttgttgatgccagttaacttaatcataatggtaagtatttaattgttattattctgttctgtttctattccgcacaatttctgtttcaagaggtcaaaagttgtgccaaaatcgtttattattgattatctgctatttatacatgcagtaaggtgtccgaaaatgaacaccttgtccgttttcatctattcgtcacgcagggcttccgtaggtggaatgcggctgatgttgcgcgccgggatatagattcccaccaacactaccaccagcagtatcagaaagatgacgagcgacacgagcagataatgcgaggtgaaatccgacacccaatagctctctgtgctctccacccaattctgccctttggccagcccttctttcagtgcatattgcaaatagagcagaaaaccagtcagtgaagcgaccacggtcaataccgtgccttcgcccatcagcaggcggacaatgtcgctgcgtgtagctccgaacgacagcatcactcccacttcctcgcgcctcgtacgtgtctgcaaccagaaggtaccgatgacacccagacaaagattcaccaggaagaaagccgccatcgccagattacggcggtaaatcggtgtggaattgctggcttcgctctccgttataatctgctcataggaacggacactgcgagcaaacagattgccccgcctcatctccttcaccatccaaggacggaaatcgtgcagaaaacgctccatgctgacaccctctttgagacgtaccaggatatgggcactttcagggatataacttgtatcgatggtaagcatcggcataaatgcaacggggacgggacgccactcgctatacatcttcatggctcctatcgtaccgacaaccggcatgtacaaggtatctccatggtctctgcttatacagcgtttgccatgcgcgtctttggtatggaacaactgttcggcagcattctccgtcagtacaatgtcattcggggcataggcgtagtcggacagctgtccgggtgtccgccccttaccggaacggaaaccatacgtatcgaaaaagttcgtatgaggcaaaaattgtatcatcataatagataagggaatcgtatccccttcggcaaacaattgactattcgaacttcccgaagaattgggataacagaatcccagcacgggagtggccgattccacaccgtcaaagtccttgacataacgcaccaaattataatagttgtccaccaacgtagcagagtcctgcgcttcggcatcgtatcccggtgcctggggctgcaatgcgcccaatgaaatgaggcaaagccgctccgcatcatagcccaacgggatattacgatcgtgcgtgaccacaatcaccgggtccaatacaacccaactgatgatactcaccaatatcaattcggccaacaaccatccgttcttgcggcggcgcgcccaaagattcttccatattaacttaaacataccaacctcccgtgtcttatcgtttttcattcagtgagttcacaatcggtttccgcaaggaataccacgccggtataagggccgacaacagattcagcacgacgcacagcgccaatgcggcgagaaaaaccagcggagcaaacagcatttcacccgatacgcggacctccactccttcgggtaccatattcggccagctgtcgaataccgtaaatatccactcgcgtcccacgtaaagtgccagccatgccagcagcaagcccaatgctccgcccagtgcggtcagcagcaggttttcccacatcacttgtgaaagcagtatcttacgtccggctccaaacgatttccgcacacccatctctgccagacgtccctccatacggctcgatatcatgccgctcagattcagggcaggcaccaacagcaatacgagcaggacaagcagaaagtggcgcactgtggcccaaaggtcaaactccatacttgcataagtcttgaagacactcaacagatgggaggtgggctgctcccagaaatctactttccattcatcgggatgcataagattctccttgcggcagatttcctttatctcagcccgcagagcatctccctgcttactgtcctgcaccagaaaggtagcactgaaagctcccagatagggaaggtcgtacttgggagtgctgtaatcgggcgacaccgtataaggtatataaagctgtgcataggatttagaggtgaggtaactggcactgcgcaccaccccacaaacccgatagtcgatatagttcaggctgaacgagcgtcctacgacctcttccgtcgtaccgaacaagcggcgtgccaaatcatcggtaatgacagcagtggaaatgccacttgccaggtcggatgccgtgaatggactaccttccaggaattggaaagaatatatcttgaaaaaagcagggtctgtcaactttaccataaccggaaaatcaccgctgcagtcggcaggctgtatataactgttttccgacaaatcattatgcagctcggccgaaacgacaagggcattctctacgggatagaaccagtcttgcagtgccttgtaggaaacagcccattgcatggtcctggtattgttgccgcttccctgcgtgaattttgaattgctgaggtaaagcgtattcatgcggtttgcctccggatagacgggcgcaatcttcgcataatacaccaccgccataatcattgtcatggcaatggccagccccgtacccacaatgtagagcatgctgaacagtttattctgcttcaacagctcccaggcttgtttcaagtaaacctttatcattttagcttcaacttattcttgttcttatagttactcatatcgctcaccaccacttcatcacccggttgcaagccactgaccacttctacaaactcaaagttggaatcgcccagctgcaccttgcgctttacaatttccttgtcggaattgcgtacaaaaagttcatactccccacgtcccacataatagctggcattggctatgcgcatcacgtcttccttcactgcattcatcacatagacgtcggttttcagaccggaacgcagtcggcggttgttgtcctcattcaactgcacggtaaaggagatgacgccattctttgaaagcggagtaacactgcttacggaaccttccagcttttcgctgccaatcttcacaatggccttgccgccggcagccacacggtcaccgtaagtatcggcaatctcgccttccaccttgaagtgactcaagtcggagatgacggcaatctgtgagccttcgggaacctgggcaccaatctgattgttgatataagtaaggatggccttccggggcgaacgcacctgcgcatcgtcgagcgtacgtttggtttcggccagtgtcttttggaacatgctgaaatccagttcctgcacttggtattctgcagccagcacttccttctcgttggcatactgctgctgtaattgctcgtattccagttgtgctacattgtagctcagttcggcttggcgcactttgtcggtggtgcccgaaccgaggctatcaaggtactgctcgttacgcagttccaccttcatgcggtccagcttcatggcggagactttgattttcatctgaaggtcggtcagcttggtctggttgtcaagtttcagctgtttcagcttgtagctgcgcatctgctcttcatccagcatctttttgtagtcggtttcggcactctgtaagtccagtttcaggataggggtaccgacatccacactatcaccaccttttctgtacacttccaaaatgcgggtattaataggcgaatttataatttcctcgaatgcaggaaccacttttccggaggcactgacactgacttcaatcgtacccttgcctactttggagaatacaaggtctttctccttcactcccgtacgcatcaatgaaatgagtacactgaccactacgatacctgccacgccgatagcaccgtagcggatgattttcttattgcgttctttattacgcacttctttcggaatttctctatccatatctttaaattttattgtttgcgaacataacgcttaatatatactaaatccatgccaaaatcataaccccctgaaagtaagcgaaaagacaaaaaagaagggtgtccgttttcggacaccctgtacattttcggatagcttctttatcttaatctcaagcggtctcccacctcgggcacgtattccgcatccttacgattcatcttataaaggttcttcagacgaataccgtacttttgggaaatggagtgcatggaatcgccgtccttcacaatgtagacagtatggggtttggcagctttcttgcgcttttctttcaagtagatgatgtctcccacctccagtgtatattctttatggaggtcgttgtatttcaccagtttcttccagctgatgtcaaactccttgcccaacacctggaaggtgtctccgtcgcgcgccacgacataagctatatcgttggcaatgtacacctgatgcggattggccagccaaggtttctttttcagttccttctcccaactgcggacatcgtgtttgctcatgccacggctgtcgtacttatacagttcatagtcctcaataatggttatcaggcggttggcatacgacgggtcggtagcatagccggccttcttcaagccgcgcgcccaacccttatagtccgtaatcttcagtttgaaaagaaaagcataacgtgctccccgtttcaggaaatcggaatggtcttcataagagtctttcggattgcgataagcgcggaaacattcattgcgggcatcgtcatcatgcctcaccgtccgtccgcgccagttgcctccacacttgatgccgaagtggttgttgctcttacgcgccagctcgctgtatccggcaccactctccaacagcccttgggccagcgtgatgctggcaggtatcttatgacgttgcatctgctccacggcaaggggagcatactgtttgatatactcattgtagcgggcattccggcgttgtgcctgcactgttgtaatggaaataaaaagaaatgctatgatagcagtcagtctgaaaatccgtttcatgcttaaaatgttgagttctgcacaaaagtccgtaaaagaattgaaataaccaatctcttttctatctttgtaacattaattacaatataaccctttgccttatgaaagaattaaatatcgaaatcgccgtcaagatatacgactatgaagaactggatgccgccgaccgcgaactgatggatgccgcccgcgaggctaccaaccgcagctatgccccttactcccacttctcggtaggagctgcagccagactggcaaacggtattgtagtgaccggcaccaaccaggaaaacgccgcctatccttccgggctgtgtgcagaacgcaccaccctattctatgccaactcccaacatcccgaccaggcagtaaccaccctcgccattgctgcacgcaacgagcacgacgagttcctggagtctcccatcccgccctgcggcgcctgccggcaagtgatgctcgaaacggagaagcgcttcaagcagccaatgcgggtgttgctgtatggcaaaaagggaatctacgagctgaagaatgtgggagaattactgccactctcgttcgatgcttcggccatgaagtaacagaaccaataaagtattaacatcgtgtctgcaggaagttaatttcttgcaaacacgatattaacttcttgccgacacgatattaatatcgcaaaaagcctttgttattcagtggaaatcattacctttgcgcccactaaccaattaattccaccgatgagaatatccgactaaagacaacacatttcggtaaacatcactatcaacatgctttttcagactgaacgctgagcatcacctatatagatgtttagccaatactgtgtttgtctgtacccctccccttcgagaatttcaatttcggggaatgcttgcatctcccctatcattcttacttctaaaaacacagtagaaacttatgagctttatcattaaagaccttagctatatccatacagataaggaaatcttgttttcacacctccatttgagtatcaactccggagataaaatagccctgaccggaaataacggttgcggcaagtctaccctcatgcgcattttggcaggagacttgtcaccaagttcgggaacggtgctacgccccgaacatctgtactacgtgccccagcacttcggacaatacgaccggcagacaatagcacaagctttgggaatcagccacaagctatctgccctgcatgccatcctaagcggtgacgctaccgaaaagcacttcaatacgctcaatgatgactggaacgtggaagaacgcgcccaggcttctctcgacagctggggactggacggtatcacactctcccgtccgatggaaggacttagcggcggcgaaaagacccgcatcttcctggcaggcatggagttgcacaacccaacagccatcctgctggacgaaccgaccaactatctggacgcggatggacgggaacgtctgtataacttgatacgacggacatcggctaccgtgctcgtcatcagtcacgaccgcacgctactgaatcagttgcctgccatctgcgaactctcctcccagggattgacgtattacagcggaaactacgacttctacaaaaaacagaagaccctgcaacaaaacgccctcacccaacaactagaagagaagcagaaagccctgcgccttgcacgcaaagtggcacgcgaagtagaagagcgcaaagccaaacagaatgtgcggggagaaaaagcctccatcaaaaaagggattccccgcatcctaatgggaggactgaaaaacaatgcggaaaacagcagtagcagactcagcagcatacatgcggagaaagcggaaaagctgcagacggaaatggcaggcatcaaaagttcactgtcgcagacggacaagctgaaaacagacttcaacgcctcccatctgcatacgggcaagattctggttacggcaagggacgtcaacttccattatcccaaccatacagcctcccccgcagaaacaccccatacggagacggctgcaaagaacctctgggcttctcctctcaccttccagctaagaagcggcgaccgcctcagcttgaaaggaaaaaacggcagtggaaaaacaaccctgctgaaactcatcatgggcgaattgcaccccaccgacggagtgatggagcgtgccgacttcacctccgtctatctggaccaggaatactccctcgtccgtaatgagcgcagcgtactccaacaagcagaagctttcaaccaccgccacctgccggaacatgaagtgaaaaccatcctcaaccgttacctctttccccgcgacgtgtggaacaagccgtgcggcaaactgagtggcggcgaaaagatgcgcctctccttctgctgcctgatgattgccgacaataccccggatatgttcattctggacgaacccaccaacaatctggacatcgagagtatagaaataataacggcaacgatacgcgactacgccggcaccgtaattgccatcagccacgaccgggagtttctgaaagacaccggcatcgaacgggagatacttttggaatgaatcagtaatttaggtaacaacaaccgtaatttgtatactgccgttctcataaaacctgcctatttttgtagcacgtaatcatttactaactaacgaacaacgaatatgagcaaaaaagtattaatcctctcctccagtccccgcaggaatggaaactccgaccacttgtgcaacgaattcatgcgcggtgccgcagaagccggacatcaagtagaaaagattctcctgaaagacaagcacatcaactactgcacgggatgtagcgtatgcagcatgtacggcaaaccctgcccacaaaaggacgatgccgccgaagtggtggaaaagatgattgccgccgacgtcatcgttatggcaacccccgtctacttctacaccatgagcgcgcagatgaagacactgattgaccgttgttgtgcccgttaccttgaaataaaaaacaaggagttctacttcattatcgccgccgccgaagaaagtgtccccatgatggaacgtaccatcgatggtttccgtggcttcctcgactgcctggaagagcccaaagaatgcggcaccatttatggcgtgggtgcctggaaggtgggcgagataaacgacaagccttccatgcacgaagcctacgagatgggaaaaaaggtataaagaacgaatactaatcgctatacaatacatttatgctacgtaccatcagactgacccttgccgtcatcttcttcgcactcatcacgctgttgttcctcgacttcacgggaacactgcatgcctggttcggatggatggcgaagatacaattcctgccggccgtgctggcactgaacatcggtgtagtactgtttcttgcagtgctgaccttggtattcggacgcatctactgctccgtcatctgcccgttgggagtattccaggacattgtttcctggctctccgccaaacggaagaaaaaccgtttccgctactcgtccgcactgaaatggctacgctacggtgtgctgggagtattcgtacttgccattatcggcggactgaactcttttgtcgtgctgctggccccttacagctcatacgggcgcatcgtttccagccttttctccccactctaccagtgggcaaacaacggactggcctacctggccgaacgtgctgacagctatgccttctatgaaacggatgtatggatgaagagtctccctaccctgctgattgccacggtcactctggtagtcctcatcgtgctggcatggcggggcggacgtacctattgcaacactatctgtccggtaggtacagtgcttggcttcctctcgaagtattccttgctgaaaccggtaattgacacaaagaagtgcaacagttgcggactttgtgcccgcaactgcaaggcatcgtgcatcaacatcaaggcacacgaaatagattacagccgttgcgtggcatgtatggactgtatcaacaagtgcaggaaaggtgccatcacttacacacgccgcaagccggcctccgctgcagtctcccaggaaacctccgtggcaccggagcaggtaaacgacgcccgccgcgcatttctctctacaactgccgtgtttgctgctacggcagccctcaaggcgcaggagaagaaagtggacggtggactggctgtcatcgaggacaaaaaaatccccgagcgcgccactcccatcactcctccgggctcactgagcgcccgccactttgcacaacactgcacagcctgccagctctgcgtatcggtatgccccaaccaagtgctccgtccttcttcggacttgacaaaactgatgcagccggaaatgtcctacgaacgcggttactgccgccccgaatgcgccaagtgtgcggaggtgtgtcctaccgatgccatccatctgacgagcctcgccgagaaatcggccgtccaaatcggtcatgccgtatggattaaggagaattgcatctgcatcacagacaaaatggaatgtgggaactgtgcccgccattgtccggccggtgccatacagatggttccttcagacccggaagacgaagcctccatcaagataccggtagtcaacgccgaacgctgtatcggatgcggagcatgcgagaacctttgtccgtcgcgtccgttcagtgccatttatgtggaaggccatgtgatgcacagaactgtctgaagcagctttatcaccctaatatccatttataatttcagtcctatcacaatgaaagaagacaataagaacaagataaaccgccgcgatttcttcaaactcgccggtgcaggaacgcttgcctcggcagcagccctatacggctgttcgggcaacaagaacaacggggaaagcgaatcggccgcactgggcgagataccaaccggcaagatgacctatcgtaccaaccccaacacgggcgaccgggtttctctgctgggatacggatgcatgcgatggcccacccggaaacgtgccgatgggaatggagacgaaatagaccaggaagccgtgaacgacctgatagactatgccattgctcacggagtgaactatttcgacacctctcccgcctatgtgcaaggtctgtcggagcgcgccacaggcattgccttaaaacgccatccacgggagaaattcttccttgccacaaagctgtccaacttcagtcccagcacgcacagccacgaagagtcccttgccatgtatcaccgctccttccgcgacctgcaagtggactacatcgactacctcctgctgcacggcatcggcatgggcggcatggaagccctccgttcccgctatctggacaacggcatgctggacttcctgctgaaagagcgcgaagccggacgcatccgcaacctcggattctcctatcatggagacatcgaagtctttgactacctgctctcccgccacgacgaactgaaatgggacttcgtacaaatccaactgaactacgtggactggcgacatgccaaagaagtgaatacccgcaacacggatgccgaatacctatatgccgagctggtgaagcgcaacattcccgccgttatcatggagccgctgctgggcggacgcctatcccgcctgaacgaccacttgatggcacgtctgaaacaacgccgtccgcaggagagcgtggcttcctgggccttccgattcgcaggtactttccccgatgtactgaccgtactaagcggaatgacgtacatggagcatctgcaagacaacctgcgtaccttctccccgcttgttccatgtacggaagaggagtttaccctactggaagataccgcccagcgaatgctgcaataccccaccgtgccgtgcaacgactgcaaatactgtatgccgtgcccctatggactggatattccagccatcctgctgcactacaaccgctgcatcaacgagggcaacgtgccgcagaacagccaggacgagaattaccgcgaggcacgccgcgccttcctgataggctatgaccgcagtgttccccgtctccgccaagccaaccgctgcaccggttgtggccaatgcaacccacactgtccgcaaggcatcgacatcccggcgaaactgcaggagatagaccgatttgtggaagcgctgaagcaggaaaccctttaacggagttatcttccacatccgttttcatttcgaggattaccaatcatatacagattcatctttttgtataactttgcaaaaagaaccatagataaacgatgaataaaaagattttaaccgcaattttaataagtatcgcccttccgggtagtatgctgtccgcacctgccgacagcctccggctgaaaagctacaagcttgatgaagtcgtagtgaccgggacaagaaatgaaacagacatccgccacctgccaatgaccatctccgtagtgggccgccagcaactggaacagacctaccagccctccatcctgcctacactgaccgagcaggtgcccggacttttcaccacaagccgcggcatcatgggctacggcgtatccacgggagccgcaggaggcatgagcctgcgcgggataggcgccggagtaaacgcagccggaggacctacgaccagcctgctggtgctgatagacggacacccgcaatacatgggcctgatggggcatcccatcgccgacgcctaccagagcatgatggccgaacgggtggaagtgctgcgcggtcccgcctccgtcctctatgggtccaatgcaatgggcggggttatcaacatcgtcacccgcaagatgcaggaggacggggtgaaaaccaatgcgcagataggatacggttcctacaataccctgcagacggaagtctccaaccgcgtgaagaaagggcgtttcagcagcgtggtgaccggctcgtacaaccgtaccgacggacaccgtgacgacatggagtttgagcagtatggcggctatgccaaactgggatacgacttcagcgacacctggaagctgtggggcgacgtgaacatcacccgcttcaacgcctccaatcccggcgaagccgacaatccgtatatagacaacgactcgcgcatcacacgcggcatgacctccttcgcactggaaaatcgttacgaccgtacttccggcgccgtgagcttcttctataactggggccggcacaggattaacgacggctaccaccccggagaagagccccagaagtcgcacttcaactccaaggaccggatgctgggcatatcgtggtatcaaagcgccacgctcttcaccggcaaccgcctgaccgtaggtttcgattaccagcacttcggcggagagtcctggaacaaggttgtcgccatcgacgaggcaaaacccggacagcagattggtgaccgcatccccggcgtggacaagcagatggatgaatttgcaggctatgtggatttcaggcaggacatcaacagttggctttcactggacgccggtgtccgcatagaccaccattcgcacgtaggcacggaatggattccccaagggggactggctttccatctgccgcggcaggcagaactgaaagcaatggtgagcaaaggattccgtaaccccaccatccgggagatgtacatgttccctccacagaaccccgatttgaaagcggagagcctgatgaactatgaactctcctttacggggcagcttttgggaggggccatgtcctatggggtgaacctctactacatcaacggggacaacatcatcatgacggaccctgccctgcgcaagaacgtcaactccggcgagatagagaactggggtgtggaaaccaacctcggataccgcatcaaccgccactggcagatgaatgccaattatagctggctgcacatggagaatccggtactggcggctcccgagcataaactctatgccggtgcggactttacgcaaggacgttggggcctatctaccggtatacaatacgtgaagggtctccatacctcggtcaccccgggtaaggagaagcaggaaagcttcgtactctggaacctgcgtgccaactaccgtctgtgcagttttgccgacgtcttcgtcaagggtgaaaacctgctggcacaacgctatgaaatcaatgcaggcttccccatgccgaaagctacggtgatgggaggtgtaaatatcaacttttaatactgttgcgaaggagtgtattccacccgataaatgcggtcgaagaatggtgcccactcattgtccgtgatgccaatctgcagaccgtagaagtgtgtaccagcttcccgacaacggcgaatctcctccataaaggcaggtgaagagtgaggaatcttgaaatcgctgacccaaagcacatcggcattcatatactccttgccttctttgagcaggtggaacgtggcttccagcatgcgggtggcatctgtatccccgcaagctgtctttgagaagaattcgagcagccttgcccgctctttccttacgtcaatcggatggatggagacggaaaaggctatcagaaagcagttccgccgttgacggtcggctatctccaggagctttatcagcagggagtgggcaatcttctccggcttgccagccatgcttcccgaggtgtccagacagacaatcatcggacctttgggacgggcgggcttggtttcgatgcgccgggcaggctgcatgatttccgatttataacggaaggtctggagcttgcgagtaaggtatttgtagacgaacaaatcttccagttcactgtcagcggaatgggcaagctcaatgggaagcagggcattgaggtcgttgccggtactgatacccaggatgtcacatttggaggagtgctccattttgtagacgtttccctcggcaacgcggatttgctcacgtccttcgtcgtctgccatacgccccatcttgcgggccactttcactatctcggggcaagagcgctggatgcgcacgattttccgtatacgctcaaagtcgacagtattccacaagccgctcatcatgccccaggtctggaagaattcgtccttatccacccggttctggcggatgtactcggggatgtctttcagattggaacggagcctgagctcgagggcatctttgcggaaagcaatctctttctccttttcttcgtgcatcttcagttggaaggcgtcttcccagtcgtccaccattttctcccagacttcatcgtccgcatatcctccttctgtgccgaagtggctgcggtagaaacgggagtcgaagccgtactcccggtatttgtcggaaatctgctggagcaaggcttgccagccgtctttccgctttgccatggaccattccagcacgagcttcatcccggtccgttccgactggcttttccggaggttgtaccgctccttctccaagttcaattggatgaactgaatcatggtgtcgtaaaagatacgtgcacagacctcatcgcccagcacctgcaccttgaccatggagtcgttcatcacagagagtagataggcatacaagggctcggtatccgtctctgcgcactctccggtggcaacgaaacggtccagtgcctgcacatagaaggcggtgtcatatcgggtgacggtagtgttcatcttcttcttggttactggaggattattcgtctccatatctcagtttgcgcatgtccacacgcgcccaggctatttccttgcggacgatggagacgtattgagctacgctctttttgtcttcttcggagacgaaaaggttgtcggacaaatctcttaccaggcggtctatgctggtggcggcggtgtccagttccgtctcgtagtcacggtcggtgacggagaggtttcccagccagagttgttgctcctcacctcgttgcagacgccgcatggggaagcgcacaccgttgatgtagagatgcttatcgtcacggtagagggtgacgcgttcggtgccttcctctttcacggcactggtgtcggcaaaggcgcggatgatggtacgcttgggattgatggggtcggcatacattacgcccaaggtgggggcatctttggcgctgtactccttcagatttttgtagtccacgataaagatgtaggtgttgcccgtaccatgtttctccacctggtagtagaagtgttccgttatcagcaggtcatcgtccctacggtcgccggcaaggcgggctttgtcgagggcttcgcgcacacggctgactttcaaatcggatttcagcgaggaggcgataccggcaatctgttttgtgtgggacacgaataaggcacggataacgatgtcacggatggcaacgctctcatcaggctcactccataggcagtagtagacgggaagcaggtcggtcatggagacttccgtgcggccgtggacgaaggcggaggtcttgagcagcttcacgatgttcttccagcggcggtcgctgacgtagacattgcggcgcaggtcggagtcttgcatctctacgcttgtcagtccgtggcgaatggctgtgatgcaggaaagaacatcgagaggcaaggttacgcggcgtatctcagcttgccattcggcatactcgcggtcggagatttaccattcgcaagcagtcgtttccggatggtcggcagaatcgtccagcagcattttgtagaaagattcttcctgcttgacgcaggtgcagagaatgcggataaggaagcggtcccatagggcttccagtccctcgccttgagcgggcagttcgttactggcagctacgagcagtttgagggggagatgcagttccttgtcgccgttgcggaaaagtttctcgttgatgacggtcagcagagtgttctgtatggcagggcctgctttccatatttcgtccagaaacacgacatcggctgtgggcagatagccgtcgatggcacgttcatacttgtcggattctttcagtcggctaatgctgacaggaccgaaaatctcgtcgggcgtagagaagcgggacatcaggtattcaaaggcacgggcatctgtaaaagccgattttaaccgcctggctaccattgacttggctactcccggaggtcccaggagcagaatgctctcgcctgccagagctgctagcagggagaggtttatttcagtttctttttcgtatactccccggttcatttcggaaaggaggagacgaatgcgttgggttatttccacaatatgatttatttatagtcagtactcatgtataaagaaaagcgtgtaaagatacaaaatagtagggaaatcagagagagtcttattaagattcactatctttggaaaacaaatacacacagacacgcacacacgttgtgatttgctttcattttagtatctttgaaccattggaaacagctagagcacaccctaacgcttatggggcttagtt

SEQ ID NO: 4413 - DNA, 221 bp, Unknown
  gut microbiota DNA sequence
acggcaatacctgtccggtaatgatttcctcttccacgcaggccgcactcgacaacccttacggtgaatcgaagcgggcaggggagcaactgttgttcgagtactccagggaaacgggtgcaaaggtactggtgtaccgcttcccgaatgttttcggcaaatggtgccgccccaactataacagcgcggtggccactttctgcaacaacatcgcccatgac

SEQ ID NO: 4414 - DNA, 65216 bp, Unknown
  gut microbiota DNA sequence
aaaagaacatgaggaatggataaagaggttgattgcctttttcgtagacgtctatttcgtgcttgattcttcccccatatttttgcaatcgttaatgctaacggttgctttttgtttttataggcagagggcgccataatataaacttttaaaaaaaagattatggaaaatcaagaatttccaaaaggagtcggtttcgctccgtttttgcattcattcatgagtaattcttctatttctattgatgaacttgcagtggctatgacaatgtcgaagtacgcaattacacgtttggccgagggcaagagctatcccactgacgtgtgctatgcagaattctgtatcatgttcaccgttgtattaggcaaagattttgatgcttacaaaaagatgactagaaaagacaaagatgatttggttgccaaaataatggcaagtggaggatctgcttgtacggtggcaggaatgataagcttgatttcggcttcaggtgttgttgctgggttgtcggcagcaggaataacctccggattggctgcaattggcggtataataggaggtggtatgctggcagggattgcagttgttgcggctgccccattggtagtaggggccatattgtattctctttgtaaacccaaagataaaaaggccgattttttgcttgcgtacagatatgatttagaccccaaatatgaaataaatcctcaagacaatgaagatgaagatatggattgaagaagcaatgaaggaaatggtagaagaggtagaaaaaaatgaaccgatgccaaaacattggaaacgcaatgtgctgctgttctgcttgttgtcggccgtttgttttcagacgggacttttggtgttggcaaaaaacggcattgcttccgctgatagaagtcctcttttcattgcaattggcattgtctgttctatgctggtgggagttgtgctgattaaatgctgcttatatgcaaaaagaataatgaataaaagtaataattaaaaataagatagttatggaatgtattttttgtttgaatgagaatgcctatttcgatggcgtgaattatgtttgtccggattgtggaagagaatggccatgtgatgaaattgcggatgacgatgatgataacaacaagttgcgttgccctgagtgtggctcgcatttggtctatcctgattcaagtggtattaatgattatgcttgtgatgcttgtgggtgtagatgggatggtgacgatgatgactacgatgaagattatgacgatgatgatgaagattaattattgcaattatggaactgggcaaatagcgctattattaccgcattattacatgcttcaatctgaaaaagattagcattcctttgccaagccccctgcttttcattatctttgcctctgtagtttgtagttgcgcacagtcgtggaatgtctttctcatagttgtgaagaaggtgtatcacaaatatgaagaaggtaaaccacagctgtgcgcatctttttttgataagctttcagcagaaggaagaacgcttctttgcgtaaggaagacccatgctctgcctaatgaaagccggtactttgtatgagcgaaacctgcagacagcaacagaaatgaatctaaaaatggaggaaagaatatggcaattttatttgattggtacgaaaacccgaaaacgaaggataaacaaggggaagaactgaccctgcatccccggattaaactgaacggctccacgacgaccgatgagctgcgcaggcatatacaagaatactgctcgctgaccgagacggatgtactggcggtactcgatgctttgtcgcattttgtgggacgcgagctgggggagggcaggcaggttcatttggacggcatcggttactttgttcctacgctgacctgcacggaaccggtgacactggagacaaagcggaaaagtactaaggtaaagttgaaaaacatcactttcagaccggacaaggcgctgcgcagtgagataggagtattgaaggtaaagccgctgaaattgcggaatctcacgaaaaagaggctgacggatgatgaggtgaagcaaaaagtggtgaactatctacgtaagaatgagttcatcacccgcagtgttgtacagtcgatttgcggcatgacccgcacgactgcgacgcggcagattcgtcgtctttgtgaggagaatgtgttggtgaacaaagggttgcagaaacagccgatttattttttgaaggaaaaagagtaggttgatgcgtatagggcttgcatggattgcgtcatgtaggcaaaatctgcctgcatgcttgcatgaggtctgcttgcatggcgcaatctgttgtaaattagtgcgctatgtcatttcatgcaagcatgtaagtaaaacatgcgataaaactacagttgtagattaggaatacctataatcggcagacgagaaattaaagaatgaaaacaacgcggcagaaggatagtttttattatttttgcaatcaattctcaatagttatttaaaaaatatggcaaagaaaaattcaacagctaaagatacggagctgtcactctcgttttttgggaaagtggcagcgttatttagaagtgaaactgttcatttcgttatcggcttggtactggtaatcttttcggtttatttgttgctcgccttttcgtcgttctttttcacgggagcggcagaccagagcatcattgacggaggcagtgcgcaggagctgatttccaccaataatggggtgaagaactacgccggtagccgcggtgcgcagttggccagctatctgataaatgattgtttcggcgtatcgtctttcttgattctcgtgttcctggctgtggcgggattgaagctgatgcgggtgcgtgtggtgcgcttgtggaagtggttcatcggctgttcgttgatgctggtgtggttctcggtatttttcggttttgtgtttgtagaccagtacaaggactctttcctctatctgggcggtatgcacggatacaatgtcagcaactggcttgtgtctcaagtcggtgtgccgggagtatggctgctattgttggtaactgccatctgcttcctcatctatctgagtgcaaggactgtcatctggttgcgcagattgttcagtctcagcttcttgaagcgtaaggagaaggcggaaagcgtgcagggtgaaacgccggaagagttcaagacctcttggggtgcaaaggaaaaggcggctgctccgacaccggaagctgcggagccggaaaaggttcttgaaaaggaggaggagattgctatagaggaagaagaggacgaaccgctgaatgaaatcacccttgacttgggtggaagtgatggaaagataaagcctgccaagtctgcggatgaggacgttaccatgacttttgagactcctgcaccggagccggtgcccccttttcgggaacagccggtagagaaggagccggcattccaggttgaaaaggccgaagaggaggagtatgtgggaacggagaaggagccgtacaatccccgtctggatttggaaaactatcattaccccacaatagacctgatgaagcattacgatgacaatggtccgaccattgacatggtagagcagaacgcgaacaaggataagattatcaatactctgcgtagtttcggtatagaaatcagtaccattaaggcgacggtaggtcctacggtgacgctgtatgaaatcactcccgagcagggcgtccgcatttcgaagatacgcggtctggaagatgatattgccctcagcctttcggcgctcggcatccgtatcatcgctcccattccgggaaagggtacgattggtatcgaagtgcccaactccaatccgaagattgtatccggtcagagtattatcggcagcaagaagttccaggagtctacttacgacttgcccatcgcactgggtaagacgattacgaatgaagtgtttatggtggatttgtgcaagatgccgcacgtgctcgttgccggtgctaccggtcagggtaagtccgtggggttgaatgccatcatcacctccttattatataagaagcatccggcagagctgaagtttgtgctggtagaccccaaaaaagtagaattcagcatctactccgtaattgagcatcacttcctcgcgaaattacccgacggggaagatgccatcattacggacgtcacgaaggtggtgcagactttgaactccatctgtgtggagatggatactcgctatgacttgctgaaagctgcccatgtgcgcaatatcaaggagtataacgagaagttcatcaaccgtcgtctgaatccggaaaaggggcataagttcatgccttatatcgtagtcgttatcgacgagttcggtgacttgattatgacagccggtaaggatgtggaactgcccatcgcacgtatcgcccagttggcgcgtgccgtgggtatacatatgattatcgctacacagcgaccgacaacaaacatcattacgggtacgattaaggccaacttcccggcgcgtatcgccttccgtgtatcggcaatggtcgattcgcgtaccatcctcgaccgtccgggagccaaccagctgataggccgcggtgatatgttattcctgcagggagctgacccggtgcgtgtgcagtgtgcctttatcgatacgcccgaagtggcggagattacgaagtttatcgcccgccagcagagttaccccactgctttctatctgcccgaatatgtggatgaaaatgcaggaggtgatttgggggatgtggatatgggacgtctcgatcctttgttcgaggatgcagcccgtctcgttgttattcaccagcagggttccacatcgctcattcagcgtaagtttgccatcggttataatcgtgccggccgcatcatggaccagttggagaaagcggggattgtgggaccggcgcaaggtagtaaggcgcgtgaggtgttctgtatagatgagagcgacctggaaatgcggttaaacaatttgcaataaggaatggttatttatagaatgatgaaatttgataagcttttacttggtgtgctattgctgttgtttgctgtgccgatgtcggcacaacaaccggatgccaagaatatattggagcgtacagccgaagcctttcggaaagcgggaggggtgaagctggcgtttaccgtgaacgaacaacaaggctcttatgcgggagttctctatctggaaggtgagaagtttgtggttgagaccgagggaatgaagacttggtttgacggacatacgcagtggagctatgtggcttcggcagatgaggtgaatgtatcggaacctacgcaggaggaattgcagactcttaatccgtatgcttggttgtccctctacaagcagggatacagattgaagttgagcagtgtcggtggtaagcaagacaagtctgtttattacatcaccatgactgctgccgacaagagaaaagaccctgaaagtgtctatctgtttgtgacaaaggatacgtatcgtctgcatcaagtggacttggcaccacgggggagtaagtatatgactactatccttattgatagctaccagacaggacaatcctatccggatagtttctttgtctttgacaaaaaagcctatcctacagctgaagtcatcgacatgcgctaaatagtaaattgtaaatagtcaaatagtaaataatataatgatggaaacagaaaaagtaaaatgtctgattatcggttcgggtcctgccggctatactgccgctatttatgcaggccgtgccaatctttcaccggtactttatgcaggattgcagcccggtggccagttgacaaccactactgatgtggagaatttccccggttatccccaaggtatcggaggtccggaattaatggaagacctgcggaagcaagccgaacgttttggcgcagatttgcgttatggagttgctaccgcagccaatcttgctgaagcaccttacaagattacgattgatgacgaaaagatgattgaggctgaaacgctgattattgctacaggtgccgctgcgaagtatctggggctggaggatgaaaagaaatatgcgggaatgggtgtcagcgcttgtgccacttgtgacggtttcttctaccgcaagaaaacggtagctgttgtagggggtggagatactgcctgcgaggaagctgtttaccttgccggactggctgccaaggtttatctgattgtccgcaaaccttatctccgcgcttccaagattatgcaggagcgtgtgatgaagcatgacaagattgaagtactgttcgaacataatgccgtaggcttgtttggagagaacggtgtggaaggtgtacatttggtacagcgtatgggtgaacctgatgagaagcgctatgatgtggctattgacggtttcttcctggctatcggccataaacccaactcagatattttcaaaccttatgtagatacggacgaagtaggttatatcgtcaccgagccgggaacaccgcgtacgaaagtgccgggcgtattcgccgccggagacgttgctgatcctcactatcgtcaagccatcaccgctgccggaactggttgccaggcagccattgaagcggaaagatatttgtctgcgaaaggactgatttagtgattagtgattaggggttaggatgacaacaatgtgtttttattatgctaacccctaatcgcttatcccttgtcacttattccttatcctatcttgctgattttcttcagcttttcttcgtctatgattttgattttacgcccgtcgatggtgattaaccgttctgtggcaaactgtgacaacgtacgtatggcgttggaagtggtcatgtttgacaaattggccagatcttcacgcgagagatagatactcaaggtggagccgtcttcctccaaaccataactttctttgaggaatagtagggattctgcgagtcttccgcggatatgtttctgcgtcaggtttacagtgcgttcatcggcaatgcccaagtcaacggacaattgcttgatgaagaacatggcaaggtcgttgttttgtgtgagcagagtcatcaaggcagtcatggggatttggcaaacaagagacggctcgaatgcagatgctgccgtgacatagtctgtttttgcaaagtaagggcggtaaccgaaatattcgacaggtttaatcatacggataatctggcttctaccaccgactccgtctttatagattttgacctttccactcagcagacacatcaaatgcgtaggtgtctcgccttcgcaatggatgacttcgttttttttgtagttctggagtgtgaagtggttggcgaggaattcccgctgttcgtcattcaagggagaccatatatctgcaatcaactccggaacattaatatcagacaagtttacttttaccataactgctgcaaaactgtgttatacagcacaaatgtaaaaagaaaaaattaaatattgcacaaatatgacaaaaagatgtcgtaggggggagataaaggaaaatctatatatttacgattagacgatttacgattgaagtttgtattgttaaacaactgctcattagcaggtgggtttatgattgtatgagtaactccaaccgtaaaccgtcaaatcgtaaatcgtagtaacttaattgtttatcgtagtatctctatccccctccctgcgggggaggggctagggagaggcctactttgtaaacagcagctccctatatttcggaagcggccagatttcatcatcaatttccatctcaaggtggtcgatgtggtcacggatactttccagataagggcgtacggtttcttcgtaagcgaaagccttgtctttgtagttatccatgtggttggctactttgcgggcttcggtcatttcgcgtacttgtaccttgatggctgttacgcgcttggaaatttcgcgtacaagctctttccggtcggcactgaggacttcgtattcttcgggagagaaggtctcgcgcaggccacggagattttccagcagacggttttggtagataacggcagtcggtacgatgtggttgatggcaaggtcgcccagcacacggctttctatctgtaccttcatggtgtatttctccagttctacttccaggcggcaggcaagctccgtttcgttgaagatacgttcgccgatgagtacggaacgggactggttatccatgtagtgcatcaaggcttcgggaacgtggcagatgttggtcagcccacggcgtgcagcttcctgcttccattgttcggagtagccgtcaccctcaaagcggataggctcggaggcgatgatggtctctttcataatgcggaagatggcttcatccttgccgaccccttcttccatcagtttgtcgatggatactttgaactcgttcagctgattggccatagccgcattgatggcaatcatggcggcagcgcagttggcagatgaacctgcggcacggaactcaaagcggttgccggtaaaggcgaatggagaagtacggttacggtcggtggtatccagtaatatttcgggaatacgtccgatgcctaatttcagtgttgtcttttcttccgatgtcatcttgctgctgcttatctggcgggctatctcgtcgaggatggaagacagctgtttgcccaggaagatggacagaatggcgggaggcgcttcattggctcccagacggtggctgtttccggcactcatgatggaggcgcgcagcaagttctggtttttgtataccatcatcagtacgtttaccaggaaggtaaggaacagcatgttccctttcggattcttgcccggtgcaaacaaattgatacccgtatcggtgcaaagcgaccagttgttgtgcttgccggagccgttcacgccgttgtagggtttttcgtgaagcagtacggcgaagtgatgcttgcgtgcgatgcgtttcatcagatccatcacaagctggttgtggtcgttggcaaggttggcattctcaaagataggcgccagctcaaactggttgggagctacttcgttatggcgggtcttgaccgggatacccagtttgtgacattcgatttccagttctttcataaaagctgtgacacgtggggggatggagccgaaatagtggtcctccagctgctggtctttggccgaggagtgtcccatcagggtacgtccggtcagacaaaggtccgggcgggcattgtacagtgccgagtcgacgaggaaatattcttgttcccagcctaaattggtataaacgcgtgtgatattcttgtcgaacaactggcatacgtctgtcgctgctttgtctacggctgccaaggctttgagcaatggagtcttgtagtcgagcgcttcgccggtataagagatgaagatagtggggatgcaaagtgtggtatctaccacaaaggcaggtgaggaaacatcccaagcagtatatcctcgtgcttcgaatgtgtttctgatacctccgttggggaaagaggatgcatccggttcctgctggatgagcagtttgccggaaaaacgttcaatcacttccgttccttctccgaattcgatgaagccgtcatgtttctcggctgttccgtccgtcagaggctggaaccagtgcgtgtagtgggtgacgttgagggactttgcccaacttttcatgccgttggcaatcaggtctgccatttcgcggttgatgggagtgcctttttcgatggcgtcggtcacggctttgtaggcttcacgaggcaggtattcctgcattttcttacggtcgaagacatggctgccgtagtagtcggacagtttgtttgaaggggtggtcacttcaagaggttgccgattggcaagttcttgcaaagcaaaaaatcgcatttttgacatataagtctctccttttattggttgttgggcgcaaaaatacatgttttttctgaactaccccctcttttttagggggtattctcgaaaatattagtgttttttgagaatagaccccctaaaaagtctgcttgttatggaaaaacgaccaaaagcttgcgtttgttacatgccatgattagtaatctttccgcatcacgattagtaatcttagtgcgtcgtgattagtaattttcatgtgtcacaattacgaatcattctgtacatgacacttgtggcaccctttttataacaattaatataggttcgtatttatctcgcacaaactatgtgtgcttgtgtattattgtctctcgcgcgtaacatatgttttataataaagggtgtcacaagtgtcattcccgcttctttatggaacatgtttttgcattacacaaattcttccgtatatttgtcccgattctataaggagaaattgcggttgaaacgtttgttgtttatatggatttggatttgcttcttgttttcttttgtacagaaggcaggggcggagcgtgtatcttatccggttgacaaacatgtgagttcggcagactccatcatggagaaagtcatcttctttgcccccctttatgaacgtattattgaaagttataaggctgagctttacataaagggctgggtgaatatccgtaagaagaatcatattctccgctacatcccttccatgttccggcccaagaaaggggtgcgggaatatatgatggaaacttatagcgatttgcattttactgctcccgacatctatgaccagaaggtaaaggcaagtgtcggtactgcttccgagttttgggaaatggacggacggctgccggaatattttcacatcaacatctattcttctaccttattatatgacaaactactctctcctttagcacccaatgccaaaaaatattatacctatcggattgatacggtgatgggggaacggcatgcccttcagtataaaatccgttttatgccaaaaagcaaaagctttcagctggtgggcggttatctgattgtgagtgataacgtgtggagtgtacgcgagatgcgtttttccggacgtaatgagatggtgcggttcaataatctggtgaagatgggtaatgtgggcgattcggacgaatttcttccgttgcagtatgatgtggatgcaacgtttcgttttttgggaaatgtggtagatggcacttatgaagctgtactcgattataagaacatcattcagaaaacttctggcagtgatatacggaggtcggtgaagaaaagtaaatatgacttgtccgattcatacacgttgcgtactgatacgaatgcttatctacgtgatactgcttactttaaaactttgcgtcccattcctttgactccgcatgaggagacactgtatcaggatttcttcttgcgtcgggatacgctcgcccggaaaaagaaaccggtgaataagaacttggagttttgggggcagattggagatgcattgatcagtcgctatacggtagaccttgataaattggggagtgtgcgctgttcaccactaatcaatccttttcttttgagctatagcggcaagcatggaatttcgtatcggcaggagttcaagtacaaccgtatttttaccggtgatcgcctgctgcgcatcgttccccggataggttataattttaaggaaaaagagttttactggagggtgaggtccgattttgattattggccccgtaagcgtgcagcattgcatctggagtttggtaacggtaaccggatttacagcagtgatgtgctggacgacctgaaagccatccccgacagtatttttgacttcaaccagatacacttggattatttcaaagatttgtatctgaatctgcgtcatagctgggaaatagtaaacggtctgtcgctggaagtgggtgtatccatgcacagacgtacggaagtgaaccgctcccggtttgaactgaactacccgagcatgccgcctaccaagtcggccacccgtgccggttccggaggttcatccttctttccgaattttgacccgaatatcctgaacaagttccgccatacctataatagttttgctccccgcgtccgcctcacctggactccgggacaatactattatatgaatggcgaccgtaaagtaaatcttcattccaagtatccttccatctcagtagattgggagcggggactcagtggagtgttgcagagcagtggttcgtacgagcgtgtagagattgatttgcagcatcaggtttctttgggcttgatgcgtgatatttattggcgttttggttggggagagtttaccaatcagaaggaactgtactttgtggactttgccaatttgcggcgttccaatcttcctatgggttggagtgatgatattggcggggtgttccagttgctggacggccgctggtataactcttcccgtaaatatatccgcggacaccttacctatgaagcgcctttcctcctgctccgccatctgatgaaatatacccaatatgtattgaatgaacgtctgtatctgaatgcattggtggttcctcacttgaaaccttatctggaagtagggtatggcattggtacacatatatttgactttggcttgtttgccagctttgcaaactggaagtatcaggaaataggttgcaaatttaccttcgaactgtttaacagatagcaatgtggtaatgtgattaatgtgccaatgtgtcaatgaccagggcgtgatggcgtagcataaacatagcgcagccaattagcatattggcacattatcacattaatcaattgtcaattattgattcttttgtaactttgctgcaaattgcttggagctatgggtatagtaataggaatagatgtgggtggaagtaccacgaaaatcgttggaatcaatggagaacagatacagtctccaatgtttattacggctaccgacccggtgacttccttattcggagcattcggtaagtatatttatgacaatggtatacagctggccgatgtggagcaggtgatgctgacgggagtgggaagcgcatttgtcaacagccctctatatggactgcctactcgcaaaacggatgagtttattgccaatggtttgggagccagacatgcaacggatatagaccaactgattgtagtcagcatgggtaccggcacttcttttgtgaaaatagacggagacaaggtgcagcatattggcggcttggggattggtggaggtaccttgcagggattatcgaggttgctgttgaaaactcatgatattcatcaggtgtccgagttggctgagaaaggggatgtaactcgtgtcaacttgcagataggtgatatttgcaacactgctttgcctgacttgccagtgagtgctaccgcctctcttttcgggaaagcagatagcaatgcttctcaagaagatattgcctgcggtataatttatacggtacttcaaaccattggaggagctgctgtactgtcagctttgaacagtcctatcaaggatttcgttctgataggaaatctcacccaactgccccagtgccgggaggtgttttctaaaatggaagccatctatcatgtacattttcatataccgccctatgctgaatatagaacagcaataggagcggcattggcatatataaaagaaaggcaagggtagtggttacttcttgcctgccttcttcatatagctgtttatcaaggtacatgcgggagcggccaccgtaccgtggtcaaatccctccatctgatagagggtggttttttgtcccaatgctttgaggagggcatataaatgggcgttttcctcatagcgtgccagcatctccaactctttgtcgccagtgataagtatcatgggtgaagcgtcttttcttacgttattggaaggagcatatttatctataatcggagtgtcggaaggcagtccgcgttctttgcggatggtataatgagtggtggtctgtccgctgatggggaaagcgcctgccaggctgttggcatcaatattccactttgccaggtaactcttgtccagattgagcatcagacagagataaccaccggctgaatgaccggctatgtatattttgtctttatctcctccgaattcttctatattctcgaaagtccaagcaacggcctctgcggcatcttccgtgtaggcaggattttgggcacgcgggctgagtcggtagtttacggctatcacggcgtagccttgctccaggaactccttcggaaaatgtttttctccggcttccagtcctccgccgtggaaccagataagggtggcaaatccttttttatcagtaggataatggaggtcgagcttgcaacgctccagcttataactgtctttttcgccgggatgaagataggaaatgttcttttgcgtacggtagttgttgtccgttgtctgattttggctataacataataatgtatagcaaatgatggaaatgcatgcgattatctttttcatgataaattattgagattatgtataaatgaaacgatgcaaaggtaacattttttttattctttaattgattattccactgctgttttgaatgctttttgttttgtagttcaagaaaatacttctatctttgcgcccgatttacaatgagtcaacataaagtctcacttaattaacgagttaaacaatttatttattaatggaaaatttaaagaatgtagctcctattgaagacttcaactgggatgcttatgagaacggcgaatcagtagccagtgcaagccacgaagaactggaaaaggcgtatgacaatacgttgaacaaggttaacgaccgcgaggtagttgatggaaccgtaatcgcaatgaacaagcgtgaagtagttgtgaacatcggttacaaatcagacggtatcattccgatgagtgaattccgttacaatcctgagctgaaggttggtgatactgttgaggtatacatcgaaaatcaggaagacaagaaaggacagctcgttctgtctcaccgtaaagctcgtgctacccgttcttgggatcgcgtaaacgcagctttggaaaacgaagaaattatcaagggttacatcaagtgccgcacaaagggtggtatgattgtagacgtattcggcatcgaagctttcttgccgggttctcaaatcgacgtgaagcctatccgcgactacgatgtattcgttggcaaaactatggaattcaaggttgttaagatcaaccaggaattcaagaatgtggttgtttcccacaaggctcttatcgaagccgaactggaacaacagaagaaggaaatcatcggtaaactcgaaaaaggacaagttctcgaaggtaccgttaagaatatcacttcctatggtgtatttatcgacttgggtggcgtagatggtttgattcacattacagacctttcttggggccgtgttagcgatccgaaagaagtggttgaactcgaccagaaactcaacgtcgttatccttgacttcgatgatgagaagaagcgtatcgctctcggcttgaagcaactcactccgcatccttgggatgcactggatgctaacctgaaggttggcgaccacgtgaagggtaaagttgtagttatggctgactacggtgcattcatcgaaatcgctccgggtgttgaaggtctgattcacgtatctgaaatgtcttggtcacagcacttgcgttctgcacaagacttcatgaaggtaggtgacgaagttgaggcagtagtcctgactttggaccgcgaagagcgtaagatgtctttgggtatcaagcagctgaagtctgatccttgggaaactatcgaagagaagtatcctatcggcagcaagcacactgcaaaagttcgcaacttcactaacttcggcgtattcgttgaaatcgaagaaggtgttgacggcttgattcacatctctgacctgtcttggacgaagaaggttaaacatccgtctgaattcactcagattggtgcagacatcgacgtacaagttctggaaatcgacaaggaaaaccgtcgcttgagccttggccacaagcaactcgaagaaaatccctgggatgtattcgaaactgtatttacagtaggttctgtacacgaaggtactatcatcgaaatgctggataagggtgctgtagttgctctgccttatggtgtagaaggcttcgctactccgaagcacctcgttaaggaagacggatcacaagctcagttggacgagaagcttgaattcaaggtaattgagttcaacaaggacgctaagcgtatcatcctttctcacagccgtatcttcgaagatgctgcaaaggcagaagaaagagctgaaaagaaggctgctactaagaagtcaaccggtaagagagaagacgttgctcctgctatccaaaaccaggctgcatctactactctgggtgacattgatgctttggctgccttgaaggaacagatggaagctggaaagaaataattactccgttctataaatgaaggaagggtacttgcgcaaacaagtgcccttcttttttatgatttgtcaatagaattttatggaattaaggatggtttttccataaatgtttatctttgcagggtggttacttttgcaatcatagaaatattcaataatttaattttcatttattatgaaaaacatgttcaaaaatgcagggaagatggtgttgttcacttgcctgtcgctgatgttactaaccgcatgcggccagaagtctaaactcaagctggctatcgcagcagccaacaaacaatgtcccatggatatgggagcttccggcgaaatatccagtattacttttgatgggtcggatgtggtatatgtactgcttatgaatgaaagtttcctcaatatagacgctttgaaagagaatcctgatgcaatgaagtctgctgtgactgttatgttcggtaatccacaagggtctattaaagagatgctggatttggttgtcggtactgattccggtataaagttcatatataaaggaaagacatccggtaacgaagtggaatgttatctgactactcaggacttgaaagatatattgaatggtggtggtgcatctgccgacagcagtgacgagaagaaactggaagagcaagtgaagatgaccaacgtatcgtgcccgatgcaggtggatgaagccactatgctcaataaactgacaatcgagtcggataaggtgctttatcattatacgattgacgaatctgtagtacagatgtctgctttgaaggaaaatgccgaacagatgaaggcaaatgtgaagaactctttgaactcctccgatccagccttgcgcatgttcttggaagtatgtgtgaagtgtgataaaggggtgggctatctgtataaagggaataaatccggagaaacttttgaaatatcttttggagtttcagagataaaggctcttctataaatcaaggagtagaaatcagttcggaaggtttggaatggaaaaatttgagttacatattcttggttgtggttccgctttacccacaacgcgtcatttccctacgtctcaaattgtgaacgtgcgcgacaagttgtttatgattgattgtggggaaggggcgcagttgcagttccgtaaatcacatctgaagttttcacgtttgaatcatatttttatctctcacttgcatggagaccattgttttggcttattaggactgatttctacacttaaccttttaggacgtacagcagagttgcatatccattctcccaaagggctggaaacattactgacacctatgctggatttttttaataggcagatgacgtacaaggtccttttccatgagtttgatacgaaagaaccgatgctgatttatgaagaccgttcgttgacggttactaccattcctttgcgtcatcgtatgccgtgttgtggttttttgtttgcagaaaagcggtgtcctaaccatattatccgtgaaatggtcgatttctaccaagtgccggtatacgaattgaatcgtataaagaatggggccgattacgtgacatcggagggaaaaactgtttccaacaacttgttgacccgcccttctgctccgtcccgcagttatgcctattgctcggataccatctatcttccttctatcgtggagcagataaaaggggttgatttactttttcatgaggcgacatttgcgaatgaggatgcgccacgtgccaaagaaacatttcatacaactgctgcacaagcggccgaaatagccaggagggctgaggtgaagaagttgttgataggacatttttcggcacgatacgaagatgaaaatgtcttgcttcaagaagcatccgctatttttccggatactcagcttgccaaagaaacactttgtgtatcggtatgaattaaacttttcgtatctttggcagtctaaaacaacaaatgcgaatagaaatttatgactccttcctataatgaacgcgaagtgttggctcttctacaagaagaaagcacacaaaagcggggatttgagatgattgttacccaatatagcgagcagttgtattggcagattcgtcgtatggtcctctctcatgaagatgccaatgatttacttcagaatactttcattaaagcatggattaatatagattatttcagggcagaggctaaactctctacctggctctatcgcatagccttgaatgaatgcctcacttttctgaacaaacaacgggctgcttccacagtctctttggatgaccccgaggcagatgcacttcaaaagcttgaaagtgatccttacttctccggtgataaagcagagatggctttgcaaaaagccttgcttgccttgccggaaaaacaacgtatggtgtttaatctgaagtattaccaggaaatgaaatacgaagagatgtccgatatatttggtacttccgtaggtgccttgaaggcttcctatcaccatgccgtgaagaaaatagaaaagtttttgggtgaggagtattaaacctttgccacaaaacaatgtctaattaaacagaaaggagaaagcttatgaaagaagaagataaaatacagaaaaagatagggacggaaaatcctttccgcgttcctgaaggctactttgagaatcttacttcagaggtaatgaaccggcttcccgaaaaagagaaactcattgctgtgcagacagagcctacaatgtggcagaaggtaaggccttggttgtatatgaccgccatgtttataggtgcggcattgattatccgtgtagcttcttcggagcatactccatctgtagagcgtatggctgctgatgatacggaaacagaaatggaatatattaatatggctgtagagaattccatgctggatgattattcattgtatgtttatttggcagactctgatgcagaataaggtaacaacactcaactatttaaaaatgaagaaactaattgttttattggttatgatatgtggcattatgcctctgctttgggctagcgatggatgtgaccagcatctgtcacctgaagagtttcgtgccaaacaaaaagcgtttataacggagaaagccggactgacgagtgaggaggcagccaagttcttcccattgtattttgaattgcaggaccggaaaaagcagctaaatgacgaggcttggaagttgcttcgacaagggaaagatgaaaaaacaaccgaagcccagtatgaggaaattatggaaggtgtatatgatgcccgtatcgcttctgaccggttggacaagacctactttgataagttcaagaaaatattgccttgtaaaaagatttatctggtgcaaagggctgaaatgcgtttccaccgtgaattactgaaaggcatgcataaaaagggggatgcttctccacgaaaaacacaaggaaaaagatgaatagtgaatgaatacaaataaggaaggttgccacaatgatgtgagcaaccttcttttgttaatgatagatacctcgctttagcctggctaaacctctactttagttccctaaacctttgctttagccagctaaacctgacctttagaagaatcatcttgtttgctttctttttccaatgctttcgcttcgttccatagcttatccatctcctccagcgtcatgtcatggaggtttttgccctccttgatgctgtgcgcttctacatagttgaagcggttgatgaacttctggttggtctgttccagcgcattgtccggattgattttgtagaggcgggcagcgttgatgaggctgaacatgacatcgccgaattcagcttcagccttttctttatccatgtgggcgacttcagcctggaattcttggatttcttcttttaccttatcccacacttgctcgcgttcctcccagtcgaatcctacattgcgtgccttgtcctggatgcggtaggccttgatgagcgagggtagggcagcgggtacaccgctcagcactgttttgttcccatctttttccttcaattttagctgttcccagttttcagaaacctggcctgcggtttcggcctttacatcgccgaagacatggggatggcggaaaataagtttctcacaaagacggtcgcatacgtctttcatatcgaaatcaccggtttcggagcctatctttgcataaaaagccacatgcagcagcacatcgcccagctctttgcagatgtcattcttgtcatcgcgtatcagggcgtcacaaagttcataagtctcttcgatggtattggggcgcaggctttcgttggtctgcttgcggtcccagggacatttctcgcgcagctcgtcgagtatgtcgaggaagcggccgaaggcttccatctgttcttttcttgtatgcatgattttgaaatttagtttttccattcttcgtatgagataagcaagcctattacttccgaatagttcttgcgtccgctttgaatcttgtttcctttaaggtacaagtcgtagataaagttctggatgtctccgatgagcggactgtatttctccatccagtattgctggttcttttgggccagttctatgatttcaggacgtatccggttgaaaagttctgcgtattcttcttcgctcatcagtcggcgggcattgcccagcacatgtgggagtacggagaaatacccactgaaacgaatctctttcacctgcgaacgggtgcagacctggtaagcgtagaagttggcttctgcctcgctggtgatgcctaaaaagtgtgccagctcgtgggcataagtagcaggatattgtggtggaagcaaatcgccgttcagcgtgaattcgcagaagaaaggtcccatgcttcccgtaacaccgaccatggaaatgaacggagtgaaaagcatggtcttcacgcgcggagaggagtggggagggcgatgtatccccagcgtatcgctgatttggttgtatccgtgtacgctttcccggcagaccaatggttcgtcaatggaggtgacatctgtataggaagcattcagcttgtctatatagttgtctacaaatgactgaaagatttcgggagtataggcagtataaggaatgtttgtcctgccatagaaatctttctgtgagtagttcagtccccatgccagatagaaccatgcatatatccacagcaagtattccatttcgttcagcagaatctgtttccacttcttcttctggatatagcgtgccctgatgggattgaagaggagcccgatgatgctgaggaaaatgaacaagtcgcctacggcaaaaggtatgagttttgaaaaggaggacaggatatgggaaattaccggatatacggactgtgcatacacttctcccaagcttggaatgagctgcgttgcccatacgacagacagtaatacaattaatatgatatatcggatttttagcttccccctcattttatatactgttttgtagggacaaaaatatatatttaaattttaattcattaattttgcgcccgttattcgcaataaattaattatagagatttaaaaacatggaattagcaagtaagtacaatcccgctgacgtggagggaaagtggtaccagtattggttggaccacaaattattcagttcgaaacccgatggtcgtgagccttacaccgtcgtcattccgcctccaaacgtcaccggtgtgttgcacatgggacacatgcttaataataccatacaagatattctggtacgccgtgcccgcatggaaggcaagaatgcctgctgggtgccgggaaccgaccatgcatccattgctaccgaggccaaggtggtgaacaaacttgccgcacaaggcatcaagaagacagaccttacccgcgacgagttcttgaagcatgcctgggaatggactgacgaacatggcggcatcatcttgaagcagctccgcaagctgggtgcttcttgcgattgggatcgtacagcttttactatggatgagaaacgcagtgaaagcgtgctcaaggtttttgttgacttgtataacaaaggtctgatttatcgtggtgtccgcatggtgaactgggaccctaaggcactgaccgcacttagtgacgaggaagtaatctacaaagaagagcacagcaagctgtactatctgaagtatatggtagaaggtgaccccgaaggacgttatgcagtggttgctaccacccgccctgaaaccatcatgggagatacagccatgtgcatcaatccgaatgaccccaagaatacctggttgaagggtaagaaggtgattgttccgttggtaggacgtgttattccggttatcgaggacgattacgtagatatagagttcggtaccggttgtctgaaggtaactcctgcccacgatgtgaacgactacatgctgggtgagaagtacaatctgccgagcatcgacatcttcaatgataacggaacgcttagtgaagctgccggcttgtatatcggtatggaccgtttcgatgtgcgcgagcagattgagaaggacctggctgctgccggtctgttggagaaagtggaagcctataccaacaaggtaggtttctccgaacgtaccaacgtgcccatcgaaccgaaactttccatgcagtggttcttgaagatgcagcactttgccgacatggctttgccgccggtgatgaatgatgagttgaagttctatcctgccaaatataagaatacgtacaagaactggttggaaaatatcaaggactggtgtatcagccgccagttatggtgggggcatcgcattcctgcttattttttgccggaaggtggttatgtagtggctgccactcccgaagaagccttggcattggcaaaagagaaaacgggtaatgcagaccttaaactggaagaccttcgtcaggatgaggactgcctggatacttggttctcctcctggttgtggcccatctctttgtttgacggtatcaacaatccgggtaacgaggagataaactactattatcctaccagcgacttggtgaccggtccggacattatcttcttctgggtagcccgtatgattatggcaggctatgaatatgaaggtaagatgccgttccagaatgtttattttacgggtattgtccgtgacaagctgggacgtaagatgtccaagtcgttgggtaattctcccgacccgctggatttgattgagaaatacggtgccgatggtgtacgtatgggcatgatgctttcagctcctgctggcaatgacatcctctttgacgatgcactgtgtgagcaaggacgtaacttcaataataagatatggaacgctttccgtctgattaaaggttgggaagtcagtgcggaagttccggtaccggaagcttcagaactggcaatacgctggtttgaggccaagcagaatgaagtggctgccgaagtggctgatttgttcagcaagtaccgtttgagtgaagcgctgatggctgtttacaaactgttctgggacgaattctcttcctggtatctggaaatgattaaaccggcatacggccagcccatcaaccggaaagtgtatgaagcaactatcggtttctttgataacttgttgcatctgctccatccgttcatgccatttattacagaggagttgtggcagcatctttgcgaccgtacagacggtgagagcttgatggtaagcccgttgtcaatgtcggcattggtagatgaggatatcatccgggagtttgaagtggtgaaagaggttatcagcaatatccgttccatccgtttgcagaagaacatcgcccaaaaagaggcacttgagttgcaggttatcggtgagaatccggttgtggcgttcaacgcggttgttacgaaaatgtgtaacctttcgtccatcaatgtggtggagaacaaggccgacggtgctgcttccttcatggtcggtactacggaatatgccgtacctttgggtaacatgattgacgtggaagccgagatagcccgtatggaggccgaactgaagcataaggaaggattcttgcagggtgtgctgaagaaactgggtaacgagaagtttgtgaataatgctcctgccgccgttcttgagatggaacgcaagaagcaggcagatgctgaaagtatcatcaaatctctcaaggaaagtattgcagcattgaaaaaggcataactgtccgtcacataaaaacagagaaaaagctccggaaccttcaactccggagctttttttagcggtataatgaactgtttatttgaacagttctgctacacaccacattaggcgtgcggtggtgtgtgtccagatttccttgtaagtgcagttattttgcatcgggaagtagggttcgtcctcattttcgaatgtttcgattcctacgggtacagctcccaccacatctccggcataggctccgtaaagtggcgggtagtcatatccgtctccataaacggtactcatggcaaacgggttgtagcccaatatatactctatctggcgggttgcaatatcccttaacgctttatcattgaataggcgtgcaaggataaaggcagccttggctttgcccatgacaacagcgtggaatcccctgaactggtaggcaacggggaaacggcgcaggtagaaattctttgagagagggataccgttgcgcacttgtgcattgtattcttccagactgggaagccctacctgctcgccttcatggtacagattcttataatcggtattatccacctcgtatacggcgcttggcagtatgccatacggctcaatcagttgtgaaaccccgcgtagatagtctgcataggcttcacaagatgcctgccacaacggggcgtccagatgggtgggggcatctgtcagtagcatcgagagtccttcggccatcaagtgctcttggctttggtgataataggccagaatacgctttttccgggaagattcatagaagaaacctcgcagggggattttccagtcggtacgcttttccaactgttggcccgccatgacggtacgtgccagccgggttgcccagtccagatagtaaacatcttgtgtaaggcggtacaaacgcatggctgtgacggtggcaagggcataaagttcggtttcgttctgttccgtcctttgtgtatccagcaggtcgatggcgaattggaaatcctcaatggcactgttccggcaccaccgtgcaaataccgggtctttcttttcaaaatgaggggcggcgagtgcgcaactggaagcggctttcagattgtccgtaggtgtatttcgtgcttctgtctgcatgtcgtctttgtcaccacggatattctttgtccaaatgccgataatcagtccgcccagtcggtagccgtcaccgaagcgggtacgcagaatccagttcactccccagcgtgcctcttccagcaggcgttcgtagaagatactgtctttgccttgtacggcaccggccatttcgaggagggcgatgcatgattcggctgtatttcccgttccttgagtcaggtcggctgcatcgtgccatcctccggcaatactcatgctccgtccgtcgggatgataggcgaatacatcctgatggcattcctgatgaatgccgggctggtcgaaaccgcaacgttcggaaaagaagaagttcagcgtgtgccaggcggtagacaggtaggcatcatttccgatggggaaaggctttgattgtacatcaccgatggagaggaagtattgtccgggcgtattgaaactgctgaagtccagtacaagaaatcctttgtccagcttcttgtcctgattcagaggactggccttaccttgataaacggtttgtcccgtggcggcatcgtgtaggctgaaagtcctttccggtacgtgctgcaccaaagcctgcttgcgtgctcccggcttgtatccgctgtggcagtaggccattgcatcttttcgcaggtcgaatccccggctgttttccgcttctaccttttcgatgcgcatgtcgtctatgtataggctcatgcattcgctggctcctgcaggagcacctgccagcatgatgtttaccgaaaagccggtgacacagtcacggtataggtccggtatctcccatatgatgtgctgccatttgttgggatagacagtctcgaagtgttgtccttcaaagcgtccgggagtcggcatgattttctccccttcattgtatagggtgaatccggcaaaggtcagataaacgcccggtgcatccacatatacccaaacggaaaagcggttgtattcccgcaagtcttcccggtcgaggggacggataatctccggggtggcgtaattccggtttgttggattcttcttgcccaaggaggcaggagtgtccagacggacacttcctttgcctgagacagtgactttacggtctacatgtatggttccgggtccggtatggcgcagagcaccgaaatcttcggccagagggagtaccctgcttttcaatacctctttcttttcccaccgcgtcagtccggcgtgtgcgggattagctttcattatgcggtgcacatgattgctttgctgtaattgtttctccagttccgtatcgggtttccacggagcttgtgcttgtgcctgcatgcagcagcatgccagcagtagtgttcggatgatgtatttcatggtattcagtgtttggttttagggtaagcatgaaaaggagccttgaactccggacgtaatgtataagtatccttcagtgggaaatctgcgggaacttcttgggtgacggcgccggtggcagcccattcgcatccccggagtaaagtcacttggaaaccggtgcagcgcatggagtaagtcatgttcgggtcgttgccgcagtgccccaggaggtcgacgaatatgcgccctttcccgtagcttactgtccacatcaacggttcatgccgtccgcgttcgtaggcggttgccaatatttccatgtttcttaccggaccgcgtaggcgggtatatatctcgtccttgaagtgtttccattgaggaggcaatccttgcaggataggatgatggggggcgcggtgttctatgacggtttcgtgctgcaagccgtggtagccggcataccccggagagtagtcgtagacgtattgtccgtctttccagtacagatacggaccgtccttttcgtttcgtccgtcccatgcccccatgcctattatctcgttgtattctttccagtcggccatcgggacgacggaagaatgtatcactaccacaccgcctccatcggcaacgtatttctcgaaattcttgcgtacgggctctgtccatgtagctccgccgtagttgatgacgattaaatcatattggtggaaatcgggtttgaaggtagcgatgtctccaccaaagtcgggtgtaaaggcgaagtccactttgaacattccgctgttttccaatatctgcttcatggcttcgcaggcgccttgccagtaatggctgccgtcctgcccggctatcatcatggttttgattactttcttttgctgtgcgtgtgtgtgcgaggcagctcctatataaataaggagtaccaggataagtgtcagtcttgttttcattttccggaagatttaaagtttttgccagtagggttccattctatacggtcgtagcagcgtgtggtgcgcagattgtaaccttgttcgtctacgctgaactttccgtctttgaagtaggatatgtagagctcggagatgccgtccttgttgcggtcttctacaaggagattgtacttgtcggtgacataaatctcgtcggaaatgtattgtatttctttggtatagttgtctacgattgcatagtaggccttgaaaaggtcgaaagtggggtagtgcccgttgtcacgtccgaaaagcattacttcttcaagggcatcgtccccgtccatattggcaaatacggattgctgaaaggaaaatcccggtttttgtacttgtggagggatattgtcccatccttcctgatgggctgtcactgaaaattgcgcttgtgcatggatgacgtacaccagcgccgacaataggataatcagttttctcattgcgtgcattttgaggttatgataataatagggttacttcttgcttatatgaccggtggcccggagttttccctaactttttttagaataattaatgaatacgggatgtatagggacttagtgcctctcccatcaggactgaaccggtctgacccgtatactgagaggtcataacatccgcatcctttccattaaaacacccggatgtttttgggtaatacacccggatgtttttgggtaatacatccgggtgttttgggtgaaaacatccccatgtattggggtaaaacattcggatgttttgacctctcagtcctatactctttagggctaagtcccggtgtgtagccggcacggtataggggacgttctgcttgtgtatggtcttaatgcgaggtgagcaggtgcatcaatatcagtggcagataatctttcagcttgacccttaatatcttcaaagcctgctgaatgcggtagtctaccgttttgggggaaacgttgagtagttcggcagcttccttgtaactcagattctggaaacgatgcatgatgaaagcttccctataagtaggcggcagttcgttgatggccctttgtatatgcttgcttaattcgttgatttgatagatatccacctcctgcagcatggcgaacattcgttcatagtaagcggtgtctgcccgttgcttcacttcattttgggcaatccgggtcatgcaacgatggtagacagccttgaacagatattgcttgagcgaatattcgataacgggtctttcgcggttttcccaaagccatagcatgacgtcctgaacaatctcttctgcatcttccaaccggacaaaacgatagcagtaggtgcagagcacagaatagtacttttgaaataacacatcaaaagcacttctatctcctttttgtatggcggataataaagatgtatcttctaatggtatgtttctcatagggtgggggttcattattgttgggcaaaaatagctttttttcctattataatctaagtatataaaatatttttagttttttgtttaggagttcttttcacccgtttgtctttagattaaagctagcaataaaaattatggtaaaaagagagggaatggagaacctgcttctcaggtattatgaaggagagacaacggaggatgaaactgctctggtagaggagtggctggaagcatcggaagagaaccgcaggacagcccgccaggttcagacactcggtcttgcggcggacatggcgcagatttcatccaggctggatgtaaagaaggccttggaggatgtacatcgtaagatgaaacagaaaaaggtcaataggtatcaggtattatttagagggatgcaacgggcggccgccattttattcatccctttgatggtatcgtggtctatcctttattgggacaaggataaagaagagatacatatgatggaagtcaggacaaatccgggaatgactacttctgtcgaattgccggatggaacggaagtcgttctgaactcgtcgtcgtcgttgcgctatccttcccggtttgccgatgataaaagggaagtgaagttggtgggtgaagcattcttttctgtcgcaaaagatgaaaagaagttcattgtcggcacgctgaacaattccaagatagtggtacatggaacggagttcaacgtagaggcttacaaagggagcaggacggtacagaccactttggtttcgggtaaagtcagtttctcctatgtgaataacggcaggaggaataatgtaatgatgatgccggggcaaaaggccatttatgatatagtgcgggaaaaggtcgttgtgaaagaagtcaatgtagacgtggaaacatgttggaaggacggacgcttgattttcaggaacactccgtttgaagatatattgaagagtttgagcaaaagatataatgtggaattcattctgaaaaaggtttcattgaagcagaattcctttacggctacatttaccaaacaacgtttggagcgaatattggagcacttccgaatatcctcgaatattcatttcaagtttgttgaagatggtgatatggatgccgagagacaggtaatagaagtttattaaccctttaaaaagtagtatgatgaaacacaagtccgtttagaaaaacatgcaggaaaatgttggcgcattttcctgcatgaaacacagtaacttttaaatatctgtttggcgacagataaagtaactttattttttcactagaaatcaatacaaaattatgaaaaaacactattgtatccaatcatttagggcaaaaagtgtcctgatgagatgcatgaaaaaaattcctcttgctatgagatgcacattatttatgttgttttgtttggttggtatgacttttgccaatgaaggttatgctcaaaagacaatggtaaacattgctcttgagaacaagactgttgatgaagtactgacggagctggaacaaggtaccgaatttgttttcttctacaacaacaagcagattgacgttaagcgccgtgtatcggtccgggcaaataacaaaaccatattcaaggttctgaacgatgtattcaaaggaaccaatataggctataaggtattggaccgtaatataatcctttatgataaagctgtaggagctgatggggtacagatggctttgcaggctgcgacggtgaaaggttctgtggtcgatgcaaccggtgaaccggtgattggtgccagtatcttggtgcagggaactaccaacggtgtcataacagacattgacggtaatttcattctgaccaatgtgggctctgatgctactcttataataagctatgtaggttataagacacaaaacataaaggttgcaggccgaaattcgttcaagatagttttggtagaagatgctgagatattggatgaagtggttgttgtaggatatggtgtacagaagaaagaatcactgaccggtgccattgcagccattggtgctgatgaaatagctacgaccaagaccgagaatctgattagcaatattcaaggtaagatgccgggactattgattcgtcagaaaaccggagagccgggaactttcgacaatatggtgagcattcgcggttatggtgacccgttggtggtaattgatggtatcacacgtgaaggtactgaagaacttgcacagctgaattctgaggatatagaaagtatctctattttgaaagatgcttctgccgctatttatggtatgaatgcggctaatggcgtaatcattgttactaccaaaaaaggtgtggccgaaaagaccagagtatcttactcggcattgttcggtatgaagaatgccacgggtatggaagaaacggtagatgcttatacttatcgcatgttggccaatgaaagggcacgtaatgaccaggctgcccctgaatacactgacgatattctggaactgtatagaaccggggctaagggttatacagacaataactggattgacatgtttatgaataaactggcgttccagcaatcgcatactgtttctgtgagaggcggaacggataaggtgaaatattatgtgagcttcggctataatggcgataatggtttgctgaagagtggtatccaatactatcatagatataatctgagaagtaacctgactgcagagcttacgaaagggctgaaactgaatgtgaatctgtccgggcgttgggatgaaacccaaaggccgagagaggattttatgtggacttttaagactttgatggttaatgaccgtggtatcggtactcatacgattaataatcccaatcatttgtctgcaatcggtcctgaaaacaagaatccttttgcgttggttgatccggatatagacggttatcgcaagaacagaggcctgacgtattctgccgatgtggaattgaattggcaagttccttttgtaaaagggttggcattgagtcttttggggtcatttgacggtaacaatcgtaacaactcttctttaaatcgttcttatccgttgtatgattattatacagatgcgcctgccggtacgggaggtagtactgatgcttattccaatacgatgagaatatatcagaagatttatggcaggttgcaggctaattatatgcgttctttcaatcagcacaatttgaatgtgacagctgtggcagagttgaacagtacacgacgcgatgaattatccggttcccggcaatattcagagttgtttactaatgatattttgaatcaggcaagtccgggtacagctaccaattcagggtatcgtagttttggccgtttggcagcctatctgatgcgtgcgaactatgattatgccggtaaatacttgttggaagtagtagggcgttatgatggttcttatcgttatgctccttctaagcgttggacgttcttcccgtcggtaagtgccggatggcgactttcggaagaaagtttcatcaaggacaatttgccgtttattactaatttgaaaatcaggggttcttttggacaaagtggatatgatgccggtgatcctttccaatatgtatctgcttataattcggcttctaatggttatgtttttgatggtgccagccagattatgggtatggtagctcctggtgtagtgactgaccggctttcttgggttacatcttctatttccaatgtaggtctggattttgacttatggaacggtaagttgagtggtactatcgagtggttcaatcgtaagaatgaaggcattttggccgaccgtgcacaatctgctcctgatacatttggtgcaagtttcccgaaggaaaatctgaattctaaccggaaccggggttttgagattgaattgggacacagaggacaaatcggtaaggacttctcatattcagtaagtgctaattttacgtatgcccgtgaaagaagtctgcatgtggaacatgcagaatataccagttctatggatagatggctgaatggaaaggaaaaccgtaacagtaatgtgatgtggttgtataaatacgatggccaatatacttctttggaacagtatgaaacggctcctttgattggtgggaacttgggtaactctaagatgcttccgggtagttacagattgcttgacctgaatggtgatggtagaattaacagcagtgaccgtgttccggagttttgggcaaccggtgcaaatcctcctatccagtatgggttgactttggcggcttcttataagaattttgatctcaatatgctgtttcaaggagcttccggttattccatcggatatgccaatgatgatgtttggggatatggtggcaagacaaataaatcttatttaattgcgaaatatgtagatcgttggcatcctgcaaatataacagatgatccgtataatcctgccacacaatgggtagccggctattatccggcattacgccacaatttctccaatacttcggataatggtagtagatggaattatggtatttccgtttggcttccgcaagctacttatctccgtttgaagagtatggagatcggttacaatctgccaaaatcatttatgaaaagaatcgggttgaacagtgcccgtatctttgtcaatggttcaaatctgcttacgttctgtaacaaggctttgaaggatgctgaccccgaacgtgaggaaagggattggggagccaacctggcatatccgttgatgagaacttataactttgggttaaacataaacttttaattctgaaataccatgaaaaaaaatattttatcgatattctcgttatgtgcattgatgggattgtccggttgtaatgccttcttggaacttgaaccgctagataaagtgtctcccgatcagttattggagacagaaggtggtgtaaaggcactattggcaaacatatataccatgattcctatggaagattttaattatcgtccgaacgctggttttaatcaacgcggttatgatggtgtgaatgaaactactaatttagcatttcttaccgacgaagctacccgtagtgacggaggagtggatataggttacgaaggattcaattattggccctatggagatattcgtcaggtgaatatttttatgcagaatgtagaaaaagccaaagaagcaggaacaatttctgttgcagatgcggatcgtatgactggtgaagcccattttgcacgtgcttatatgtattatgggcttgtaaaaagatatggaggcgttcctctgattgacaaagtgcaggacgatgattatgccgatggtggaccgggcgctgtggcagttccccgcagtacagagttggatacttggaaatttgtattgaatgagtgcacccttgctgctgctactttgcccgatgcgacttctggttcggatttgtatcgcgtaaccaagtgggcagcttatgcgttgaagtcaagagttgcacttcatgcagcttctgtagccaagtattggaatctggcacctttggctggtgaggctgtcactcagaaactggtgggtggaatgacttctgccgatgccgatgcattctataaagaatgtattgaagcatctaagttccttatagagaattccggtaaatctctttataagcctgctccggctactgttaaggaggctgcatcaaacttccaggccttgttcctgaatgaccagaatgaagaggtcattttcagtaaagcgtatcttaatggaacaaccaatactaatcagggacatagctatgctcagtttaatatccttcctcaagtcaatccgggcgctctgaaatatggacgtttcaatccgatgttggaaatcgttgatttgtttgaagattatacggatgacggcacgggaaaaagtgcaaagattgtaactcgtacggatgggaatgaagatgcttatatccctaatttccataatatgaataatgcttctgtagtgaacaccttgatgtcagtaccttttgttaaatataacgatttgtatgaaccgtttgccaacaaggatgcacgtctgttggcaagtgtggttgtgccgggttcatcttatgccggcactgagattattatccagggcggatttattaaggacaataatagctatgtggcttattcaaacgagtctactcagaaaaatggaacaacatattatgctttaggagccgaaggtgaaaccatgttctctggatttaataatgtgaacagtggtgaggatgctaattggactgctacaggttttggagttcgtaagtatatgcccgagggcgagagcatgtctcccgaccgtctttcgtccactacctcttatattgatatgcgtttggcagaagtctacctgaattatgctgaggctgttgtggaaaatggtagtggatttggcgataaggaattggctgagaactatttgaatgctttgcgacgtagagccggacacaccgaccggatatctttgacattggagaatgtcctgaaggaacgtcgtgtggagatggcgtttgaaggaaagcgtttttgggatatgaatcgtcgtagggaattccatactgagttcagcaataatagaattcgtaaagctttggtgccgatgcttgacttgcgtggtgcagagcctaaatatgtctttgcaagggtgaactactttggtgacgaaacaagaggagggcgtactttccagaacatcaactactataggggcatacctaatattgccacgaatggtttagttcagaatccaggtcattaatttgaataatattaagtagaaagttatgaaaaagatattgttatttgtgtcatgcttcttatttgcattgacatcttgtgaaattgataattatgagggaccggatgcttccatacatggttctatccttgacgaacagacaggtgaacttgtaggttctgatatggaaaacggtaatgcaattaaagtgagggagcatggatttactaatgctacggatcaaacctggtatatcacaaataccggagaatatcgtaacaatatggtttttgctgccacttatgatgttcgttttgaaaatgggaatttttatccatttgaagtgaaggattttgttgttaagtcaggggataatgtgtatgatttcaaggttattccttatattcgcgtcaaaagtccaaaagtagaaaagaatggcaatgtaattactgctacattctcgttggaagctggtaaacaagaagtgaaattgaaagagattcagttgtttgctttttcagatatgtgggtaggtaacaatgtgaaattgacgttgaatggagggactgataagcaagtgtttagtccgagtactgctataaatagcgctgatatttatacattgtccatcgatctgggacaaaatgctgatgtcttgaaatacagcaagaattattatttccgtattggcgctctggctgatgtttcgggtgtgggcactgtacggcataattatgcgccggtagtagttataaaattgtaatttatagcagagggagacgttctgcttgacggcagaacgtctttttttatccatacattaaaaataagaccatgaagaaattgaacacgattattttaattttgctggggatgatatgtactcagttgtatgctgtacaattgaattcgatttatcctctaaaacccaatgactccgaagctttttatttcactcccgagaactatcctataaaggcggatggaaagatggatgtatcggatgctttgcaggcagcgattaatcaagtgaagaaagaaaagaatttcggaatcctttttatccctgaaggtaaatataaaatcagcaagaccatttatattcctacggctattcgtttgattggctatggaaagaatcgcccggaatttattctggctaagaattctccgggttttcaagaggaagtagctgatgataaaggaaaagctaaatacatgttctggtttacgggagccgttgtcaaggaaggtgagaaaccccgtgatgccggtgccagtacgttctacagtgccatgtcgaatatcaacttgcgcatagaagatggtaatccgcatgcagtggcgctacgcacacactttgcccaacacagttttatcagttatgtggccgtatacataggtaaaggcaaggctggtctgttcgatgtgggcaatgagttggaaaacgttgctttttacgggggagattatggcatttatacgacaaaagcctctcccggatggccggtaatgatggtcgactcttattttgagggacaacgtgtagctgctcttcgttgtcaggagtccggtttggcaatggtgaatctgtatgccaagaatgttccggctgtatttgatattgaccctaattattgcgacaagttatttttggaaaacagctattttgaaaatgtaagtggtccggcagtggtgattaccaacgagaacaacagcaacaatcagataacctttcgcaatgtatattgtaagaatgtaccgaccttggcgaaatatacccgtagcaatacggccacccatgttgctcataaaatctataaggtaaagtcatacgaccacggcttgcagatggataacatggtggatatgccggaatatgaaacgttggttgatattgaaccgatacagaagatgccggttgcccaactgatggacatccctgcactgcctgcaatggcaacatgggtgaatctgcgcgaattcggtgcaaagggagatggggaaacggatgatacgaaggccatccaggaggctattgacaagtacgataatatctatgtgccccagggctggtatcgcattaccgaaactttgaagatgaagcccgataccaagttgataggcctgcatccttttggcactcagttccggctggacgaaagtactgctgcattcagtggttttggcggtccgaaagcgatggtagaatcttcggaaggcggtgcaaatatgctggtgggcattggtatcaataccggcggttataactatcgtgctgtaggtgtgaagtggatggcaaatgcagattcttatatgaatgacgtgaagtttgtaggcgggcatggcggtttatggaaacctaaaccgggtgttgaggaaccacgtggccggtggaacagaccggctcgtatcagttctcccgataatccggtagcggcttcgggcatggatcttgcttgggacaaccagtattggagtctgtgggtgaccaacaacggtggtggcacctttaaagatatctggacagcaagcacatatgccaccaatggtttctatgccaacaatacttctactccggggcgtatctatgccatgtccatcgagcatcatgtaagaaatgaagtacgtttcagcaaggtgtccaactggaaggtgtattgcatgcaaaccgaggaagagagccgcgaaagtaccgattgccaaccgatagagatggacgactgcaaagatgtgacctttgcaaacttgtatatgttccgcgttatccgtgtcaatgaaccgtatcacagttctgtacgtatccgcaattgcgagaacatcgcatttctgaacctgcataactattctcagattaaatatacgaataacattgcagtgttcgatgtcaacaaagacattgacatccgcccgtgggaactttctcgcttgattgtaaccggaaaagaacctcatcagcaatcgttaggcaatgaaataggtaaggtgaaccaattggcttccgatttggaatttgccgaaggcattgcgcgcgacagtaaaggtaacatttacttctgcgaccatcggatgcgtcgtatctttaagtggtcggtagagacaaacagcttgtcgctgctggcagatttcccgtggaaaccctccaacctggcttttgattcagaagataatctattggtattgttcagatatgatgcgcagccgggatatctgattaatggtaagccggaggaaatgccggtaatgcctgatacaaaaggtacttctttcagcggatatggtaattccgcatatacaatgagagtctactccattgacccggaaaatccggaagagaccatcaaactgttgccgcgtgttccgatgggtcaagtgaagaacgtgtataaggctctttatccttctaaccgttggagagacttccacgatttcaatgcggtgtcggtctatgttcctgaaatgtgcttcctggcaccggatggaaaaaccatcattcctcattatttcgacttgtcacgtagttcttccctgctggaagcctatccgggaaagcctttctatacctctgatgaatatgaccgcagaatggtgaagatggatgtggccaatgacggcacgctctccaacttgagctattttgtggagcagggcgaatttggttcagcggtagataaggaaggaaacctctatatagcggatggggaaatttatatttttgataaggatggcaagaagaaagggatgattcgtgttcccgaacgtccgtccacattacagtttggcggtaaggatggcaatacattgtttgtcacaggccgttccaagttctttggtgtacgtattaaataaggaaaatccatattaaaacaaactgtgtaatgagaaattatcaaataatgagatacctgctgatagtctgttggattatcggtaatatgccgtccgggtgggcggcagagggtggttccacctatacgcaaagaccggacgatccggaagcattctactttaccccggagaattacggcttcaaggctgatggaaagtccgacgtgaccgatgcacttcaagaggcaatcaatcaggtgaagcgcgaaaagaactttgggatactgtttctgccggaaggaaattatcgcattagcaagacgattcaaattccctcatccattcggctgattggttatgggaagaaacggccggtgatttatttgggagccgatacacccggtttccagactactcaaaattatatgatatggtttacgggagggctggcacaagagggcaggaagccttcggatgccggtgcaggtactttctatagtgcggtgtccaatgtagatttccgtatagacaaaggtaatcctcaagccgtcgccattcgtgcgcattttgcccagcatggatttatcaatcattgcgacattcggattggttcggggaaagccggcatgtatgatgttggcaatgaactggaagacgtcaggttctatggcggtgaatatgggataatttcctccaggacttctccgggatggcctatgatgatggtcgatacttactttgaggggcagagaaaggcggctgtctattcaaaagaggtggggtttgccatcgtcaatatgcatgtgaagaatacgcccgttgcctttgaaatggcagagaatctggcagaccgccttcatgtggagaattcgttgtgggagaatatttcggaagccggtgtcagggtaagcgtagagggaaatactttttcgcaattgaatctggtgaatgtggattgcaggaatgttcccgtactggtgggctatgctcaaagtggaaagaaagttgccggaaaagcaaaaatgtacagagtcaaggagtttacttacggtctggtgtatcaggatttgaatgatgcttcttctttcagggaaatatgtgaaatagagccggtggcaaaactgccggttacacttggcaaggaccttccggttcttccggcaatggagacatgggtcaatatccgagacttaggggcaaaaggtgatggcaagactgatgatacggaagtttttgagaaagctgtctctttgcataaaaacatctatgtgccccagggttggtatcgcctgacgagaacgttgaagctgtctcccggtactaagctgattgggctgcatccttttgggactcaatttctgttgaaggaaagcgagcctgcattcagtggtttcggcgtgcctgtgcctttggttgaatcttccgaaggtggcgacgacatgctgaatggcataggtattaataccggtgcgtataattaccgtgctgtcggctgtaaatggatggcgggtgagcgctcgtacttgaatgatgtgaagtttgtaggtgggcacggtaccttgcgcaaacctgctccgaatacttccggacagtcgtcttaccgcaggggcgagcgtcggattagttccccgtcttctccggtcatggaaaccggtaaggatatggcttgggacaaccagtattggagtttgtggattacaaacaatggcggcgggacaattaaggatgtttggacagctagtacgtatgctgccagtgggctttatattagcgaaacgaagactccgggacgtatttatgccatgtctttggagcatcatgtccgtactgaagcccgtttccataatgtggccaactggaaaatttatgctttccagtttgaggaagaaggtcgtgaagggcctgattgttatatggcagaaatgtccaactgtcaaaatatcgaaatggtaaatgtgtggatgtatcgcgtaatccgtgcctttatgccgaagaggataggtttccgcatatgggattgcaagaatatcactttccgtaatatgcacaattatacgcagatattgccagtcatagagtttcctatatatgatatgaataagaagttgcccgtttattcgtgggactttgcccgtctcactgtttcgggtagcgagaagaaccttcgcccttcctgcacggtcatggacaagcctgtgaagctggctaccggttttgaactggcctccggagctactaccgacagtaaaggaaatatctacttctgtgaaaaccgtctgaagaaaatctatagatggtcggcagacacggagcagattactttgatagccgattatccctggaagccttttacattggctactgatacgcaagacaatctactggttattttccgctatgaccctcagccgggttatctggtgaacggcaagcaggaaacggtagtgcgcttgccggatgataatccgatgtacagtggttggggtaacagtggctggagtgcttgggggtattcttttaatccggataacgtggatgctacgatgaagcctatgccacgtgtcgttacagccggtatgaagaatatacagaaagtcattcacccttccagtcgctggagaagtgactttgacaaggtggttgccagtatgcctgagtatagttttgtcgctccggatggcgtgacaattattccggatacctatgatttggggcgttcttgtgctttgactgttacagtgcccggtcagtcagaaccggtttatattgtaaatgagatgaataaaacgacagtacaactttctgttggtgtggatggccgtttgacagaacaaggaataatatgtccttatggccaatacagtaatgtgactgatgctgacgggaatgtttatgttgctgatggtgaaatatttgtctatgacaaatctggtaaagagcagagacgtattcagatagaagaacgcccgatttccttggcaattggtggaaggcagaaggatatgctttttgttaccacctcaagttctttctatggaattaagatacgttaggtattgtataggtaaaaaagaattagcccctgcggtcgttttatatcgcaggggctaatttattataagaaggtctcttttccttataggttgattgtttggaatattatttttccagcagctctttcagaaaagaatccagttcctcatccaatcctttcagtagctcttcattgaccaatagagtatcatcatccatcagcaacagttctgctattgtttctctatcatcatccaccagtacaaaagagaatggtttcagaatagtcagcttgtcgaactttccttcatttttcatgttgcagagcagtgaggacaagatacgctctacattttcgtagaaatcatccccctcgtatgtcatccattcttcaatggaagtattggcaagctcttcatcttcatcatcaaagatagacagttcgcccgaattctgattcggttgcagatgaatgtctgtaacgatagtctgttcgcaaccgcaggtgtatttgccgattgcttttttaagagtgtcctccaagagtgctaatgacgattgactgagcttcataataactttcttttcttaatggttgttcaaaggtataaaaaaaacggttatctctgcatcatttgactaaaaatcatcatcaaatctgttcatttgcatgttcaggcgtgccattccctcttttcgtttctccaattcgtctacatacatgctgataaagatataataggagatggttccattatgtatttcgcctgtctcttttttgtctgtcttgcttttctcacgggcaagggtttgcgcttttaatgcccattccaaggcagtatctatgctgtcttgcatttcgtagcccaaagcggtgttataggctgcatacattttctgttttcctttttttgtttcgtaggtctgcttccagagctctactgctttactccaattttcttctttggcatatacggctgcgtcacgcatatttacagaaccaccactgaagagatagcggttactggttttccaataggggagtagatgtcttaccggaaccgttcctgcaaattcagatgcttgcttcaccatgtcttcttcgctgatgaggcgggaacgtactgacgcttcaccatttcctgcctcttcccagaaaatactgtcattgctgttgacggtcaccataggacctttgcggttaggtaaatatattctgacggtaggatatacctttacatccactgtgccgaggaacacaccccagtcgggcatataacttatcttgcgattggaacgcatttgtatgttttccagggctatcaggaaatctacgtccaaattctgtgtaagttccagtacttcatctctcgataatgtgctttcgcggggattgatgtctttactccggagggcagagtcgcatatcacaacctcttcaaagtagttttcgttggcaagggcctctgcaagggattcggttgttattgcggcgtctccattgtagtagttggtgaggcgtgccacctcattctcgctttttttctgttcttcctcagtgatgatgagtttgttgtccggtacgtttggcatgttgttgacaacagccacacgtttcagtgttgccgggaaactgacttctgccggaagcatataatcaatggacagttgttctacactctggcagctgcctaacagcagagaccccatcaataacagacaatagtgatatttggtcatagtctttggttttgttctttggagcaaaagtactcttttagctgaatattcaaaagctggaacgaataaaaaatgtgataatgtggtaggagaaaaagtgatagggtgataaaagatacctgacggtatcatcttatcaccctatcgccttatcattttatagctttgctttatgcattccgtccgtggcagtttttgtatttcttaccgcttccgcaaggacaaggatcattgcgtcctacggtcttctcggcacggataggttcgcgtcttggttgttcacgtgtatcttgtgccgcagcggcctgctggttcgggtcattcaaatcaaccttctgttcgcgatacttgctcatatcctggcgttgttccggagcagcctggcgcacctctacttggcggggagcctggggagcctcaggggcttcagccggagcctcttgtaccgggatttgtccacgcattaagatagagatagtctgattattaatcttattcaccatggcatcaaacaagttcacagattccagcttgtaaatcagcagcgggtctttctgctcgtaacttgcattctgcacggagtgtttcagctcgtccagctcgcgcaggttttctttccatgcttcgtcgatgacgtgcagcaagatggatttctcgaatgacttcaccacctccttacattctgtctcataagctctcttcaggttgcaggagatgttgtacatacgttttccgtctgtgatggggataagtatgttttcgtacatgtgtccctgcgtttcgtatacttgtttgatgaccggataggctatctgtgccatacgttctgtcttgcgtttgaagagttccatggcagcgtcaaaagttctgtctgccagtttttctttcttctcattacggaattcctcttcggtgaaaggtacttccatggcaagtgtctggagcacatccatcttgcagttttcgtagtcgggcgcttcaatggcattggcacaacggtcccaaatcatgttcacgatatccatgccgatacgttcgcccatcaaagcgtggcggcgtttggtgtagactactgtacgttgcttgttcatcacgtcgtcatattccaacagacgcttacggatgccgaagttgttttcctcaactttcttttgcgcacgttcaatggatttggaaatcatgccgtgttcaatcatttcaccttctttgaaacccagtttgtccattacactggcaatgcggtcactggagaacaaacgcatcaggtcatcttccaaagatacgaagaatacagaagaacccgggtcgccttgacgtcctgcacgaccacgtaactgacggtccacacggcgtgattcgtggcgttctgtaccgatgatggcaagaccgcctgcagctttcacttccggactcagcttgatgtcggtaccacggccggccatattggtagcgatggttacagcacatttcaaaccggcagtagccacaatatccgcttccttctgatgcagtttggcattcaatacactatgttcaatcttacgcatggtaagcattttgctcaacatttcagagatttcaacagaagtggtacccaccagtacggggcgtcctgctgccaccattttttctatctcttcgatgactgctttatatttttcacgttttgtcttgtaaacgcggtcattcatgtcattacgggcaatggggcggttagtcggaataaccactacatccagtttgtagatgtcccacaactcgccggcttctgtttctgccgtaccggtcataccggatagtttgtggtacatacggaaatagttctgtaatgtaatggtggcaaaagtctgggtggcagcttctactttcacgccttctttggcttcgatggcttggtgcaaaccgtcagaataacgacgtccttccatgatacgtcccgtctgctcatccacaatcttcacttggccgtcaattaccacatattcgtcatctttctcgaacatggtgtatgccttcaacagttggttgatggtatgcacacgttcgcttttgatggcatagttggtcatcagggcatccttcttttcaaggcgctgttcgtctgtcagctctgtttcgttttccaaggcagagagttgcgctgtgatatcggggagtacgaagaaagtggggtcctctacattgctactaatcaagtctacgcccttgtccgtcaaatccacgctgttcattttctcttcgataacgaagtacagcgggtcagtcacctcgtgcatgcgcttgttgttctgctccatgtagatttcttcggtcttcagcataccggccttgatgccttgttcgctgaggaacttgatgagtgccttgttcttgggcaggcacttgtgactgcggtacaaagcgaggaagccttcttcctggtctttcttatcgtttgatgcaatcaggcgcttggcatcggccaggtattgggtagccagttttttctgagcttctaccagacgttccacttgcgggcggagctgttcgaagagttggtcatcgcctttgggaaccggtccggagataatcagcggagtacgggcatcatcaatcaatactgagtccacctcatcgacaatggcataattatgttggcgttgtaccaggtctttggggctgatagccatgttgtcacgcaggtagtcgaaaccgaattcattgtttgtaccgaacgtgatatctgccagataagctttgcgacgggcatcagagttgggctggtgcttgtcgatgcaatctacactcaaaccgtggaacatgtaaagaggacccatccattcggagtcacgttttgccagatagtcgttcactgttaccacgtgcacgccgttaccagtcagggcattgaggaataccggtagggtagctaccaatgtcttaccttcaccggttgccatttcggcaatcttacctttatgtagaaccacaccaccgaatagctgtacatcataatgtaccatgttccatacagtatcgttaccacctgctatccaatggttctggtagatggctttatcgccttcgatgcgtacaaagtctttagtggcagccagttggcggtcaaaatcggtagctgtaaccactatttcttcattttcagagaatcgtttggctgtttcctttacaatagagaaagcggtgggtaatacttcgtccagcgctttttcataaatctccaatatctctttctcgattttgtcgatttggttgaagaggtcttcgcgtttttccagttcggtatcttcaacgctggctttcagttcttccactttggcgcgttgttcggctgccgaatcgtggatgtaggctttcagttcttctgtcttggcgcgtagggcgtcgttgtcgagtttggctacttccgggtaagcggctttgattttctccacccacggttgtatttctttcatgtcgcgtgtggatttgttgccgaaaatcgagcttaaaaattcattaaatcccattatatatttgtttttattattattgctgagttagttgagcgtgcaaagttactgatttctatacagattatccagatttgcacagattattttagaatcaaaagtcaaggggagatgctgtacttgcattaggggcgcggatgcgcattacacttgccaaggtaggggcaatgcggtcaatactgatgggggtacggatggtttcagccttcattcctcctcccaataaaatgaggggagcaggaatatcggccgtacgtactacacggttatcagtactattttcctgcatgatagtccagcccgggagtatttcaatgagcaaatcgccagagcgcttgcgatgaaaactattgcgtatacgttctatttgcggtgaccaggggcccaaaagcaggcgatgagctgaatatacttcgctcacgccactaaactgaaccagaaattcggcagatttttcttgaatttcagtcaggctcaactgcttgttctcaataagtttatggttgagatagatttgttggtcataataagcttccacatattgtccctcgccataggatgccatgaggtacatgtttagcagggcggcacagcggttcaggtagaattcaccacccggtatccggtatacgcccgggtcggctgcttccgggtcggcatagccggtggaggtgatgcagaaaagtacgttgtggagcccaactttacgttctatgagctctaataaggaagctatactacggtccagtcgcacgtaggtgtcttgcatttccatggcacattcctgcgtacttcggtggttataatttcctgcgtagtaagtcagcgataataggtcgggcacgtcatcttgtccgatagtgctcttattcagcagctcttcggtcagcaggttgacttcctcattgatgaaagggctggttatcaagcggcggaacttgtttgtccgttcaccatccagcttgtatttgaatggctcgttgcgccattcgggcagaaatgtatagttggtaaaaggaagtgcaggtgtccataccatatccttgatacggtagtcaggagatttccggtcgttgtattggctcagccaccacggaaattcattataataagtcgtactgcaccattttccggtattgttattaagccagaaagcaccgttccccgcgtgcccggcacccaatatggcggcatcgcggaaaggcgcgatggcatagaccagacctttgttgcgggtagctattttcagctcgtcggcaatagtagaggtcagtaattgggagggggaagtgctttcgtcggtatagttgcccatgaagttggggtcttctacacagtttatggggcgtagtgtacctgcatccagccactgctctgcaatgatgccgttcatggacggtgttgtcccggtatagatggcggcaatggccgaggctcggtccgttccgcaaaaaggaaattctgcttgacggaagactttaccttcacgcagtaagcgcttaaaccccttttctccgtataaggacgaaaatgcttccatatagtctgtacgcaactggtcaatggtcaatgttaccaccagctttggggaggcaggcagcggttgggcttgcaaaccactgaatgtaagtgcgagtatggaagttatcagtccttttttcattactttcgtttgtatgtcagaatgaggttgcttgcagaacgtatcagcaaacacagtgccaaaggtaatattgctggcggaattctctgcggaattattgcccaaagccctataaaaagtgttaaaactgcaaagttaaccagcatatagcggcttatttccctttttcgtaccctggatagcatgaatggaaggcagaaaaggtgaaatggatggaatacaaatagtatataattgggacttactgccggatgctgtgagaatagtgctaaaaatgccagtatacatccagccattccggcaaccaagaagagtatgaggtctatgtcccaaagagttttccctcttcgtatgccgtaaatgctgatgcctgctacaagtatcagtaatagcgaagccgactgcatcggtgtgatgcctctgctgacgaagtcggctggtgttttacccgttactacgattttttcttctttggcaaccagtggccgtgcttgtccttctttgtccacaatctgcgctttattgaaatactcctgcatgtagaaggggacgaacattgccagccgccggttgatgggttcgtctgctttgctgcccatgcataggtccatgccgaaacgtgaccacaaatggccttcactgtatttatgcagcaaatccctgaaagagattcccgtactgttagcagtcatattgtcagcgtattgcagagtgccgttgatggcacgctctatctggtcccgcgggcgggtggcacaattgtcgtagaaaaaattgtagcggtatactcggttttcagggcggtagttttctgttaatagtgctatcaggcgttctttttcctcttctgttaggtttaacgtttgttgccagacatcgcgtcccagatagttgtattcggcggcgaaatgctcataatcggttactccaagttgataatccgtttctcccaaggcaaaacggaagatgaagttaggggcgttgaagttgaacatgccgtaattgaagacggcgtcaatgccacgtgtatagttctcgtaccgtatggcagtgtgtccgaatagggaataaatctctcctcctgcagcgcaagtcagtaggctgacgcgtacggagtctgttgcagcagtcttttgctgttgtgtcacctgggcatttgctgaaggcaaacagaagaaaaagattactatatatatatgtataagtaggcttcgtttcatgctgcaaacttacggaaaaaactaatattatcccaatttgtgattaggaactaaagcggttattcgcgttattccggtcatctgtgtccgaagaatcttttttaattatgaacttgatacaattcttaattcgcattattggttgttttgaatcaactgtcgagtacgagtggtaggtattttctatttacaaacgatacgggtgcaagaaatagtggtatattgaacctgattcagtcgtatactgaatgccattcaatcgtatactgaatagggctcagtcgtatactgaatgtagcgcatttagttgtattgataatcaggtggttgtggtatgatgttgcggctttaataaatctcaacagaatgtaaaagtggcattgtggttgtttggtgtggatgtgaataagaattcttgtgcagttgttcttctaataaagagatggtttctgctgaatttcaatattaatgttatatctttgcgctgctaaatttatgcaatacggtgaatctcattattgatataggaaatacaatcgccaagatggcggtgtttgatggtggacgtatcgtggaggtggtgtatgactccaatctgacgttggaacggttgcctgaagtatgccgtacatatacgattgaaaaagcgatagtggctactgtcattgatttgagtagagaggtgttgtcgcaactggaagatatggctgtccccattctgtggctcaatgaaaagacttctcttccggtagaaaacctctatgaaactccccggacgctggggtatgatcgtatggcggcggtggtaggagccaatgagcaatttcctggcagggatatactggtgattgatgccggtacctgtatcacttatgagtttgttgatgctgctgcccgctatcatggcgggaatatctctcccggcctgcagatgcgtttcaaggcgcttcatcagtttaccggacggcttccaatggtggctcttgaggggcggatggtgcccatggggaaggataccgatacggctatccgtgccggagtactgaagggtattgaatatgaaatttcaggttacattacggttatgaagcataaatatcctgaacttttggtttttttaacgggcggggatgatttttcttttgatacaaacttaaaaagtatcatctttgcagacagatttttagtgttgaaaggattaaatagaattttaaactataataatgacaggctatagacaaacactgttagtgctcttgctcacgatattatcaggagtggcagtcgctcaaaataatacaaattctccctatacacgatatggatatggacagttatctgaacaaggctcaagtaacagcagggcgatgggtggtattgcctatggtttacgagacaagtatcagacaaacttcgctaatccagcatcctatacggcggtagattcgctgacttttatctttgatggagcagtctctttacagaatacaaacctcagtaacggtactctgaaacgaaatgccaagaattccagttttgattacatcacgatgcagtttcgtgcaagtaaatgggctgccataagcttgggattgttgccttattcgaatgtgggatacagcatgggagagtaccgggaagatacggaattcccagacaaatctacgacggtaagctattcgggagaaggaggtctgcatcagctttatttaggtgcgggctttaaaataattaaaaatctttctgttggtgcgaatttttcgtatctttggggagatataacaagaaccgctgcggaaacctttccgtccagttcaagtgtatttcctattacaatacagtctaatgtggctgtaaagagttataagttggattttggagcgcagtacactcaccagtttgggaaaaaacatgttgcaacgttgggagttgtcttttctccggggcatgatctgagtaacgatgcgtacgaagttacgcagactggtaatagcaatacgggagctacttcggtaacaagggatactgtcgttacttgtggcattccgacaacatttggcgcaggtgtgacctacgtgtacgacaaccgactgactgtaggcgcggatgtaatgttccagaattggagtaaagtgagttatatgaacaatgacgaggcgttttgcgaccgtggaagaatatccgttggtgcagagtatctgccgaatcctatgggacgaagttatttgtctcatgtgaagtatcgtttgggagcttattattccaaaccttattataagatagacggtgtacgtgccgctgatgaatatggcgttactgccggttttggattgcccataccgagaacccgttccgtattgagtctttctgcacaatacgtgcggactaaaggaacccaagcagcgttcttgaacgaaaatacattgcgtatttgtatcggagtaacctttaacgaacgctggttcttcaagcgtaaagtggattaatggaaattgaatagacaaaaaatataacaactaaaatttaaatacaatgaaaattaagacgcttgtggctgtcttgctcctttcgggtggagtgaccagcactttcgcacagactgaaaattgtaattcgaacagtagtatctctcatgaagcagtgagagctggtaactttaaggatgcatacgctccttgtatggctgtattgaaggattgtcctacactgcggtattacacatttacagatgctcagaagattttagtgggtttcttgagtcagattaaggatagaaattctgctgattacaagaagtattttgatgagttgatggatgtatatgatttgagaatgaagtacattcctgaattcattggtaagggaatgaagggcgtgccgagtgtggctgatgccttgggtgccaaagctgtggattatcttcagttcgctcctgctccggaccttaatacggcttataattggctgaaagaatctgttcatgctgaaaagggtggttccaaaggtgcggtgttgcactatttcctggatacttccatgcagaaggtaaaggctgatgataatcataccgaccagttcttccaggattatattgatgcttccaagtatgcagatgacgcacttgctgctgaaaccaaggaagctaagaaggctaacttgcaagctatcaaggataacctcgtggccatgttcattcagagtggtgtagctgattgtgaatctttgcagaatatctatggtcctaaggtggaagcaagcaagactgactccgctttcttgaagaaggcattgaacatcctgaaattgatgaagtgcaacgaaagcgaagtttacttcaaggcatctgagtacatgtatcagattgacccgactgccgatgcagctgtaggtgtagcatacatgtactataagaaaggtgactatgacaatgccgtgaagtattttgatgaagcattggctaaagaaacagataatgacaagaaggctgaaatggcatacgctactgccgcagccttgatgcaggccaagaaactctctcaggcaagaagctactgccaaaaggctatgagctttaaggagaactatggagagccttatattttactggcacagctttacggctccaatcctaactggaccgatgagcctgctctgaataagtgtacttactttgtagtaattgacaagctgcagagagctaaagctgtagatccttcagttacagaacgtgctaacgaattgattagtacttattcccgccacactccccaggctaaagacctctttatgttgggttacaaagctggtgaccgtatcactatcggtggatggataggtgaatctacaactatcagataaaatcatgttgctacaacccatcaacattgtttatcataaaaatgcgagcataaccattgtccttggggcaatggttatgcttcttttattttcttcgtgttccgggaagaagaaggagctgggagatgccattaccgagcgtgactctatggcagtgatggatacccgcggggtgactacactggtttctgattccggtgtaacgcgttaccgcatcaatacggaagagtggctggtctttgaccggaagaatcctccttactgggcttttgaaaagggggtctatttggagaagttcgactctatcttccaagtggaggcgagtatcaaggctgatacagcctacttctttaataaggaagagttatggaaactgatggggaatgtgcatatacagaatttgaaaggtgagcagtttgatacagagctgctgtattgggaccagcggacacaaagaatttattcggatgagtttatccgtatcgaacagcctgaccgtatcattacgggacatggctttgaatccaaccagcagatgaccgtttacacgattcgcaagccggagggcatcttctatgttgacgaggaagctgccgcagcagacagcttgcagactgataccataaattgataaaatggataccgttatttttttattgataaccatggctttctccgctttcttttcaggaatggagattgcctttgtttccgtagataaactgcgttttgagatggaaaggaagtcaggcgtcacttccagtatcatttcctatttccttcgcaacccgaacaactttatctcgaccatgctcgtgggcaataacattgcgcttgtcatttatggtatcttgatggcacaaatcatagaggtgaatcttcttgccggaattatttccaatcattttgtaatggtgttggtgcagactgtaatttccactcttattattttggtaaccggtgagttcttgccgaagactttgtttaaaatcaatcccaatctgatgctgagggtatgtgccattcctttattcatatgttatgtcattctgtttcctgtttcaaagtttgcatcgggattgtcgtatctgttccttcggatatttgggatgaaagtaaacaaggaggcgtcggccaaggcttttggcaaagtggatttggattacttcatccagtcgagcatagagaatgcggaaagtgaagaagaactggatgcagaggtaaagatattccaaaatgcgcttgacttttcgaatataaagatacgcgactgtattgtaccgcgtacagaggtggtagctgtagatctgaccactacattggaagaattgaaatgtctttttgtggagtcgggtatttccaaaatcatagtatatgatggaaatatagataatgtggtgggatatattcactcgtcggagatgttcaggaatccggtggactggaggaataacgtgaaggaagtgcctattgtacccgaaacgatgtcggcccacaaactgatgaaactgttcatgcagcagaaaaaaacgattgctgtagtggtggacgaattcggtggtacggcgggtatcgtctctttggaggatttggtggaagaaattttcggcgatattgaggatgagcatgataatacgtcctatgtatgtaagcagctgggtgaacgtgaatatgtgctttcggcccgtctggaaatagaaaaggtaaatgagactttcgggctcgacctgccggaatcggatgattatctgacagtgggcggtctgattctgaaccgttatcaaagtttcccgaagctgcatgaagtgattgaagtggataattatcagtttaaaataatcaaggtaacagccactaaaattgagttggtaagactgaaagtcattgaataatttcatttaggcataattttttaaagaataaatggatgcgtattagcattttttgtatcttcgtgcgctaaaatgaacgtgttaggaaaataataataaacaaataaatcatattaactaaaatggcaacattacaaaacattcggtctaaaggacctttattggtgattgttattggtttggcgctgtttgctttcatcgcaggtgacgcgtggaaagtgcttcagccacaccagtcacaagacgtaggtgaagtgaacggggaatcaatttccgctcaggattttcaagcattggtagaagaatatacagaagtcatcaagttctccagtggcaacagtgcattgagcgatgagcagacaaaccaaatcaaagatgaagtatggagaacatacgtcaataataagctgattgaaaaggaagcaaagaaactcggtctggttgtatcgaaggctgagattcaggctatcattaatgccggtgtgcatccgatgctgcaacagactccgttccgtaatcctcagaccggtgcgtttgataaggatatgttgaagaagttcttggtggactattcaaaaatgaataaggcgcagatgccttcacaatatgcagaatactatgaatccatgtacaagttctggtctttcctcgaaaagtctcttatccaggcacgtcttcaggagaagtatcaggctttgattacaaaatctcttttctccaacccggtagaagctcaggacgcttttgatgcaagagtagagcagtcagacctgctgcttgctgcagttccctattcttctatcgttgactctaccatcgttatcaaggattctgatttgaaggctgcatacgacaagaagaaagaacagttcaagcaatatgtggaaactcgcaatatcaagttcattgatgtgcaagttactgcaagtgcagaagacagagctgctctccagaaggaaatggaagaatacaccgaacaacttactgccaatccttctgactatactaccttcatccgttctaccggttccgaagctccttatacagacttgttctacactactaagtctctgcctgctgatgtgacagcccgtttggattctgttgcggtgggtggtgtattcggaccttattataacgtatcggacaatactcttaactctttcaagaaattggctactgctgctatgccggactctatcgagttccgtcagattcaggtagttgccgaagatgctgaaaagacgaagactttagccgacagcatctacaatgctattaagggtggtgccagctttgctgaaattgcgaagaagtacggtcagaccggtgagcctacctggatttcttctgctaactacgaaggcgcacagattgacggtgacaacttgaaatacattaccgctgtcacaactttgggacagaacgaactgaccaatctggcgttgggacaagcaaatgtcattttgcaagtaaccaacaagaaggctgtcaaggataaatataaggtagccgttatcaagcgtccggtagaattcagcaaggaaacttacagcaaggcatacaatgagtttagccagttcatcgctgcaaacaatactttagagaaaatgattgccaatgcggaagatgccggttacaagttgctggatagagccgacttgtacagctctgaacatggtatcggtggtatcagaggaaccaaagatgctttgaaatgggcgtttgaggcaaaagccggtgaagtttccggtttgtacgaatgtggcgagagcgaccgtatgctggtagtaggtgttgcaagtattgttcctgaaggttatcgcccactggctttggtaaaggaccagttgagagctgaaattctccgtgacaagaaagcagagaagattatggctgatatgaaggctgccaatgcaacttcgttcgagcagtacaagaatatggcaaatgctgttagtgattctgtaaagcacgttactttctctgctcctgcctatatcccggcattgcgtagcagcgaacctctggtaggcgcatacgcttctattgccgaagtgaacaagctgagtgctcctatcaagggtaacggtggtgtattcgttctgcaaccttatgcaaaagagaagctgaacgaaacattcaacaaggaaactgaagaggctaacttggctaacatgcacgcacgcatggcaagccagttcatcagtgacttgtatctgaaagccaacgtaaaagaccaacgttatttattcttctaagaatagaaaacccatattgaaaagccgttcggtactcccgggcggctttttcattctctgtacatttcattttctatactctccgttgtctttgtgcaactttattcctacctttgcattcttgaaagagttttgtttttaatgaaaaacgatatgcagaaacgacctctattgggcttgacgctctctgaattgcagaatgtggtgaagaatctgggaatgcccggtttctctgccaagcagatagcttcctggctgtatgacaagaaggtgacttctatagacgaaatgagcaatctttcgttgaagcatcgggaattgctgaaagaaatctatgaggtaggtgccgaagcgccggtagatgccatgcgctctgtagacggtacggtgaaatacttgtaccgggcaggcgaggggcatttcgtggaagctgtctatatacccgacgaagacagggctacgctttgtgtctcctcgcaggtgggctgtaagatgaattgcaagttctgtatgaccggcaaacaaggttttactgccaatctgacatccaaccagattattaatcaaatcaattcgttgcccgaaagggacaagcttaccaatgtggtaatgatgggcatgggtgaaccacttgataatctggacgaggtattgaaagcgctggaaataatgaccgcctcttatgggtatgcgtggagtcccaagcgtgttacactttcttctgtgggattgaagaagggcttgcagcgttttattgaggaatcggactgccatctggctatcagccttcattcgccgatacctttgcaacgccgcgaactgatgccggcagagaaggcgttctccatcacggagattgtggaattgttaagaaactatgattttagcaaacagcgcagactatcttttgaatatattgttttcaaaggagtgaatgactcgttaccgtatgcaaaggaacttctgaagctgctacgcgggctggactgccggattaacctgattcgttttcatgccatacctggagtgaatcttgaaggggctgatatggaaaccatgactgcgttccgtgattatctgacttcgcacggtctgtttaccactatacggtcatcgcgtggagaggatatatttgccgcttgtggcatgttgtccactgccaagcaggaggagaataaagaagaattaatataaattattaacttaggtagggaggatattacgcattcttcgtagctttgtgaaaaactaaaatgatagagatatgagaaagcacttgttttatttaagtatggttctcgtactgacacttttttccgcttgcggtggtggtaaaaagggtgtgtttactccgacctccagtggtcgtgcgtatgaagttctggtagtggtggagcccggcttgtgggaacgtcctgccggtagggcgcttttcgatgtgcttgattctgatgttccggggcttccccagtcagaacgttcattccgaatcatgtatactgccccttccaattatgatgccactttaaaactgattcgtaatatcattattgtcgatgtgaacaaggacctctatacccagcctaaattcaagtatgcaaggaatgtatatgctgctcctcagtctattctcactattcaggcaccggacgaggcttcgttcgagaaatttgtggaggagaataggcaggtaatcatcgatttctttacccatgcggaaatgaatcgtcagatttcagtattgaaggacaagcatagcgactatatagcaacgaaggtgaaaagccagttcgattgcgatgtatgggtgccgggcgaactgacatctaccaaggagggtgagaacttcttctgggcaggtacgaatgcagctaccggcgaccagaactttgtaatctactcttatccttatacggataaggatacgtttactaaagaatattttgttcataaacgcgattccgtgatgaaggttaatatccctggtgcccgtgaaggcatgtatatgtcgatggattctctgatgaccgatgtacgccccatcagtgtgcagggagactatgcactggaggcccgcggcttgtggcgcataaagggtgacttcatgggcggtccgttcgtatcgcatgtacgtttggacaaggccaatcagcgtattatcgtatctgaaatatttatttattcacctgataaaatgaaacgtaatctggtacgtcagatggaggcttcgctctataccttgaaactgcccggcagcaagcaggaaggtgcggaaattccggtaggcgtaacctcaaaagatactactaataataagtaataaaaatggaagacaacaaaataagagtcggcattacacaaggcgacattaatggtgtagggtatgaagtgattttaaagacgtttgcagacccggtgatgctggaattgtgcacgccgattatctacggttcgcctaaagtggcagcttatcatcgtaaatcattggacttgcctaccaacttcagtatcgtcaactccgcctccgaagcggttcccaatcgcttgagtgtagtgaactgtacggatgatgaagtaaaggttgagttctctaaacctgacgttgaagctggtaaagctgcacttggtgcactggaaaaagccattgaggaatataaggagggaatgatagacgtgattgtcacagctcccatcaacaagcataccatccagtcggaggagtttgccttccccggacatacggagtatatagagcaaaaattgggagatggcgagaaggcccttatgattctgatgaaagatgacttccgggtagcattggtgaccggacatattcccgttaaagagatagccggaagcatcaccaaagaactgatacaagaaaaactgaagatattcaaccgctccttgaagcaggattttgctatcagcgcaccgcgtattgcagtgctttcgctgaatccgcatgcaggagacggcggattgctgggaactgaagagcaggagattatcattccggccatcaacgaaatggctgctaagggtatgctttgctatggtccttatccggcagacgggtttatgggctcagataactttacccattttgatggtatcctggccatgtatcacgaccaggggctggcaccgttcaaggcattggctatggacgagggcgtgaactatactgccggcttgccggtgatacgcacttcgcctgctcatggcacggcctacgatattgccgggaaaggaatcgcctctgaagattcattccggcaggctatctatgtggcaatagatgtgttccgtaaccgccagcgtgagaaagaggcacatgcaaatccgctgcgcaagcaatattacgagaaacgtgacgatagcgacaaactgaaactcgatagtgtagaagaagatttgtagaatgacaaaagcggaaatacaacaagtaaaattacgtttcggcattatcggcaacaatgaagcgctgatgcgtgccattgatatcgctatccaggtagcgcccaccgacttgtctgtactgattaccggagagagtggtgtgggaaaggagagctttccgcagataatacaccagtacagccggcgcaagcatggacagtacattgccgtgaactgtggagccattcccgaagggacgattgactcggaactgttcggtcatgagaagggcgcatttaccggggctatcggcgaacggaaggggtatttcggtgaggccaacggcggaacaatcttccttgatgaagtcggcgaattgcctttgcctacccaggcacgcttgttgcgtgtgctcgagagcggtgaattcatcaaagtaggttcttctaaggtggaaaagaccgatgtgcgtattgttgccgctaccaatgtaaacttgacacaagccattgctgacggacgttttcgtgaagacttgtattaccgtttgaacacagttcctattcaggtccctccattgcgcgaacgcggtgaagacgtggtgctgctgttccgaaagtttgcttcggactttgcagaaaagtaccgtatgcctgccattcagctgacggaagacggcaagcaagtgttgctgggctactcatggccgggtaatgtgcgccagttgaagaatatcaccgagcagatatccatcattgagaccaatcgtgaaatcaatgcatccatactgaagggctatctgcctgagcagaacaatatgcagcgcctgcctgccttgtttggagtgaaggaggacaagagctttgggagtgaacgggaaattctctaccaggttctgtttgatatgcgccaggatgtaacggacttgaaaaagttggtgcatgagattatggctgaaaggggaacggtagccaatccggcggttgccacatcggcctactatacgccggctactccggcggtggtacctccggtaacatccagtgttcccaccattatacatccttcggtaaagccggttactccggtggacgatgatttccaggatacggaagaatatgtggaggagtcactctccctggatgaagtggagaaagaaatgatacgtaaggcgcttgaaaaacatcacggcaagcgtaagagtgcggctcaggatttgaatatctctgagcgtacgttatacagaaagataaaagaatatggattggattaaaaaagcggcatttgcttccttgttggtaagcttgttatttctggtgaattcatgtagtatgaagttgggacttgctccgataagctctatcgactatacaaaggtaaaaacgatttccattgccgatttccagaaccgggcagagtatgtatatgcaccgctggcaacagaatttaaccagaaaatgaaggatatgttcattcagcagactcgcctgcaactggtgaattccggaggagacctggaaatagacggagaaataaccggctacaatcaatataatgaatcggtggatgccagcggctactcttcgaaggtgaaggtgacgctgactgtcaacgtgcgctacaccaataacacgaaccatgaggaggactttgaacagcagttctcggctttccagacctatgattcctcaaaattgctgaccgaagtgcaggaccagctgataaccttgatggtgaaagacattgccgaacagattttcaatgcaactgtagctaactggtaaactcatgacgcctacccatttgcaacaatggattcagcatcccgagacgctgaatagggatactttgtacgagcttcgcacattggtggcacgctatccttatttccagtcgctccgtttgctctatctgaaaaacctctatctactgcacgacatcaactttggcgcggagttgcgcaaggctgtgttgtatgtggcagaccgtcgtgtgctgttttactttatagagggtgaccgctatactttgaaatcccggaaggtctcgtcgctgttttccggcgatttggagaaagagccgagtgtggaccgtaccctttccttgattgacgcatttctggctactgttcccgaagagcattcacagcatacggagctggattatgcggtggattatacggcctatttaatgcaggaagaacccggtgtggatgcagaagatgagtcggaagtgcctaaactgcgtgggcatgaattgatagatgactttatccaaaagagtgagtcttcggatgcctcggatacgagaagggagtttcttgtagagaaggaggaagagactgaagaagaggaagaaccctcagtatcgccggtaacggaagagttggacgatagctgttttacggaaactttagccaaaatctatataaaacagcaccgatatgacaaggcgcttgaaattattaaaaaattaagtttgaattatccaaaaaaaa

SEQ ID NO: 4415 - DNA, 30843 bp, Unknown
  gut microbiota DNA sequence
caaaatgtatttattattagttatcttaatgctgattgcatctgtgctgatgtgcttcattgtattgattcaaaattctaaaggaggtggtctggcatcaggcttttcatcatccaaccaaattatgggtgtgcgcaagactacggactttttggaaaaagcaacctggactctggcagctgtcatggtagtcttcagtattgtttctgcttacactattccttcttccacaggcaagggcggtgatgtgattctggaacaggcgcaacaagaagaaaaaactaatccttataacatgcccgtaggtacagaagctccgcaatcggaggcccctgcagctacaactccggctgaagctcctgctcctgcagcagaataagataaggatattgcggatgactcccgcttggaaaaataagagaaaggttgatactgaaaaggtgtcagccttttttcgttttgatgaagtatttatttacctttgtcagcaatttatgcaatctgattaataaattgaaatccaaatagtacaatgacagaacaactcaaacttaaattgaatgattccaaggctacccgttggggggcattggtgattgttgccttcacgatgatggcagcttattatgtaaacgacgtggtagcaccgttgaagacaatgttggaaacggacttggcttggtcgagtaccgatttcggattctttaccggtggttatagttttctgaatgtttttttcctgatgttgatttggggaggattaatcctcgaccgctttggtatccgtttcaccggaaagctggcaactatcctgatggtaggtggtacagcacttgaatactatgcaatgacgggacttgccggtgccgacgcgactttattcggaatcaatgaaatatttggctataaaacgggtgtgtttgttgcttttgccggttattccatttttggagtaggagcggaggtcgccggtattacagtttccaaaatcatagccaagtggtttaaggggaaagagcttgccacggctatgggggtacaagttgctttagcacgtatcggttcgcaagccggttatgccgtagccattcctttggcccgtgctttcggtatttccacaccggtgttgttgggtttggttctgttgttgggcggtatgattgctttcttcatttttgcagtgatggacaagaagctggacaaacagatggaagctgctgccattgctgccggtacggaagatgaggaagagaagttctcttttaaggatgtgaagaatattctggtcaatcccggtttctggctgatagcattgctgtgtgtattgttctactcttgtgtattcccattccagaagtttgcttccgagttgatgattatcaaatacggtatcaatgagaatgtggccggtacatttgccggacttccggcattgggagcgctgattctgactccggtctttggtggtttcattgacaagcggggcaagtccgcatctatcatgctgctgggctcggccatgctgatatgtgtgcatttcatttatgctattcccgatataaactattggctggtagctattgtgctgatgataattttgggtatcgctttctcgctggtaccttctgccatgtggccggctgtggccaagatattcccggtaagccagttgggtacggcatacgcattgattttctttatccagaatatcggtctttggggtattcctacattgatagggtgggtgcttgatgcctattgtatatccggcaagaaaccagatggaacgaatatgtatgactatacggtgcctatgtgcatttttaccggtattgcctgcttgtcccttatagtggctctactgctgaagaaggcagacaagaagtatggttataagctggaagagcctaatattcagaaataataggaaaagcggataccgtatgatggaaatacccgaaggaaaagtaagtctgttggacgctgttccggtccgctgtggacatataacaaccgaatgggaaggtgagtgcgccgtactcgcctacccacggtttaaatacgaatggatgcgtcgttttttattgccgaaggggatgtctcctgacatccatgtgaggctggaagaacacggtacagctgtctggaatctgatagatggacatcgtaccgtgcgcgaaatcatctctctacttgccaggcactttggggaggaagagaattatattccccgggtcaccgcctacgtaatgcagttgcgtaaggatggatttatccagttgacaatccggaattagaattcctttattccctatccacttttatcaatcctcccgttgccgtatcaaacagcactttgatggtagaattcttgttgaacagtaccggtgcgaggtattctacggtgccgaattgggtaatgggaagttggtcgtcaaacaatttcttattgttatacatcaatgtcacttgtgccttgcccggaaggttataggctacaccgtccactttctttttgccttcctcggtggcagatacatcgggacttttgaggtcggtgacgctgatataatacggttcaccggcaaggtcattattggccaccactcccagctttcgggaaaaacggaaagccacctcatctttcatctctttaggcgtcagccggatggtgaatgtcttgggttctttctttattttgcccgagaacatttccgtcatagccgtttcctgctggttcagattgtcaagcatcagcttgagttgggcgccgtccttgggcatattgtctgcttcgccgcgcaggagggcattcttgctttcgcggatgctgtatatttccttagccaccagctcggccatcttggcactggagttggacatcagtatttcttccgtcagaaaactgcgtgggtcaatgctgctttcggtggctttggcttcgggcgtcttggcagcaggcttaccgctgaacggaatgttgatggagcggacaattccgtcttcggtaagctccataaggggtgctacggtcttgtctttcatcttcacgaaatagacgttgtccttatccggtacaccggctatgcgggtttctatcttatccagtgtccagaactcctcgggttcggcagacacgttgttgagacgcagatagcggtcggcatatctgcaaaattctccgggagtgtaggtatgcttggtggcttgcaatacgatttctatttctgttttgggtaacatataagtcactccgtagtctttgccacgcatcacaccggtggttacgtctgtttgcgccatggcagtgatagacaagaacagagctgagagcatcaatatattcttcttcataatgtacattcgtttagactgatttagctaagggacaaagttaatgaagttatctttgctaaatattgctttataaattattaacagagctgacgaactgtacgcaaaccggcatgtcgactacaatgtcctgatgagtatcttccaagagtccggtaacttcgtttcgtttgtatacctgaatgacattgctgtcgcggcaggcggcaagcaagtatttaccgttgggcgtgatgttgaagttgcggggatggatgccggtgggctgataacctacctttgccaaggtcccattttcgggattcacggcaaagatggcgatgccgtcttctttcagacggttgctggcgtagaggtatttcccatccggactgaggtggatgtctgcacttccacgggcggctacggtgtcggctgtgatagtctgtatctgttccaggcagccgtcgtcgtaactgaaggcaatgaccttaccggacagttcggtgatgagataggcaaacttcccgttagggctgaatgtcagatggcgcgggccggaatctgcctcaatgccaacggcttccagagaagcatgaggaatagggttgtcggggtgcatcacaaagcgcaggatgcggtcggcactgaagtcggtggcgaagatatactttccgtccggtgaaaagaccgtgcaatggatgtggggagtggcttgccgtatggcgtcgggaccggtggcagagccttgaaagagcgtgtctgcaggagccaaagtgccgtctttctgtaaaggaaagacggacatggttccaccgctgtagttggcagtcaacacttcccggccattggtggccacgtagcaggggtcggcgccgaaggtgggaacggtgttcagcaggcgcagttctcccgtttcccggtcgaaggcaagggagctgagggctgctgtgctgtcgttcatttcactgacggcatagacaaattcgccatcttccgaggggacgaggtaggagggattgggcaatgccgctgaactgagcggaacggctgttcccgtctcctgattaaagcggaaggtatagatacccttgcttgagccattcgtgtaagtacctattagcatggcgagttcgtcctggtcaccgttagtgccctttggagaagagccacatgctgtcaaacctaatccgagcatacagaaaagaagtgttttcattaatttaatgtgttaatgtgccaatatgctaatgtgctaattggctgcgctgtatatgctgcatggtcattggtacattagcatattggcacattagcacattaaaatttaacttcggcaatactgacgcggtcatcgttcagcacgatgcggaggtcgctggcggtagtgcctttgaacggataggaaatcagtttgccgtattcgctgacggtgcccgaatatacggtgaggaactgtccgccaccgcccgagagctggatttcgaaggttgccggcaggttgttgtcacgtgtaaaggcaatggcaactttatctaccttggctccgttctttaaggcaaaggtaatataatctcccttatttccttgccatgcggtattgattttttcgtcgagcacgttttcggcatcctctgggttggtgctggtactcacacgctttgctggtttttgggcttcaatggctttggcacgggtctggtagtcttctacggtcagcgttccgttcaggcggatgtcttcggaagaggcgccggccatgagcacgaagtcgccgggttccaccacccatttcatgtcagcgtccagaagctccaggtgcttgcggtcgatggtgaaggacagctcctgggcttcgcccggttcgaggtggatgcgctggaagcctgcaagattcttttcgtaggtggtgatgctgctcagtacgtcgcggatatagagctgcactacttcatctccggcacgtttgccggtgttggtcaccttcaggcggacggtggcagactcgttcggggtgatgattcggggggtgatgtcgaggtcggagtactcgaaggtggtgtagctcaagccgtaaccgaaggggtagagtgctccgttgatgcgtgacatgttgcccgtaggtcccggattcttaccgccgtctatctgtgaagaaggtttgcaggggaagttgaaggggatttgccctacggtcttggggaaggtcaccgtcagctttccaccggggttgtagtcgccgaagaggatgtcggccagggctgttccgcctttggagccgggataccaggcttcgaggatagcggggacgaacttgtctgcccagttgatggagagcgggcgtccgttgatgagtatcagtacgacgggcttgcccgtggcttgtatggcttgaagcagttgcaactgccgaccgggcaggtcgaggctggtgcgcgatttgttttcgccgcaggtgcgttgtccgccgcccaatactacgatggcaacatcagcttgacgggcattttctacggctttgtctatctcggcttgttcgtcgtcggtcagcggatagtctatgatttcactttcgggccagtgggcgtccaccaggtcgcagcctttggtgtagagcacctctgccttgccttttgtcttttcttgaatgccttccagcacagtggtcacttctacggcaagtgggccgtaatgggtcagcgcgtagccttcttcattggcattgggaccacagacggcaatcttcttggtggagttgatgtctaagggcaatagttcaccggcattcttcagcagaacgatggactcgcgggatgcctgcaaggcaatggcttcgttctcttctttttccacttcacggtcggcatcggcaaggtctgtctgatagggggcatcgaacagaccgatgaggaactttacccgaaggatgtcgcgcacgcggtcgttgatgacttcttcgctcagtccgccttccttcaccagttcgcggaggggaaggacgaaggagtcgggcgagcggaaggtgcagcgtacgttcagtccggcttccacgctttggcggacggcttctttcatgtctttggcggtgccgtgcttggtgtagaggtattctacggcgtcactgtcggatacgacgtagccacggaatcccatttcgccacgcaggcgggtggtgagccagtagtagctgccctgcacggggatgccgtcgtaatcgttgtacgaactcattacgcccagcatgccagcttcccggatgacgcgtttgaaggggtagatgtgtatgttttccacttcgcgcggcgacatttgcgggtccacgcgtgccatgccttcgcgggcgcctttgttgttactgtaagcggcaaagtgcttgccggtggcggccacttggtggttgtgctgcaagccgcgcaccatttcgatgcccagttcggctacgaggtagggagattcgccgtaaacttcttcgtagcgtccccagcgctggtcgcgtcctacgtcgaggatgggggcgtagacgttggtgtagcccagcatgcgggcttcgcgtccggtgatgagtcctacttggcgaatcagttcacggttccaggtatgtcccagtcccagttgggtggggaagttggtggcgcggtagctttccacgccgcgtatgccttcgttggtaaagtctacggggatgccgagacgggtatcttccacaaagaaccgttgcacctcgtttagtgcccaggcgtggcgcgaggcgggccagacgtaggcattgtccgagggaggcagcccccattgctggaagccgttcaggtgttcgtcgatggcgccgatgccgtctttccagagcagctctttccattcgggggtggggaggtcgtctttcagtacgcgtttgtagccgtagagggtgaccatttggcaggtcttttcgtccagcgtcatctgttgcagcaggttttcgatgcgtgcttcgagcggggcggaggggtcttcgtacacgtctttcactccgtttttgttgaagtctatccaacctttgcggtacatttcacttttcaccggcttgtaggttgccggtgttttggcaggcttttgtgcgcagagcagtgtgcttcctccaagcagcagggttagggcaataaggttcttcatgatatgttctaaaaatctcttggttattattgtttcttttgttgacaaaaatacggctaatgtgtgaaataaagggataaaatagtccgaagtatcggcttttattgtccgaagggtcttcctcttactaaaaatatactccaagacgctaccggggaattcaaatcattattagacgaaacatatcattcacttttaaaaagaaagaacactataataacctgaaaagtagatgcaatcgcggtgtatacaagtattacggctacatctgttaaacgagggtgtatttatataataggaatctgttggcggaattgttgcttgtacggaagaactttcttttcaaccttgggatgtctaaaccaaaccttggtttagacatcccaaggttgggtatggaaaaaccaaagtttgggatagattgcttccttaattctttccggtttttcagttaacttcagagactttttccgttaacttcccatctcttttgtacaaatatccattacagaagatagatattccctcttgcagggggtaattctgtcaacggatactggctttggtagctgtttgaacattgatgacaatggggtgcacatattctatgtatggaagattattgtttttatcacgaaaagtcagtattagctaatatttgtaaatatatggtgattgctaataaaagaatatgtatctttgggccaaagaaagcggtagaggatgaaaaataaagtagcatttatccctttttcaccctccctacttagcaatgagttacgcaatcttttaaatttcagaccgttacaaagtcatggggttgactggatttgacagcgggcagaaatggtaagtaagcatgcagtgcgtcgttgatttgcactttaatctcagtcctcaaaattttatctggcgaaactcgttacgctctcgctgcttaatcgaagtatagtagattgaagcttaatcccggcaccaggtgctgggacgtgacatcactcggaagctgttgctccgaagcattccgataaagtggtgcagtcaaatcggggatagttcgtgtcagcctcgtggcgcgggtgaaaatttagaggataaggcaacggttgatggctttggttctgccgctgcacgaaaatttaggcaaagataagcatgtagaaagcttatgatttcctcgtttggacgagggttcgattccctccagctccacggaaatagtaaaaagaagtttgtaagtccttgaattccagtaattcaggggcttttcttttcttctactccccctaccttttatattcatttagaaaatagttgtagtaaatgtgctacaattcaaaattaatatctacttttgtctgttcaaaaatcaataactattagaagtgggggcaacactttaaattctgcaacagatttatgaaaattcacgaaggaaaatgtacagagaagattttgaaagaacgtgaacggattggtagtcggttagccattcttcgcaagaagagaaatatgacccaagaggaattggctaatctttgtggtgttaatcgtgttaatatagccaagatagagaaaggggcttataatgtgagcattgatatactatctaaggtaacatccgctcttggttttgtgatagatataaaagtggatagctctgtttgtccgactcatttctctcaacgtaaacctgtaaagctggtaataggggaagattattatgtcagttttggcaataacgaagcccatagatgtaagctggtggatattccggagatgtaccaaggtcaaagaattaaaatcgaaactccgaccccgagagggtctatcacccacatattatttgccgatgaaataggaacgacacctgacgaggctgtaatgaaccaagtaacgatgtaaaaacattaaaagggaggaagtgcaagttccccttttattgaaatcaccttcgctacaaccatctgcagcgagggtgattttttagtttatgagggtttctacacaccctctttcatcagggctattcagaaatttaatggtttcttctgaatatataatcttaaattgatggttcggaatcaattctaaagctgggaaatcagtagtgattaacagttttagtccctttctttaatatgtaaaagcaacttgtacaaaagaagtttcttatgtacgggatagcagcaataactccgttgagccttcgtggggacaagccgaatttgattttataatgtgggtttataaggtacagtctccggtcaatgatttgatagttggcttgccgggcgatgcgattgaacagttcgatggtgcatccggtgctctttatatccagtagctccatgattacgcgttcctgctcaccgcatagtcttaatatccatctgtataaagtgcggggaaggaggtggagaaaagggaaatgtgaaacaatgtggctgtgtgctatctgctggtggcctccgaatggcatttgccaggcgggaaaccctacaaatacagctccgtcggcagacaaatgttcttgtaggccggagaagaaccgttctttgtctctgatatgctctatcacatcgtgtagaagaatcaggggaaaattcgtagccttgtccttgagctggaaaatgtcggtggcaatgaactgtccctgctgatgcctttgggcgaagaaggttctggcttgttctattcgcgtggcatcaatgtctacgcccatcacccggcaaccggcttcggcaaaggggagcagattgcctccctctccacagcccacttccagcactttatcggggatgtgtccgatgacttcctttatgtaggggatataatagttcttgctggtctgtgactgttcatcaaagtagctttcccggtcggtatgtcgtttctgcatgttctttgttccttcttgagtttgattatccatataaatagataatcagtcgggtaaaagactgcgtggcgcatcgtttttttaccaggaaatgcggaggcctaccgggagggtgaatatgaacgggtgttcctttcggatggtgcgcagttggctgccgtcggggatataatagtttacagtcggctccagatagatgcctgcctggggtgtgaggcgatattgtatgcctatacttgtgttgaccgaccactgccagggagcacttaccggctggctgtcgagcttgtgtggaatactgtctgtgacatggaagctttggagtgtcccttttatggggatatccacctgcatgcctgccgtggcataactggagaaacgtttgtaatgccagaaacagtaggaaagccggagaggaatgccgatataatgcaacttctggttgtcttgaatgcggaatgcttcgccggtagtgaactccgacctgagaagcgtatattgcaatccggtttccagactccaacgctcattcaatttcttgctgagagagagtcccacaacgatgggggcatgatgttgctggttctcaacaatcctgccgctgttattctgggcaatctgcatgagtccgatggaatcttttcccagagtaccctgctgatagcgggtgtgcagataagaataatactcttcccacgtgctgacttgttgagggaagtcacttgaaatgccgtcggtatgtggagtggcaatcagcttatataagttctgtgccagttgcggtccgagtgaacctgccagcatcaacttccattttccggatttcttcttgcgggttggcggcatcagggaaggggagaagacgaaagccatctgtcggttggtgatggtctgtccggtgaatggagaaggtatgggatatttgtggatactatctttcattgtgggtatggcaaggggccattctgtggaaactggaacgggagggatgattcgttcccttttgttcagattttctttggtatagcattgttcgtcggttcggggagtatcggttttctttgtttgttgcgtactcccggcttgcctggaagaaactttggacaaacggttttccctgatactctttttctctctgtacagatagtcatacagcgttggaaagagaagcaatactgtcaaaacaatgaatacacggtatcctgccagcatctttttaagtaaaattttcgcccggaacaattgggaggaagaggagtgtggcgctatacccagtaaatctccgatttctttgtgggacaatccttccagtactgccagtttaaataccttgcagtagccctccggaaggctctccactatatccagcatcttatcgtacgaaatgaaatccggacaaaaaggattttcagcaggctcttcctcttccggaatatctgtcaatgggatggtggggttggcattggcatggttgaggtattgcagtgccaggtttctcataatctttttcatccagtattccagtttctccgggttgcgcagcgaatgaatggaagtgaatatgatgacaaaaccgtcgtgaagaagatcttgggctatcgttgggtcgggaatatagcgtaggcatactttcagcattttctctgaatagttttcgtagagcaggctcaaggcctgcccgtttcccttctggcataaagtgacaagagcttttgtatccatgtgtttgtctcaatgttatttcttaaggatagagaagaacatgaatgactgcatggatttttattttttaactaagcctcccggttgacttctgctgcacagtccggacaaatgcctttcagtacatagttgatgctgttcagtgtaaatccttgaggcagcttcaccaccggagtgggaatgttggtgaagcagaaggttttgttgcatttctcgcaatggaaatgggtgtgcaggtcgcttacgtcgcaagagcaactgtcgctgcacacggcatacttgaaggaacccgtcccgtcatctatactgtgtatcagatgatgggagaggaatagggtaagggtacggaagatggtggatttgtccaccgtatccagcatggtttcaaggtcgagcaatgagacggaacggcctgcctgcatcatggtgcgcaataccaggatgcggatggcagtgggctgtatgtcccttttggccaataggtccaaatatttcttttcttccattttttctatttaataagtttctgtatgcgtatggcgttcactatcgcaatgagggcgacgcctacgtcggcaaagacagcttcccaaagtgtggcgattccaccggcaccgaggatgaggacaagcagcttcactccgaaagccagcgagatgttctgccagacaatccggcgggtttgcctgcccgcatgaatggcggtggccactctcgaaggctggtctgtctgtatcactacatcggcggtttcgatggcggcatcgctgccaagtccgcccatggcgatgcccacatggctaagggcaagaaccggggcatcattgatgccgtcgcccacaaaggctattcggttggcagggttgctgcggagtgcctcgatgtgcttcacctttccgtccggcagcaggtctccgtatgcctgggtgatgcctagcttttctgcaaagttagtaacaatggcttgtttgtctcccgataatatctgaatattattgatatttaaagcttttaattctttgacggcgttgacggcatcttcctttaatgtgtctgatagcaacagataaccggcatattttgttccgatggcgcaggccacaatcgtatcgacaattgatgacaattcatcgggatattctatcccgaacttagtcagcaggcgggtgttgcccaccaggacacgcgttccatccatagtggcttgcagtccgtggccggcaatctccgtaacgtccgttgtggcaatcagctctatatctctttgtttggcatagcttatgatggctttggctatggggtgcgtactgtttcgctctgccgaggcggcaagctgtatcaacttctcttccgtaactcccggttgtgcctggcaggattgtacatcgaaggtacctttggtcagcgtacccgtcttgtcgaataccaccgtgttgacttgggtgatggcatcaaggtagttgccacctttgaagaggacacccaggcgggaggcggcgccgattcctccgaagtagcctaacggaatgcttacgacaagggcgcacgggcaggagataaccagaaagaccaatgccctgtatagccagtcattgaagatgaacgagaattgtgcatctgccagcgaatagaggaaggggagcagtacaatcaatgccgccagtccggtgacggcgggcgtatagatacgggcaaacttacggatgaaaagttctgccggcgctttgcgctcggaggcattctgcaccagttccaatatacgggaaagagcacttttctcgaagggtttggtgacttggatgcgtacgactttgtcggtcgcaatcattccggcaagcacttccccgccctggcggatgttgcggggaacactttctcccgtcagtgcggaggtgttgaaggcggcaacttcgtccagcatcgttccgtccagggggacgcgctctccggcttttacttcgatggtttcgcctacctgcacacgttggggagcttcgacaagtgtactgccgtttctgatgaccgttgccgtttcgggacgtacgtcgagcagggcgctgatgttacgcttggctttgtctacggctttgtcctgaaagagctctcccaaggagtagaagagcatgacggcaacgccttcgggatattcgcctatatagaaggcgccgagggtggcgatggacataagggtgaattcgctgaacacgtccttttgcaggatgctttcccaggcttccctcatcaccgggaggcctacggggagataggcaagcaagtaccatataaaaggtacatactctcccttgaagaaggtggcgtcagtagcattcaggatgagccctccgaagagcaatagggcggagaggatgattctccaataatctttcagcagactgtttcttttttcttgtatcgctgtatgtccgtgtgtgcagcagcatttgcaactcatattgtttcctcctattttctattttctgcagcaaaggtagcggaaaggagatgcaacttggttgcaaagtgaaaattcccggactgtccgggctgtcttagatttccagcatccgcttctcccgttccaggtctttctcgttcagcaggggagaggggacggagcaggttttgatgaagtcgcccggctggcaggtgtagttgtagtaggggcgttgctcgtcggtcagctggtcttgggggatgagctggcctttcagttccaggaagtcgtccatggaggtgctgtccgagtgtttgatgaagaggatgcggcgggctatggggttgcggttgtagtccagacagaggtagagccctttgagcaggtggggaaagtcgtacatgggcagttgcaggtagatggtggacaaggccagttggggcgcctcgcgttcgttgaagaagatataggcattctggtggttgttgaagacagcagtgccgaagtgggtggtgttgtaggcgctcatgtgcaccactttgacgtggtcgttgctgtcggcaggggttatcaggtaaggctctacctttaaggcattggaggaggaagagaggctgtaactgatgtagatgccgctgtaattgtacacttcctgcgccgagtggagcatctcatgaagtttattaataatggaaattcatttttgctgtcagcacccgcctctatctttgccgccgaaatcaagaacgaacttaaacgacacactatgttcaacggtgagaaaaaacagataatacagagcaagagactggctgatgccttgttcatcctttgggcgggtggagcggctttgctctcctattcactggtctatgcgctgcgcaagccgtttacggctgcgggcttcgacgggctcgacttcttcgggatggattacaagacggcaaccagcatcgtgcagatttccggctattttatttccaagctgattggcatcaaggtaatttcggaactgaagaaggagaaccgtctgaagttcatcatcctctcggtggcggtggccgagctttcgctggtgctgttcggagcgttgccccggccgctgaatgtctttgcgctgttcttcaacgggctttcgttgggatgcatgtggggagtgattttcagtttcctcgaggggcggcgggtgacggacctgctggcgagcctaatggggctgagcattgccatcagttcgggcacggcaaagtccgtcgggctgtttgtgatggagcatctccacatcagtgagttctggatgcctgcctttatcggtgcctttgccttcccgctgctgtcgttgctgggctggctgatgacgagaatgccgcaacctaccgcggcagaccgggcactgcgctcggaacgggtgacgctggacggcagggcgcgtgcggacctcttcaagagcttcatgccggtattgctgatgctgtttgcggcaaacttgttcatcaccgtcttgcaggacatcaaggaggacttcctggtgaagattctggatgtggaggcggcggggctgtcgtcgtgggcatttgccaaggtagatgcggtggtgacactgattatcttgttgcttttcgggctgatgtccgcggtgaggagtaatataaaggtgctgtgcctgctgctggtgcttgtgacgtgcggcacagcgaccttgggattcgtggccttcaattacgatgggttgcaactgccacccatgacgtggctgttcctccagagtttgtcgctctatactgtttacctcagcttccagacgttgttcttcgagcgtttcatcgcctgcttccgcatcaaggggaatgtggggttctttatcgtcacactcgattttatcgggtataccggtacggtggtggtattggtattcaaagaattcttcaatccggacatcaactggctggatttctataacctgatgtcgggctatgtcggcattgtgtgcagcgtggctttcctatgctcggctgtctacctggtgcagcgctatcgcaaggagaatgcttcgggaccgttggactcttcccttttccgtttgcgccgttggtcccggccgggcaattccttgcttcttgagactgaataataataatatatcgtatgaaaagaattgaatgtatcattatggactgggcaggaactgccgtcgattacggttgttttgctcccgtcgccgcctttgtcgagagctttcgggccatcggcgttcccgtcactgctgccgaaacacgtgcgcacatggggctgaccaaagtagaagaaatccgtgcactgttcaatatagaacgtgtccggacggaatttgaacggaaattcagccgtcccgccggtgaggaagacgtgcaggcacgttatgccgaattccaacgggtgttgtttgcctcgctcgaagattataccgaccctattcccggtgtggtggaaacgatttccgcactgcgtgcgcaaggtatccgcattggctccaccaccggctatacccgctctatgatggatgttgtgctgcctgccgccacagccaaaggctatgcggtagataattgcgtcactcccgacgggttgcctgcaggccgtcctgctccctacatgatatataagaatatggcagacctcgccatcccctccgtagattgtgtgttgaagtatggcgataccatcgccgacatcaaggagggtatcaatgccaaagcatggaccgtcggcgtagtcctcggcagtaacgaactgggactgacacaagaggaagtctcctccttgcctgccgatgagctcgaagcccgtaaggccgatgtccgccgccgcatgcttgccgccggtgcccactatgtggtcgataccattgccgagctccccgcagtcatcgccgagataaaccgtaaacttgagattctgtaacccttataaacgtataaacttaaaaactcaatgcatatgaaaccctacattctccttacccccggcccccttaccacctcacaaaccgtcaaggaagccatgctgaccgactggtgtacttgggacgaagcctacaacctccacattgtggaagaaatccgcaagtccctcgtctccctcgccacccagcataccggcgactatacttccatcctcctgcaaggtagcggcacgtactgtgtggaagccgtcatcggtagcgtcatcaagcctggcgacaaacttctcatactgagcaacggcgcctacggcgaccgcatgggcaacatcgccgagtatcacggcatctcgtacgacatgcttgcttttgacgaaacagagcaagtctccgtcagctacgtcgacgactatctttcgcacaatgccgaaatcacccacgttgccgtggtgcattgcgaaaccactaccggcgtgttcaatcccctcaaggagatagcccacctcgtcaagatgcacggcaagaaactgattgtagacgccatgagcagcttcggcggtgttcccctcgatgtacacgaactgggcatagacttcctcatcagcagtgccaacaagtgcatccagggcgttccggggtttggcttcatcatcgcccgccgttccgagctgttgcactgcaagggcgtctccaagtcactctctctcaacatttatgaccaatgggaagccatggagaaaggacatggcaaatggcgttttacttctcctacacacgtggtccgcgccttcaagcaagccatggacgaactggcagaggagggcggtgtggaggcccgtcacaacagatattgcgagaaccaccgcgtgctggtggacggcatgcgttccctcggtttccaaacgttgctgccggacgagattcaatcgcccgttattacttctttcctctatccttatgccgatttcaatttcaaagctttctacacacaactgaaagagcgtggatttgtcatctatccgggaaagatttcgcaagccgacactttccgtatcggcaatatcggagatgttcatcccgaagatttccggcagctgatagagataattcgcgagtgtaaatactaagctccgaatctgcatagatttaatcgttccatcgtggaggaaaaatcgttccaccatggtggaacgattttttcctagtggtggaataatattttccccatgatggaatgatttgtccttcgccttccttcttcttaagcttccctattaaatttgaccttcgtcaagtctgtaaacgctatcttttcgtatttttgcacccaatttcggaggtatcagatttatggcaacatccagagaaatgacggaaggacgggctcttccgttgattttcaactttactttgcctttactgctcggcaatctgctgcaacagacctattcattggtagatgcagctatcgtggggcgctttctgggtatcaacgccttggcttcagtcggggcaagcacttcggtcgtttttcttattctgggattctgcaatggctgttgcggaggtttcggcattcccgtggcgcaaaagttcggtgcgcgggattatgtcacgatgcgccgttatgtggctgtcagcctgcagctggctgcggtgatgtctgttgtcattgccgtggttaccagcatttactgtgcagatattctgcacatgatgagtacgccggagaacatattcacgggagcctattattacctgcttgtcacgtttatcggggttccctttactttcttctataatctgctgtccagtattatccgtgcattgggtgacagcaagacgccgttttggtttctacttctctctacggtattgaatatcctgctcgatttgttctacattctggtactgggttggggagtggcaggagctgccatcgctaccgtattttcacaaggcgtctcggccatattgtgctacatctatatgatgcgtcgtttcgacattctgaagacaacgcctgccgagcggaaattcgacggtgctttggcacgcacactgatgtacatcggcgtacccatgggactgcaattttccattactgccattggcagcattatgctgcaaagcgccaataatgctttgggtacggcttgtgtggctgcattcacggcagccatgcgtatcaagatgtttttcatgtgtcctttcgagagtctgggcatggcaatggccacctatagcgggcaaaactacggtgcgggcaagccggaacgtatctggatgggagtcaaggcaagcgccctgatgatgattgtttattgggcgttcactttctgtgtactgatgttcggtgccaggacttttgccctgctctttgtagatgcctctgagttggagattttaaagaatacggagttgttcctgcacatttccgtttccttttttccggttttgggactgctctgcatcctgcgatacactatccagggggtgggatataccaatcttgccatgctttccggtgtctcggaaatgattgcccggatactggtcagcctgctggctgttccggctttcggctatctggccgtgtgttttggtgaccctactgcatggatttttgcagatgcctttttaataccagccttcatttatgtctatcggcggatacttcggatgaagaaaaattagtgtatctttgtatcggggagttgaaagaagaatgaccggacgaaaaattatacacatcgatatggacgcattctacgcctccgtagaacagcgtgataatcctgcattgcggggcaagcccattgccgtgggccatgcggaggaacggggagtggtggcggcagccagttacgaggcacggcgtttcggggtgcgttctgccatgtcgtcactgaaggcaaagcggctgtgcccccaacttatttttatcccgggacggatggaagtctacaaatccgtttcccgccagatacacgaaatctttcatgaatatacggatgtcatcgagcccatttcgctggacgaggcttttctggatgtgacggagaataaaccgggcattccattggctgtagacatcgcgaaggagataaagcggaaggtgcgggagaggttgaatctggtggcttctgccggcatatcctataataagtttcttgccaagatagcctcggactaccgcaagccggacgggctttgcaccatacatcctgcccaggcactggactttgttgcccggctgcccattgaaagtttctggggagtgggaccggtaacggcgaagaagatgcacactttggggattcacaacggggaacagctgcgtatgcagtctttggagatgctgacccgcgaatttggcaaagtggggacagtctattatgattttgcccgtggcatcgatatccgtccggtagaggctgtccgcatccgcaagtctgtgggttgcgaacatacgttggagaaggacatcagcaagcgttcatccgtcattatagagctgtaccatgcggcagtggagctggtggggcgactggagcacgccaatttccgcgggaatacgctgacgctgaaaatcaagtttcatgattttagccagattacccgcagtatgacccaaacaaaggagctggttgcccttgacgtgattctgcctttggcaaagcaattgctgcaggaagtggattatgaacatcatcctatccgtttgattgggctttccgtttccaacccccgtgaagagggggaggagaaaggagtctgggaacagctgagttttgaatttagtgactgggagacggaacattcaaataaataatgctatatttgtgttcagtatcaaaaaaaggaaagctatgggctgttttatgaatattttgtggttgatgtttggaggtatcatcactgctgtggagtatcttattgcaagtttattgatgatgttcaccattattggcatcccttttggcatgcagaccttgaaaatggcaagccttgccttgtggcctttcggcaaagaggttcgtagcggggaacgttccaacggttgcctctatgtgctgatgaatattctttggatattcttgggcggcatttggatttgcctttcgcacttggggtttgggttattgctgtgcatcaccattataggcattcctttcggtatccaacactttaagctggcagggctggcattgactcctttcgggaaggatattgttgcggcttgagttattttctgctggtttggaatatgctagagaagaagaagggcggggaacttttcagttctccgcccttcattcattgtatttaaaggtgtttttttacatggttacaaggggctgctttgcaagcagtttttgtagtttaccgttcagtgtttggcacattgttccattacccattgcttgatagcgtttgatttggtactgtaacataaaaatttcatttgcattctttttcataattctcatctttttgtgctctccgcgtttcggaaagcgggttttacatctttcttttatcttataacgctgcaaagatacgaaatgtttgcgaaaaatatgttctataacataaaagcttgtatttctttcttcattttctctagaaattctgtattttgcaatccgtatataacaaatatattacatatctttgcatgtactaccatgttaagaagagaggcaatacttatgaataaactgacagaactttggcagagcccctatcccatgctttatcaacgttggaaagcggtggtgataccttcggtcattatatttctgatactatatatactccaacctttcggcgtttcccggataaaggaaggtgtattttgggtggttgccggttcggcacttatagcggcgggtgcttcgagcatcttcacttacctgcttccggcattgtttcctacctattataaagagcagaactggacgttgggtaaacacgtgttggacgtgttgctgatgctgttactgatagcggtgggaatttgggtctatcattcatggttgatgggtatgtggctggacaagcggttgttttttctggctttgtcttgggtaatggtactggcaccttttccagtcgtgtttttcttgctgtggaaccgcaatttgcaactgacccgtaatctgcaagaagccatggagataaattgccacctttcaaagagggcatctcaagaggttggggcggaaagtaaggagttttctccggaggaagtgttggtgttttccggtggcaccaaagatatgctggaagtgaaggccgtagattttctttatgcggaggctgaaggaaattatgtgaaggtggattatcgactgaagggagagagtacccggaagatgttgcgtgccacgatgaagcaggcagaggaggcggttgctgcctgccccttcattatccggtgtcatagagcctttctggtgaatgcccgcaaggtggtgaaagtggacggaaactctcaaggataccggttgaggctggagggaggtggagaggagattcctgtttcacgtgcctatgccaaggaggtgaaagcactgatagaaaacaagataaagcggtagctattcgtcacagagatacgccattcgtcacaaatcgttggttgtctgtcacatatccgggtcgtctgtcccggatattttttttgcccgtgtccttcctttatgtttgtggcaggaaaacataacgaacatgaagatatgaagtggaaaataatctttttaatgacgggtggacttctctttgtacaagcttccgtagcgcagaagtcggtaacggataccgtgcgtctgacattcaatatcgatagtataggtctggacgaagtggtggtaagagggaaaaagactcctgccgccaatagcaggtggagcgatatgcatccggtggaactggtcacggtgggcggtgcaaacggtgatttgtacaaggcattgcagaccttgcccggtacgcaggtgcagggggagaccggcgaattactggtacgtggtgggagcagctatgagacacagaccttcattgatgggatccatgtgttgaatccctatacctccaatggaataaataccccttcgcgtagtcgttattccaccttcatgttcagtggggtgaattttgcttccggcggggctccgcaggagtacggagaggcgctttcggctgttctgcctttagaaaccaaggattatagtaaagtggataaggtgggcgtgaatgcttccgtagtcggtgtgggtgggggcggtaccaagactttggaccgtggctccttgtccgtcgatctgaattaccagaatctgagcttatatgacaaggtttattccggacggacagaatttgaacggccctaccggatgttttccggtgccacccagttccgtcatacccccggcgatgcgacggtttttaagatctacgcgcaatacgaccggacagacttttctgcctatgagggggatgaacgcagattgttcgctctggccgaagacaacatctacgtcaatgctacctttcgctatcatgcggcaggtggatgggactggtttgcaggggctgcttattcctattataatcgggaggtcaacgctgctgctgtttcgggagataattggctggaacgccagtgggagttgcatttgaagactaagatgtctaggcgcttctcgtcagtattccacctggatatgggggtggagagttatatccgtaactatcggaattgttatctgtactccgacatagacgatgccaaccaaatgtcccccactatcagtacaggtttcttttcggctgcttactatccgctggagcgcttgaaggcagaattgtctttccgtacggagtacacttctctgaaccggaagatgaatttttctccgcgtctggcggtaaattactatttgggggatgtgatgctctctggcatagtgggccgctacacgcaattgcccgaaaatgactggttggtacgtaaccggaagttaatgtccgaggtgtgcatgcaatataatctggggatgcaatacggttatgaaggacgtttctataaggcagaactttattataaagactatagccgcttggttctggaagaaacagatgctggaacggggagtgtacttctgacttccggtggatacggatatagcagaggtgtagacttgttcttccgcgaccggatttcgataaagaatctggaataccagttgtcctatacgtataacatttccaagcgtaaatatcagagttgttccgagctgaccattccccagtatgccactcggcataacgcggcattggttgtgaaatattccttgtcccgtcttcactccatcatcagcttaacgaaccgtttcagcacggggcgtccctatcacaatccattgctgccggggttgatgaacgatgaagtgaagccttataacagtctggatttgggtgtgaccttcctggcaagcaagaaggtgattatccatgcttccgccagcaatatcctcggtcgcaagaatgagtttggcaaagtagacaacaaggttatcctggcttccaaagaccgtttcttctatgtaggagtgtacgtcactttggggaagaaggctgcttacgatgtatccaatttctaatgataactctttaaaaaagaacaaagatgaaagcaatgattatttttttagtatttgtaatgcaaagtgccgcccagctgctctttgcccagaacctgactattgaagtgtgtgacattgaaaaggtggaggggcatctctatgtcgccatctacaattcggaagaaacattcatgaagaaacccttgaccgccttccggatagatgtgaaagatacgtcgctctccattccttgccaggggttacctacgggtacgtatgccatttcgttgtttcaagacgagaacggaaacgggaaactggatactgccgttttcggcattcctacagagaagtacgggttcagtaatgatgctcaaggcgttatgggtccgccgtcttatgacaaatgcagcttcactttttccggagacacgactttggtgatacatctgaagtagagtgattatgtaagtaaaacgggaattaattttcttttgcggacgatttacactatttttgtggttcaaccttaataattgcgttatgaaacgagttgcacgacttctgggatttctcggactggtatgtttgcttgcctcttgcggcaaacgttctttcattacagacacttcttaccgccaacgtgtggagcaagacttcaatcaaaaaaaagaaaggttgccgcagggcgatttgtttgccatattcgatacggacttgacgtcgtacgaacgcgaagctttggagttcctttatgcctatatgcctttggcagacattgccgattattccggagaatttcatctgatgaacgtgcgcgcctcccaaaaggctgccgatgagatgccttggggaaaagttattcctgaggatttgtttcgtcattttgtacttccggtgcgggtcaacaatgagcatctggacagtgcacggatagtgttttacgaagaactgaagaatcgtgtcaagtctctgtccctctatgatgccattctggaggtgaaccactggtgccacgagaaggctatctatactccctccgatgcccgtaccagttcgcctttggcaacggtacgcacggcatacgggcgttgtggcgaggaatctaccttgctggttgccgccttgcgttcggtgggtatccctgcccgtcaggtctacacaccccggtgggcgcataccgacgacaatcatgcgtgggtagaagcatgggcagacgggaaatggtattttcttggagcctgcgaacccgaaccggtactcaaccttggttggttcaatgctccggccagtcgcggtatgctgatgcataccaaggtcttcggacgttatgaaggagcggaggaagtgatgtctgtcactcctacttatacggaaatcaatgtaatcggtaactatgcaccgacggctaaggccacagttacggtcatggacggacatggaaatccggtgtctgatgcttgtgtggagttcaagctctataattatgcggagttctatactgtagcccggaagcagaccgatgcagagggaaaggcttttttgacggccggtaagggtgacatgctggtatgggcttccaaagacggaaaattcggctatgccaaactgtctttcggtaaggaccatgaactggttgtgaagatggataagactgccggcgacggccatgcggtagattttgaacttgtgccgccccccgaaaatgcggagttgccggcggttacgcccgaacagcgtgcggcgaatgaccgccgcatggtccatgaagattccatccgcaacgcttatgtgtctatgttcatgacggatgagacggcgcgttattttgcccggcggtacaagctcgacgaagatgccgtttcacggatactggtcgcttccagaggaaaccatcgggtcattgccgacttcatggcacggttgcgctctgaaaagtccaaaagaggaggtctggacctgctccaacggatttcggcaaaagacctccgcgacgttacactggaagttctgatggaccacatgcaatcccgtatgtgcaagaatgccgaccatttccgcagatatgtgcgcaatccacgcgtaagcaacgagatgctgaccccctataaaggatttttcaagaaagccgtctcaaaggaagatgctgaggcatacaaggcagaaccgatgaaactggtggcatgggtggcccaaaatatccgggtagacaatgactgtaatttgggaggggctcccatttctccggaaggggtctggaaggcccgtgtggctgatgcccatagccgtgacattttcttcgtctccatggcacgcagcatggcaatccctgcccgtatcaacggagtgaccggcaaagtacagttgataggggatgatggtgcgatggatgtggacttgaaccatcattcggaagagccggtctttatggcagaaggaattgcttcgaagggaaagttggtggcttcctataagcctatccgttcgttggataacccgaaatactattctcatttcactctttccaaacagaccccgcagggcagtttgcaattgctttcctatgacgaaggcgatgcagatatgggcggcggtactacatggagcaatctgctgaaggaaggaacagctctggaggccggagattatgttttggtgaccggtacacgccttgccagcggtgcggtactttctaaaaccacctttttcaatattctgccggagaagacaacggaaattgaattggtgatgcgcgagagcgaggatgaggtgcaggttatcgggaactttaattcggagtctctcttcactccgctgccggacgccggctccgcagcccggcagagtctgctgcaggcttgtgggcgcggttactttgtcgtaggcattctgggtgtcaatcaagagccaaccaatcatgcgttgcgcgacatcgcttcattcaaggctgatttggagaagtgggggcgtaagatggtgttgctgttccctaatgaggccaaagccggcaagttcgcccgcgagtcattccccgatttgccctctaccattatttatggtatagatacggacggtatcgctgcgcagattgcagaaagcatgaagttgaagcacaaagagagcctgccgatattcatcatagccgatactttcaatcgggtggtctttgtatcgcaaggatataccatcggactgggagaacaactgatgaagacaataaaggggttatagggctttctgtcatgaattgtaaatagtaatcgtcaaatagtaaatcatccgatgcctgttatcgaaatatcatctttgacccatcccggtgtggagatattcagtacccttaccgaagcccagttacgcaatcgccttgagccggacaaagggctgtttatagctgagagtcctaaggttatcaaggtggctctggatgccggctacgagcctttggcctttttgtgtgagcacaagcacatctatggggatgctgctgaaatcattgagcgttgtggcgatatacccgtctacacaagcggtagggaattgcttgccgagctgaccggctacgttttgacgcgtggtgttctttgtgccatgcgccgtccggttccgaagagtatggaggacgtctgccggggagcccggcgtattgtggttatcgacggggtggtggataccaccaatattggggccatcttccgttcggcggcagctcttggcatggatgctgtgctgttgacgcgtaattcctgcgatcctctgaaccgtcgtgcggtccgggtttcaatgggaacggtttttcttgtgccgtggacgtggatggacggtcctctggatacgctcggtgagttgggtttccgtacggcggccatggcgcttacggacaattccatttccatagacaatcccgttttgaagaccgagccccggttggctattgtgatgggtactgagggagatggtctttcgcacgaagcgattgcgggagccgactatgtggttcgtatccccatggcgcacggtgtagattcgctgaacgtggcggccgcagcggctgttgctttctggcaacttcgcgtttagaagtgataactcaaaaaagcatatattatgttggcatatacttatattgaacacggaaagttcggattgcttgagaaaccgataccggtattggaagatgcacgtgatgctattgtgcgggtgacactgggtagcatatgcaccagtgacttgcatataaagcatggaagtgtaccgcgcgccgtacccggaattacggtaggacacgaaatggtgggcatcgtagagcaggtgggtgccgaagttgagtcggtaaagcccggcgaccgtgtgactgtgaatgtggagactttttgtggtaaatgtttcttttgtcgtcacggatatgtgaacaactgtaccgacaccaatggcggttgggctttggggtgccgtatcgatggcggccaggcggaatatgtacgtgtgccttatgccgaccagggactgaaccgtattcccgatacggtaagcgacgagcaggcgctcttggtaggcgatgtgttggccaccggcttctgggctgcccgtatctccgaaataaccgaggaagacactgtactcatcatcggtgccgggccgacgggtatttgtaccctgctttgttccatgctgaagaaaccccgtcgcattattgtctgcgagcagtcggccgaaagaatccgttttgtccgcgagcattatccggaggtgctggtcattgggccggaaaactgcaaagactttgtgaggaagcatagtgaccatggtggggcagatgtcgtacttgaagttgccggcacggaagatactttccgcttggcatgggagtgtgcccgtcccaatgccattgtcaccattgtggcgctttatgaccagcctcagttattgcccttgccggagatgtatggcaagaatcttgtcttcaagaccggtggtgtggatgggtgcgattgtgccgagatactgcgcctgatagcggcgggacagatagataccacaccgcttatcacacatcgtttctcgttggaggaaattgacgaagcctaccgtatttttgagaataggctggagggggtgataaaggtggcgattgtgggtagatagaaaaagaggatagccaatgaaggctatcctctttttctatgtaattatttacttgctacttacttgctcaaagcctgagccacgtcaaccgcacaagccactgtacatcctaccatcgggttgttaccgataccgaggaatcccatcatttccacgtgagcaggaactgatgaagaaccggcgaactgagcatctgagtgcatacgacccattgtatcggtcataccgtaagaagcaatagtattgcatccccataaccacttactaatctattatagatagctgtgttacagttagatattcaagtatattaaagaactctccagtttattagttactgttatattattaaatggtcgtgaataagtcacaaatgactaactactgaccttgtattattctgttgattattctctcttatagctcgctgttggtctaagcgtttctgttgtttaagcacttcttcccttgtagagggatgcttcttccattcttctattgacctgcgagtgcgctctatccatagcttatgaaattcattgatatattccataaatcttctgattat

SEQ ID NO: 4416 - DNA, 1312 bp, Unknown
  gut microbiota DNA sequence
atcagtagacggttcttggaatgttgtactggttcagtagtcacttcttcccaagccctgctgatatagtagacacagcaaagtgagttgtcctgattctgttgacagtcatcctgctgcatttgcagagcccgtgcttgcttgtccggcaagactgggtgcccctaaaagaggcattctgtctttgtcaggtgcgctgtcctgcgccttcgcccggacttgctgtccggctttgcaaagatattgcatccttctttttattgctacttgtggaaggatattttttcttcttccacattttcttctgtattcccttctccagatgcgccacagcaggtattttatacccgatactcatatgcggtctgcgatggttatagaaatgtatgtagcgagctatgacatttcttgcatgcccgatgtcgttgaaccggcctcgaggatggctgctttccgccttaataatcccgttgatacgttccgcaacggcattgtcggtgggtttgtagtcttccgtcatactgatggcaatgccatgtttctgaagaagtgccacgtatgggtcgcaacagtattgtacgccacggtccgagtgatgtatcaggcccgtaagattttcatctcctgtcatttcaacagcctgctctatagcctgttgcaatgcattgatggttgccgatacccgtaaggtgtcggcaagcacccatcccactatcttatgggagtaggcatccgtaatcagatgcagataacagacttcaccattggcaagtggtatataagtaatgtcgctgacccacaactggttggctgaagtcaaggtcagtcctttgattaggttcttccacttgtggtagcgatggttggagttcgtcgtatgccgggtcttgcgggcaggaagcatcaagcggtgttgccggagcaatgcataaaagctgtcccgcccaggcatgaacccggctccaaaaagcacggtgagcataatccacagtttgtaacagcctatacccggatcttcgatacggatatcacggacagcatccagcatgagacgttccctatgtatctgactctcaatgtcagcctttgactggtagtaggcttgacgacaatggccaaacagacggcaggccaacgcaactttcaggttgcgctgactgaccagttccgttacgatttggccccagatttttttctgatagggatgttgaagagttcttcagcacgcgtaatcatcaattcacgggcttctgtttccagcttggagaaagacagagctttctccagctctttaatgcgcttttttaattgg

SEQ ID NO: 4417 - DNA, 29862 bp, Unknown
  gut microbiota DNA sequence
gatggataaaatcattcttcccggtttgtctgccgtgagtgacggcttgttccatttatggaatgtgcggtcatacacggctttccgcttccggctcaaaaggacaacgaaaaaagaaaaatcgtcaaaaccccgtaaaagcacctctttggcataagcacaaaagaaaggggccttgtctcatcagtctaaactattgtttaggcgtgaggcaaagcccttttctccgcttatgcggcagtcggcacacgttcgttcaaaatctttttgggcgatggtgtgctgacggataaaatcgcttttacggaaaaacttgtgtgagaagaaaaaatcaggagattcatttctaaatctcccgttttattgttacttttgcatacgaagagttctttgaaggttacgcaacgcacagaagaataatgcagtagataactaactaattcgtaacctattactattatgagcgattacccaatgctcatttccaataaattacactcttttcgtaacttcatggtacaaagatacaacatccgaaagacaatgtcaagcaatccggtgtttttctttactgacgtcccattctttatacatgcatcagatattgcttgaagtctgcaaagtccttcgacattggcaggctcttcttctcaccgcgcataaaggcctgaagcttggcaggtatttctacggcttcaccgataatcttctccactgtatccttgaacttcgccggatgggccgtttccaagaatacgcccgtttcgccgggtttcagtccttcggccagggcccggaagccgcaggctccgtgcgggtcgagcaggtaatggtccttcttccacacttcccgcatggtttcggcaatctgctcgtcggtataagtggcaccgctgatttcggcagagatggcggcatggctgcctccgtaaaggtcgagtacgcgggcaaagttgctcgggtcgcccacatccatcgcgttagcaatggtagcgatgctgggacgcggcgtataaacacctgtctgcaaatattggaagaagatatcattgcggttgttggaagcgataaagcgttccacgggcagtcccatacgcttgccgaagaggccggcagtgatgttaccgaagttaccgctgggtacacacacgacggcattgcctcccttgccggcacgtttcagttgagcataggcataaaagtaatagaatgcctgcggcaagaaacgcgccacgttgatggaattggcactggtcagttgcagatgttcgttgagctcgcggtccataaaagcggatttaaccaaagcctggcaatcgtcgaacgtaccatcgacctcaatagccgtgatattctgccctaaggtagtgaactgtttctcctggatttcactgacttttcccttcgggtagagcacatagacgtgtatgccttccacaccgaggaaaccattggcaacggcactgcccgtatcaccggaggtagcaacaagcacattgacttgcttcttgccctctttcttgataaagtatcccagcaaacgcgccatgaagcgaccgcctacatccttaaaggcaagcgtcggaccatggaacagctcaagcgaataaatattctttgtcacccggaccagagggacatcgaaactgagtgtgtcataaacaatctgtttcagcgtatcggcaggaacatcctcgccaaagaaagcatctgccacgcgataggctatctcctgaaagctgagtgtatcgatgctatcgtaaaactcttgtggcagagttttgattgtaaagggcatgaaaagccccttgtctgcggcaagcccctttaccacggcctcttcaagagtggcttcgggggcttgtttgttggtgctataatatttcattgcggtatttttttattcaccacagagtctcacagaattctctataaataaaaccccgtaaaactctgtgttactctgtggtggaactcataaattcattaataaactcgtcttctttcatcagtccgtaactgccttcgcaggctgccacttcatcaaatgtccgtacttcgtcagcctcgatacccggatgccaaatgaggaacgggataggttcggccgtatgcgtacggagttcgcagggagtgggatggtcgggcaatacggagatagcaacgggttcctcccaatccttcacagcctcgtagataggacctacggcacggctgtccagattctcaatcgtcataatcttcaaggggacatttccttcgtgaccggcctcatcactggcctcgatatgcaggtagacaaaatcatccgtccgcaatgcatcaagggcggcagccaccttattctcatagttggtatcataaagccccgtcgcaccttctacggtgatgcgccgcaatccggcatagtagccgatgccgttaatcaaatccacggcagaaatcacagcaccacgcttcacctgcgggaacttgtctgaaaggcgctccatctgcggacgataaccgggactccacggccagatgctattggcagggtccttaccctcggccttccgcttcatgttgaccggatggttttccagcaacacttgcgaacggagaatcaaatcattaatcaaatcggcagtctgcttcggagtaagctctgcaccgccttcggggaccgaaatattctccgtaccctccatcggcttcaccatcaacggacggaaaggcctcaaagggacatcgtggggcggcgtacagtcaatgcgcttgtcccctccttttattaccagcagatggcggtattgcacgcccgtatggaaatgcacgcggtcatcacccaaatgctcctgaaggtattttaccaacacatccgcttcctctgtagtaatgtgcccggcagaatgattcttgatattgtctccctcgatgcagataatgttgcagcgcatcgccatctcacccggctgcaagtccacaccgatactcgccgcctccaatggaccgcggccttcgtacaccttcggcaggttatagcccagaacggacatattcgccacctcactgccgggatgaaatccctcggccaccgtcaccagccttcccacacgtcccatgcgtgccagcttgtccatatagggagttgcagccgcctgcagcaaggttttgcctcccagagccttcacgggccagtcggccataccatcacccaatataatgatgtgtttcatctttctatattacgatttggattaaacgtttgcaatgctcataatatccgcaaatacccccgcagccgttacacccgcaccggctccgtagccttgtatcatcatcggatattccttataacgtgccgtggtcagcaggatgatgttattgctgccttccagcccgtagaacggatggttggcgccgacttcctgcaaaccgacagatgctttgccattttccagtttggctacgaaacgccaatgcttgttctcggcttccaacaccttgcggcgggcttcgaaatcggcatcgaggctcggcactttcttccagaagtcatccagggagccttcaaagaagtcatcgggcacaaagaggttcttctcaacatcgctctgttccaaacagtaaccggcctcgcgtgccagaatcaccagtttgcggataacatcctttccgctgaggtcgatacgcggatcgggctcggagtaacgttcctcctgcgccatcttaatggtcttgctgaaaggaatgtcggcactgattttattgaagatatagttcaacgtaccgctcagcacggcttcaatcttcaatatcttatcaccgctatggataaggtcgttaatggtattgatgatggggagtccggcgcctacattggtttcaaacaagtacttcacaccgcgttggcgggcaatctgtttcagttcacggtagttctcgtattcggaagaagcggcaatcttgttagcagccactaccgaaacattgtgcagcagtaagtccttgtaaagggaagccacgcctgcacttgccgtacagtccacaaagacagagttaaagatgttcataccgataatctcattacgcagcgtttccagagagctgtcctttcccttctcctgcagttcttcacgaaaacgtcccaaatcgaaaccttcgcggctgaacatggctttgtttgcatcggcaatgcccactacattcagctgcaggccgttctcctgcatcagcttctggcgctggctgtggatttgctctatcaagctgccgcctacggttcctatgccgcagataaaaagattcagtacctgatattccgacaagaagaaagaatcatggatgacattcagcgatttgcgcaatgatttgctgtccactacaaacgagatgttggtttccgaagcaccctgcgcacaagcaatcacattgataccgttacgccccaacgtaccgaacaactttccggcaatacccggtgtatgcttcatgttctcgcctacgatggccacggtagccaggttcttttctgcctgaataggagaaatttctcccatctctatttctttggcaaactcctcgttcagcacctcgcaagccagatcagcatccgcattgcgcacaccgatagacgttgaattctccgaagaagcctgggacacaaggaacacactgatgccattctttgccagcgccttgaagatacggtagttcacaccgatgacacctaccataccaaggccttgcactgtaattaggctcgtatcattgatggatgaaatacccttgatggccttgctttgcgggtcggaaacctctcgcttgatgacagttcccacaccctccggattgaaggtattcttcaccagaatggggatattcttgtggcaaaccggatagattgtaggcggatagaccactttcgcaccgaagttacaaagctccgtagcttccacatagctcaattcattgatagtgtatgccctggaaatcacacgcgggtcagctgtcatgaatccgtctacatccgtccagatttccagactgtcggcatccagtgcagcagcaatgattgccgccgtatagtcagagccacctctacccaggttcgttacctctcccgtcattttgtctgtggagataaaacccggaaccaatacgcgtttgggcaggctactgaatgtctcgcgcaccaacgaatttgtcagctccgtatccagcacatgcttggaatgcttcttttccgtcttgataaacttgcgtgagtcaaaccactccgctcccgtcaactgggcaacgatgatagatgaaagacgttcgccatagctcacaatcgtatcggacgtcttctgcgaaaggtcctttatcagataaatgccctgaaagatgtccttcagctcgttgagcaactcaccaatctggcgttgcaaggcaacctgcgcctcgcctgccggaatcacttccttaatcatttccacatgacgatagacaatctcccggaactcattctcgtaagaagcatcaccggctgccgccattctagaggtgtttatcaacttgtccgtgatgccgcccaatgcggacaccaccacgataaccggttcatcgactgcttctacaattctcttgacgctcaaaatactgttcacggaacctacggacgttccgccgaatttcattactttcatttctctttatattgttgagatggttgatacaatgtgtcggaaacaagctgctacggcttgcattgactttaattaaatggaaaaactgcttgaaaatggtgtaacacgtagaaacacaaaatactatccctaacccctaagggtcatggtccacatggatgtgactgtatgttgatagtacttgttcatagtctcttgtttctatcatttatgataagtgttgcaaaagtaacaataaaaacattcaatctatcactttttgcgacttttttgcgataaaaatacagaaagcctctaaaaaggcaagaaatatgcacaacttacggcttacactttcacactttccataccttttttctgtatatccgtttattcttttctaacattttgctatcattctcaatatatatcattatatttgcatggaaaacatgaaagaaaagtgcgcatgaacccagaaaacacttccgttttgctaatatacaccggtggaactatcggaatgatagagaatgcagaaaccggcgccctggaaagcttcaacttcgagcagttgcagaaacatgttcccgaacttcagagatttgcgttccgtatcgacacttatcaattcgacccacccatggattcctcggacatggaccccgatgcctggcgcaaactggtacgcatcatcagcaacaactacaaccaatatacaggcttcgtcatcctgcatggcacagacaccatggcctacacagcttctgcactcagcttcatgcttgaagggctgaacaagcccgtcatcctaaccggctcgcaactgcccattggcgtgctccgcacagacggcaaggaaaacctgctgaccagcatcgaaatagccaccgaccgccactccaacggacagcccatcgtacccgaagtctgcatcttcttcgaaaaccacctgatgcgcggcaaccgtaccaccaaaatgaacgcggagaacttcaatgctttccgttccttcaattatccggtactcgcttccgccggtatacatattaaatataataatgtgcaaattcatacgcacggcactccccacgaactggagcctcattatctgcttgataccaacatcgccatactgaagctttttccaggtattcaggaaaatgtcgtggcagccatacttgccactaaaggactgaaggccgtagtcctcgaaacctacggttccggcaacgctccccgaaaggaatggtttctacgccgcctgcatgatgcctgcgaacaaggcatcatcattgtcaacgtcacccaatgcagtgccggcactgttgaaatggagcgctatgaaaccggttaccaactgatgcaggcaggagttgtctgcggatatgacagcacaacggaatctgccgtaaccaagctgatgttccttctggggcacgattatccacctgccgaaatacgcgaactgatgggacgaccgctggcaggggaaattaccgtgtgaagcacaactatcactgcaccggggtcaattctcccgtcacagaatctattatgaaaccgctgacattgatatcattcggtatcagcggatgattgataatagcttccaccgtaccttttaccgatttctccgtatcttcgaatccatacagccaagactcgaaatccactccgcagaaacgaatcatatcaatcgtctcctgcttgatgccccgggccttcatatgctctatcatctgggcgctgctcatgtggcacgcaccgcaatcggagtgggcaataaccatcacttccgtcacgcccaactcgtaaatggccaccatcaggctacgaatgacactaccgaacggatgtgaaatgattccacccgcattctttatcatcttcacatcgccgttcttgatgcccaaggctgccggcagtaaagcggtcaaacgggtatccatacaagagaggatggcaatcttcttatccgggtatttattcgtgatgtatttctcataccccttctcggctacaaaacgcttgttgtatgcaagaatatcttctatcatggcttttataacatgttattgttttctactcacaaaaataaaaaaactctatgggagtctgcaagccctgcatcgaaaaattgtacctttgggcaatcattttagaagagaatgcacaactatggctaaagagaagacggtttatgtatgcagcaactgcggacaagactctcccaaatgggtaggcaagtgtccgtcgtgcggaatgtggaacacgtatgtggaagaggtggtacggaaagaagtggtgaacaagcgtcccgtatcgggcatagagaccgccaaagccaaacccataaccctccatgaaattgtagccgatgacgaaccgcgcatcgacctccatgatgccgaactgaaccgggtactaggtggtggtcttgtacaaggatctcttgttttgattggcggcgaaccgggcatcgggaaatccaccctggtgctacaaaccgtactccgtataccggagaaacgtatcctctacgtctccggcgaagaaagtacccgtcaattgaaactgcgtgccgaccgtttgacaagtgcttccagtgattgcctcatcgtatgcgaaacttccctggaacagatttacgtccatatcaagaacatccgcccggacatcgtcatcatcgactccatacagacgatttctaccgaaacccttgaatcgtcgccgggaagcatcgcccaggtacgggaatgttccgcctccatcctgcgctttgccaaggaaacgcatacggcggtcatccttatcgggcatatcaataaggaaggaagcatagccggccccaaggtactggaacatatcgtggataccgtactccagttcgagggcgaccagcactacatgtaccgcatcctgcgtagcatcaagaaccgcttcggaagcactgccgaactgggtatttacgaaatgcggcaagatggattacggcaggtgagcaacccatccgaactactgctgagccaggaccatgaaggtatgagcggcatagccatcgcctccgcgatagaaggcatcagaccgttcctcatcgaaacgcaggcattggtcagcagtgccgtatatggtaacccacaacgctctgccacagggttcgacatccgccgcatgaatatgctgctggccgtattggaaaaacgtgtaggcttcaaactggcacagaaagatgtatttctcaatattgccggtggattgaaagtgaacgacccggcaatagaccttgccgtcatcagcgccatcctctccagcaacatggacacggccatagagccagaggtgtgcatggcaggagaaataggtctgtcgggagagatacgcccggtaaaccgcattgagcagcgcatcggagaagcagagaaacttggcttcaagcgttttatacttcccaagtataatatgcagggactcaatacccaaaagataaaaatagaattaataccggtacggaaggtagaagaggcattccgtgccttattcggataatcgttatgatacaagaataccaactacgcgtattgcccgaagtagcggcaaacgagcaacgcctgaaagagtacttaatacacgaaaaaggactgaatgcacgggagataaccgcagcgcgtatcttgaagcgtagcatcgatgcccgccagcggaccatctacgtcaacctcaacgtgcgtgcctacttgaacgaaatgccaaaagaggatgaataccaacataccttatataataatgtagaaggaaagccccaagtgatagtggtaggtgccggccccggaggactttttgccgccctgcgactgatagagctggggctgcgccccgtcattgtggaacgtggaaaggacgtacgggaacgcaagaaagacctggcgcaaatcagccgccagcaactcgttaacccggagtccaattacagcttcggagagggaggtgccggagcctactcggatggcaagctgtacacacgcagcaaaaagcgcggcaatgtagacaagattctgaatgtcttctgtcaacatggagcctccacttccatactggtagatgcacatccgcacataggtacggacaaactgccgcgtgttattgaaaacatgcggaacactatcatccagtgcggtggcgaagtccactttgaaacacgcatggacgccctgctcatagagaaggatgaagtcaaaggcattgaaacaaataccggcaagactttccttggcccggtgatacttgccaccggtcactctgcccgggacgtataccgctggcttgccgccaacaatgtagagattgaagctaaaggcattgccgtaggcgtacgactagaacaccctgccaccttgatagaccaaatacaatatcacaaccggaacggacggggaaaatatctgcctgccgccgaatatagttttgtaaaccaagtggacggacgaggagtatatagcttttgcatgtgtcccggcggcttcgttgtgcccgccgccagcggtcccgagcagattgtagtcaacgggatgagtcccagcaaccgcggttcccgttggagcaattcgggaatggtggtagagctacgcccggaagacatagagcaatttactattgacaatctacaatttacaatttctatgcagcacgacagcgcggctaattgtcaattgccaaccgtcaattcccaattaagcatgatgtattttcaagagtatctggagcgcctctgctggcaacaaggcaatatgaagcagacagcaccggcacagagaatggcagacttcactaagaaaaaactgagttacgacctgccggaaacttcgtatgcaccgggactggtttcctcacctctccacttctggatgccctctttcattgcagaacgcctgagcaaaggtttccagctattcgggaaatacagccgtggtttcttgacgaacgaggcgacaatgattggagtggaaacccgtacttcggcgccggtacgcataacaagagacaaggagacactgcaacatgtacgcgtaaaaggattgttcccttgcggagaaggcgccggatatgccggaggcattgtttctgccggaattgacggcgaacgatgtgcggaagcggcaaaggcattctttgattaagctataatatttacatccaaattttgatttttcactttttctcgtttaatttgtaaactattatcacatatatgttgttatattgtatttattatgaggttcatcataaacattgtatgctttctattccttttgcctctcatagctacggcgcaaacatataaatacataggggtggaaaacggattgagcaaccgcagaatcttcgacattcaaaaggattcggtaggttacatgtggttcctcaccaacgaaggcatagaccggtacaatggaaaagacatcaagcattataaattaatagaagaaaacaaagagtcaagtttccccatccatctcggttggctatattttgaagagaaagggaaattatgggtcataggtaaagccggtcgtatttttcaatacaaccaagaacacgatgtgttcaacagagtatataaactgcccaagacaccggtcaatatcagctacggctatatggactgcaatcacaggatttggctgtgcagcagatacagcatcgctctctacgacacacaaaccggagaggtccatcaaatgtccaatgaactgaaaagcagcattacaagtatcgaacaagtggacaataaccacttcttcatgggtaccgacaagggattgcgatatgtcaaactcgaaaatgagacattgcagattgtccctcttgaacctcttgacaaaatccaggcccaaatcagttcactctatttccaccaagaatcacaaagacttttcatcggtacttttgaaaaaggcgtctttgcctacgacatacggcaacaacggattatacactccaatacggatttgagcgatgtaaacattgcccgaatcaagcctctgaaccagacagagctattgatagcgacagaaggtatgggtatacacaaaatcaacatgaactcgtgtatctcggaaccgtacatcgtctccagctacaaaagccacaatgagatgaacagcaataacatcaatgacatttatattgatgaagaaaagcggatatggatagccaactacccggaaggaattaccattatagacaaccggtacaaaagctacaactggataaagcattctatcggaaacagacaatcgctggtcaacgaccaggtacactctgtcattgaagacagtgacggagacctatggttcggaacaagtaacggaatcagcctttatcaatcgaaaaccgggcagtggcattcattcctgagctccttcgaccatcaactgaaaaacaagaatcacatcttcattacgctatgcgaggtatcacccggcattatttgggcaggaggatatacttcgggagtatacaaaataaataaaaggacactctcggtagaatatttctccccttacctgctcaatccggacaacattcgtcctgacaagtatatccgcgacattgtaaaagactccaaaggatatatctggtccggagggttctataatctgaagtgcttcgatttgtccctgaattccgtccgtctgtatcccggaataaattccgtcaccgccattacagaaaaggacgacggacacatgtggattgggacaagtgccggactgtatctgctggacaaagagtcgggtagattccaatatgtcgccttgcaggaagagacgacctacatcaacacactttaccaagcggaagacctctctctatatataggaacaaacggctccggagtggttgtctacaacgcaaaggacagtacgttcaagcattatcacaaggacaattgtgccttgatttcaaacaacatctacaccatactccccgagtcggacgggcatatcctgatgagtaccgaaaacggaatcagctgtttccaccctacggagaagacattccacaactggactaaagagcaagggctgatgtcctcctgcttcagtgcctcttccggaacgctacgcaagaacaagggttttgtctttggcagcacagacggagccatcgagtttcccgaaggaacccgtttgcccaagtacatctactctcctatgatactcagcgattttcagatactctatcagacagtctttcccggcagtccgaattcccccttgaaggaaaacatcaaccagacagaccggttaaagctgaaatataaccagaacacttttttccctcagtatttcatccatcaattatgacgcgccggacaatgtcactttctactggaagctggaaggcttttacgatgactggaaccgcctgggtgaagaagggcatctccgcttcaccaaccttgcctcgggcgattacaaactttacatacgggcggtatccaaggaagagccttatctttattttgaagagcgaagcatcgacatcagcattgcgcgccccgtctggttcagtttttgggccatagcctgctatgtcctgctgacagtactgatgtccgttgtcggtttccgtgtcatggcactgagaaaacagaaaaagatatccgatgagaaaacccgtttctttgtcaataccgcgcatgatatccgcacgccattgacactgataaaggcacctctggaagaaatgcttgaaaacaagacactgaacgaagccgagaccaacaatatgcacatggcactgagaaatgtcaactccctcctgcgcatgactaccaatctgataaactttgaacgggcagaagtatattcccctcatctgtacatagcagaatatgaattgaatacttacatcaaggagatatacaacaatttccagacctatgccaccataaaacatatcactttcagatacgaaagcaatttcagctacatgaatgtatggttcgacaaagagaagatggactctatcctggaaaatgtcatatccaatgctctgaagtatactccccaaaatggcgatatactcatttctgtttatgacatgaaaagctcctggagactagaagtcaaagataatggaataggaattcccgccaaagaacaaagaaaactgttcaagatgcacttccgtggaacaaatgccatcaactccaaaataacgggaagcggtatcggtctgatgctggtgcggaagctggtaagcctgcacaatggaaaaatatacattgagagcaccgaatgccaaggcagtactgtcagaatcatccttcccaaagagaaagaacagttcaagaacttcactctgtccgttaaggataagaagaccttctatgaaccggatgtccccaccgttcctttgaaacttgccggagaactccggactgaagacaatgacaaactgcatcgcatcttgattgtagaagacaatgacgagctgcgcaactatctcttccagtcgttctctccgatttacaatgtacaagtatgcaacaacggcaaggaagcgctgaccattgtaaaacaattctggccgggactgattctttccgacatcatgatgccggaaatgcgaggcgacgaattatgcatcgccatcaagaacgatattgaaacatcccacatcccggtagtactgctgacggcactgggagatgaaaagaacattctcgaaggactccatatcggtgcggacgaatatattgtaaaacctttcagcataaacatactgaaagccagcattgccaatctgcttgccaaccgcgcattgctgcgcaagagatatgcgaatttggaaatcaatacagaagaagagccctccacaactaccacttgctccaacagtctcgactggaaattcatgtcgaatgtaaagagacatatcgaggagaacatggataatcccgatttcacagtggacgtattgtgctcgctcctgaatatgagccgtaccagtttctacagtaaactgaaagcgctgaccggccaggcaccggcagatttcgtacggaatatccgtttgaaacatgctgccgagctattgaaagaagggaaatattccgtgactgaagtagcagaaagaaccggtttctgcgatgggaaatacttccgggaagtctttaagaaatatttcaatgtcagccccagccaatatgcgaaaggagacactccccgctccccaaaaggagagggagaatagttctgcataggagaatttttcattttgcagccccgcacagacaaaccctaaaaaataatccgtatttttgcagaaacaaaaaaacgagaatgactcctgaaatagcaatcgtcgactccaacaccctctcctgtctgggactgcagaacttgctggaggaaatcatcccgacagccatcatccgctctttccgttcctttggcgaactgatggatgatacgcctgacatgtatgtacattatttcatctcttcacagatttacttcgagcataccgctttctttctggagcgcaagcccaaaaccattgtgctggtcaatggtgaaaccgtcccccaactgtcgggcatgccgacgctaaacatctatcaggacgaacaaaatctggcaaaaaacattctgcagctgcgccaatacggaaaccaatacagacaaaaccacggaaagccggcacccgccagacactcggatatggcaataaatacagccgccgggcacgacctttccgcccgcgaaatagaagtgctggtgctgattaccaaaggtctcatcaacaaggagattgccgacaaactgaacatcagcctgaccaccgtcatctcacaccgcaagaatatcaccgagaagctgggtatcaagtccgtgtccgggctgactatctatgccgtgatgcacggatatgtggaagcggacagaatataatcctacaaccggatacatcagaagcgaagtcttttcagaaaaacttcgccccaattagtgtgctaatgtgctaacatctaatcgttcctccgtggggtaaaaatcgttccaccatggtggaacgatttttaccccacggaggaacgatattttccgcatgatggaacgatttaagattagcactccaggaacgaaatcctaataaatgaggattgtcccttccgcaagaatccctttactttgcaggcgctaaaaaaccagtttatgaatagatatagaattttgaccggtatcttctgcctcctggcaaccggcaacgtacttgccgaagaggcagacaccttgaaagtggtggatgtagaggaaataaccgtcattgccgcccccaaagaaaaccggaaactgcgcgagcagcccgccgccgtcaccctgctttcgcagcaggacatgcagaacgcacaggtgaactccatcaagaatctgacatccgtagtgcccaatatgtttatccccgactacggctcgcgactgacttcggcagtctatatccgcggcatcggctcgcgcatcaacactccctccgtaggactttatgtagacaatataccttatatagacaagtcagccttcgacttcagctatgccgacgtagagcgcatcgacgtgctacgcggtccgcagggcacgctctacgggcgcaatgccatgggcggattgattaaggtgcacaccaaatcgcccttctcctaccaggggacggacttccgcatgggggcaggtacgtacaatgcctataatacctcgctgacccactatcaccgcctttcggaacggttcgccttttccaccggaggtttttacgattatcaaggaggattcttccgcaacacggtgagggacgagaaagcggacaaggggcaatcggcaggcggacgcatccgcgccatctacctcccctcggacaactggaaggtggacctaaacatcaactacgaatacagcgaccagggtggctacccgtatttctaccaaggcagcctggcccccgaagcacagagcgagccgctgaagccctacatcggaaaaatctccaataacgcccgtagcaactactaccgcaacctgctgaacacgggtctgaacctggaataccaggcacagcacttcacgttgagcatggtcaccggctaccagtttctaaaggactgcatggacatagaccaagacttcaccgccaacgacatctataccctgcaacagaaacaacgctcccacgcactgagcgaggaaatcatcttgaagagtaaaagcggtagccgctggcaatggaccaccggcgccttcggcttctaccaatggctgaatacggaagctcccgtcactttcagggaagccggaatggggatgctgaaccagatgttgggcagtgtcatcccatcgcaaatacaagtagagatgggaccatccattagtatgaatatcctgccctcactgggcatcagcagccggaccatgcccatcgggggcagtttcaacactccgctgctgaatggggcactctttcatcaatccaccttcagagatttattcgggctgaaaggagtgtcgttcactgccgggttacgcctggattatgagcgtatgaagatggattacaactccggcaccagcctggactacaaggtgggcatcaagggggaaatgaagcggggcgacgtcgtcatccgcgaaatagagatgatgccggagacggcgctgaccgtagagtcgcgctaccaaggaaacattgataaggattatcttcagctgttgcccaagtttgctttgcagtatgactttgcgcgaaacagagggaatgtgtatgcaacggtcagcaaaggttaccgttcgggaggctacaacgtgcagatgttctccgacctgctgcaatccagtttgaagaatgacatgatgcggcaaagcaaagaggcgattatgcccaacgtgccggatgcctacaaagagctggtgggcaaatacttccccgatgcgggagagaatccggatgcaaaatccgccaccgtctacaagcccgaacagacctggaactacgaaataggaacacacttgaatctgctggacggacgtctgcatgccgacgccgccatcttctggctggaaacccgcgaccagcagatttcacgcttcgccccaagcggactgggacgcgaaacggcaaatgccggcaaaagccgcagccagggggcagaggttgccttgacggctgccgttgctacagacttcacgctgaatgcaagttatggttatacctatgccacctttaaggattacatcaccaacgagaaagtgaatggggagcttcaggaaatcagctacaacggcaagtacgtaccctttgttcccaagcataccatgaacgtgggcggtcagtacatcttccgcatccgtccggggcactggctggaccgcatccagctgaacgccaactacaccggtgccgggtgcatctactggaccgagaagaataccgtgagccaagccttctacggcacgctgaacggacgtatcagcttccagaaaggacatggacagattgatttctgggtgcgcaatgcactggacaaagagtatgcttcgttctattttgagagtatggggaacggatttatgcagaaaggacggcctgtgcaggcgggaatagagttgaggtgcaggttctgattggagagctttgtccctccgaaagtaaaggaaaatagaaacggtcgttcgggtacttacacattgcatacccgaacgaccgtttctatgtttctatctgacagaggagaagttatcctctatgtacccagttttcaatttcaatattaggtattctttccagatatttcttgttttcagtaaccattatcatttggttagccaccgctgtacatcctataaataagtccaaatcctcaatgggagttccttgactatataaggcagccttactccgggcataacaacataaagccgaggacaaaggtattaccttgatatcttggcagaaatcagtaacaagctgcaagtttctctccacattattacttcgctctgcaccgaacaacaactctgctaccgtaacctccgaaatgcaacaatgttcccagcccaccttttcaatatgttcgtctactccaaatttctgacgcatgaagtgaacacaaatattagtatcaagcaaatatcgtttcattcgtcaaaggggctaaagttttcttcttttcgagaaaggcgtgatgcatatatatcatcattgatttcatcagaatcacgattgtccttccaactaccggcatactttgcaagcatacgcttagtcagcaatttgctatctgccgctgtcggaatggaatgactattcttattcaaaacctccttcatatattttctgagactctccaatgcagtactgctattgatattgactatctcacgaatcaactccaattttccggcttccaactccaaactactcataatcaattcctccttttaaaagttcaactacaaagttacattttcctactgaatatggaaaagttacaaagcttttttattcattgatagctccgcaatgcgggcagactcccttctccctcagtttctgcccgcatctgccgcaacgatagcgtgaagccagcagcgaaatgcgaagccttttgaggaatacccatacaaaagcggtcaaaaacaagtatccgacgtagatagatgtagtcaggataaagaaaaaataacagaagatgcagcaggaggccagccccaacagatagaatacggccgccgccggacttaactggcgaaacaaatcgtcgagtaccgccagcaacaccactataaacagccagatacccatcagaaaagcagaaagcacaagcggtaccttgaacggcgacaaggtaggattaaaatagaagtgttgccacgtctccggcgcaaacacttgtatagattcgtaaatagtggcacagaacgccatcagcagacatagcaacaacggatagagactgtctatatcattaaagtacaccatcctcaactgtttgcgccgaaaagcccggaacagccagactgccacaaacaaggcaaaaataatgataaaataagaggcatgggtatcactgaacaagtagatggcctgcgaaatgctgtctgtaggaacaaaagcatgcatcatttcggactcccgcaaccaaccctgcacttcctgcgaatgggcaagcttcacccatacactatccacactgtcggcaggatggatggcgaactcggcaaccaccacgcggtctccccgataaagcatattatagcagtccttcacgggcagacaagccaaattcacagaatctgccagcacttccagattggtattccaagtataatgccgctcaaaaagataggccagcgaatcacgcgtctccttagacagatgttcatcttcaagattaggacgggaataatggcaggaaactaaagcaatgaagcatgaaaaataaagaatgcagaataggagggaacgcagtgaacgcaaaggatgtttgtccctgcccgcttcccggtaccggtcatttgccagcctttcattatgtgcccgttcctcactcctcattttcaagtctttattagtaattcctcattcttcgtccttcattaaagcggctcttcatgagcaatgactttcatctggcaattcttgcaatcaaaagacaagcggaaacgcttgccgtccgtcccaaccaaataataaggttccctataaggagaatgtcctttctgataggtgggacaccatcccatactgaaacgcaggcaatgtttgcagaacatgagtacagcatccggaaccgcttgtgcctcgtaggcaggtgctatagacgaaagtccatgctcacggtaaaaactccgggcagcactgttcatcacattgcccagataggtcagtgaagtagcagggaaagcatggcttgtcggtttccagacagccaactcacgacgataagtaacacgccgagccacaatcagcctatctatcacctgccgacgccagtctgccaccacggaagcaggaagaaaccagttttcagagagattgagcctgatacccgacgcctcttctgataaatgcccggctacctcgaaaggggtattccccaacttagccagttggctgcgcagattatccgcctgtggcgtgcgtgccggttctttcggataagggaaagaaagtgtcacgcggttatcattctcgtccgcagccgtcaggctaaacccgaaagaagtatctgccaactcccaacaaacaccgattttgcgttcggaggatttacgggtaaggatacgttcaaactcctggtcgaaattgcgataaagccgtgtacgaggtttgatgcgaggcacttcccctgccggatagagtttgttaccatccacccggttgatacggaaaccctgcaaacgtccttgctcgtccaaaaaacagacgccgtctccgttgtggaaaggcttcacgcctgccaccgtaatatatccaccgcgctgttccttcaaagtgcccatctcctctcctaaagatttgggcgtatcgaatgaagtgatttcccctcccctgccttgtaggaagtaatgcgtgaaaccacggctgaagctcttgtcaagctgcggttggaagtcgaaatggcaagtacccgaagaagcacgggtatattccttgcgacgggcaaaaatggcatcaagcttcctacggtaagccgccgtcacattcttcacataggtcacatccttcaagcggccttctatcttcagcgaagtggctccggcatccagcagttcttccaacacctcgctttggttgaggtccttcaaagaaagcagatgcttattacgcacaatggtcttgccatcggcatctaccagactgaagggtaaacggcagaattgcgcacattccccccggttggcactccgtccgaaacaagcctggctgacatagcactgcccgctataactgacgcaaagagccccgtgtacaaagacttcgagcggcacgtcgggacacgcctcatggataccgcgtatctcctgcaaagaaagttcgcgtgccaacaccacctgacggaaaccggcatcggcaaggaaacgtactttctccggcgtacggttatccatctgcgtactgccatgcaacggaatgggcggcaaattcaaccgcgtaatccccatatcctgtacaatcagtgcatccacaccgatgcggtacagctcccaaatcatcctctccgtctctttcagctcttcttctttcagaatggtattgaccgtcacatagatacgggcattatacagatgggcatgctccaccaaagcggcaatatcctccaaagagttgacagcagccgcacgcgcaccgaacttgggtgcaccgatgtataccgcatctgccccatgattcactgcttctatgccacactccaaattcttggcaggagccagcagctctattttacgttgctttatcatcgtttagttacgagtaactcaccctatttcattaatattatacggcgtctcctgatatacaaaataattcagccaattggagaacaacagattggcatgggcacgccaacgcaccagcactcctttgtccgggtcatcgtccacatagtagttacggggtatctcaatgggcaggcccttattcaagtcacggcgatactctgtatccaatgtcagcggggagtattccgaatggccggtcacgaagaactcacgccctccacgggccaccgccatatatacaccagcatcctccgactcggaaagcagcgtcaattccggaaccttctgtatatcttcccggcgcacttccgtgtggcggctatgcggcacatagaacatatcatcaaatccacggaaaatgggatgcaacggttgcaaggtacgatgttcaaagataccgaacatcttcttatccagtgcatacttcggcactccataatgatgatagagccctgcctgcgccgcccagcagatgtagagcgtagaggtgacatgcgtacgcgcccagtcgaagatttcagtaatctcatcccaataagtcacctcctcaaaatccatctgctctaccggagcaccggtgataatcatgccatcgtacttttcaccgcgcatcttgtcgaaatccgtataaaatgttttcatgtgttctatcggagtgttcttggaagtatggctttttatcttcatgaacgagatttccacctgaagcggagtattggaaagcagacgcaccaggtccgtttccgttgtaatctttagcggcatcaagttcagaatcacgatacgcagcggacggatatcctgctgggttgcccgggaattgtcaatgacaaatatattctcctctttcagcaactcgatagcgggtagtttatcgggtaaatttaaaggcatgagtttatatctatggtttaacttattactgtctacgattttagcgtgtaaagttaggcaaaaaatcagagtgtgataaataaattataaaagttttatcgatttatccctcttcatttaacacgtttaattacatttgtacccgaaacctattaaaagttattaaaaaataagattaaaaagcactgcggcatcaagcgtgatactgataattagcatccaaaagcgtaaaagacttttccataccggttatagctctgctaaatccatatttttaagacaaggttcattgagtataattgggaaagcggaaaaaccgttgccccacaataataatataatgaagaaacttattcttgcaagaggagtcttggctgcctctttattctgctgcatgtccttagggaatacagcttgtgtgaaccggattgacgaagaatcagaagcggaaatcgaggaagggacgacacctatcacgttctctatcaaaatggaaaaggccagtaccaaggtcacaaacaccgcctttgaaaaaggagacagaatgggcttgtttgcaaccacttcctccggctccatcaagggaaaacggtatattgacaatctggccctggaatatacggaaggctccacactggttcccaaaaagacagtattctatccggaaggagatgtgtcactggactttatcagttaccacccttaccaaaccgaaggggtagctgccggtacacccgttcttcccgtatctgtgcagatagaccagagcaatgagaaaaaccgcgcacaaagtgacttcttggtagctaaagcgcaaggaatcaccagtaaaaccaaatctgtaaccctggagttccaacacaagctgtccaaactggcaatctctctgacacccgacgcaagcaactctgccaatgatttgctgaaagccaatccgcgtatcatcgcaaccgggctcaagacctcggccgattataatctggaagacgggactttcagtaatcttacggggacacaagacatcatagcctccggcgaatggagcgtcaaagacaacaaacttaccggcaaggaattcatcatcataccccaaacgataaatgatggcaagcaatccttcattatggagtggagcggacgtatatacagttgtgcaatacccgaagtggaaatgagtagcagcacgcaatgtatcattaacatatcagccatgcagagcaacagcaacgtactgagcagttttgccggaaaaatcaaggaatggagcagcctccctcccatcgacaccgacaatatggaagattacactgccatacatatctccgctctctccttttctctttcaaatgtgtacagaatttatcacgaagggatacccattgcagaagtctgcaaggaatatctcaaatcagcgtcattgacttccagagccgttatagcctatcccataggcgaaaatgaaaaggccgacctgagcaatggagtcatcctacagcttgcagaccgtaaagacaccatctgcggaggaagaataagctggaatacagacgactatggatttacctacactaaaggggaatataccggcatagacaagctctatatagacaataaccataagctacttctggataaaccggaaaacgccatcaaagtgaatgtggcatgctacacccttcgagacatcagaaaaggagtgtctaccgaataccccattgtcaagattggagcccaatactggatgggtaaagagctccatgccaccacctaccgtgacggagctcccttgaaaaaacagagtgacttgggaacagacaaagccggatattacaagccggacaaatatgacatttatttttacaatggagaatccatactggcaggagagctggctcccgagggctggaaaattccatcggatgcagactgggaacagctgaaaaactacaccggcaacgatgcctccatactaaaagcaggagaatggcaggcaatggtatccggtgaagttgcccccgtcaacaaccatacccggttcaatgctttcccggtaggaatgtggtacaacaaaggacacaacagccccaataaaatgaccgccttttggagttgggatcatacaaagcataccctttcggaaagcaccatttattttctcggcgaaagcgacgagtttgtatcaagcgctgcccatgtcaccggtaagccctactataaagctctttccatccgctgtataaaagaatagccggcaatttcggcatttctcatttcttttttgtatttttgttcccaatgtgcaagatttttgccaatcggacaaagataacgaaagagaaatgagagtaatcgacctgataaacagtaacgaaaaaacagctttttcctttgaaatattgccaccactgaaaggtacgggcatcgaaaagctgtatcaaaccatagatacgttacgggaattcgaccccaaatacatcaacatcaccacgcaccgcagcgagtacgtgtacaaagacctcggcaacggattgttccagcgaaaccgcctgcgccgccgccccggcaccgtagccgtagctgctgccatccagaacaagtacaacatcaccatggtgccgcacatcctttgcagcggcttcacccgcgaagagacggagtacgtgctgctcgacctgcaattcctcggcatcaccgacctgctggtgcttcgtggcgacaaggcaaagcacgaatcctcttttatccccgtgggcaacggttaccaccacgccgtcgaactacaagagcaaatcaacaacttcaataaaggtatttttgtggacggctccgagatgaaagttaccaataccccgttttcatacggtgtggcgtgctatccggaaaagcatgaagaagcccccaacatggatacagacatctactggctaaagaagaaaatggaaatgggtgcagagtatgccgtgacccagctcttctacgacaaccggaaatatttcgacttcgtggaacgtgcccgtcaagccggtgtcaccatcccgattatcccgggcatcaagcccttcaagaagttgtcacaactcagcatgatacccaagacgttcaaagtagatttgcccgaggaactgacccaagaggttctgaagtgcaacaccgatgcggaagctcagcaagtgggtatcgaatggtgcgtgcagcagtgcaaagagctgatagcccatggcgtcccaagcctccacttctactcggtaggagctacagacagcatcaaggaagtagccaaacaaatctactaaacaatggacaatcaacagttgacaattgacaataggcagtgtcacaagtaataacttataactaattaacccgtgttcagtttcaaggacataataggccaagaggcagccaagcaaaggctgatacaagaagtgcaggaaggacgtatcccccacgcacaactcttctgtggccctgccggagtaggaaaactcccattggcacttgcctatgcccgctacatctgctgtcccaaccggacggaaaccgatgcctgcggtacttgtccctcctgcgtaaaatggaataagctggtgcacccggacgtacacttcgtataccctatcgtcaagagcgccaaagggaaaaaggaagtctgcgacgactatatcgccaactggcggcacctgttgctgaacagcccctacttcgggctgaaccactggctgaacgagatggatgccgaaaacggacaagctattatctatgccaaagaaagcgacgagataacccgcaagctgagtctgaaatccagtgaaggaggttacaaagtcaccatcgtatggctacccgaaaagctgcatgaagtatgcgccaacaagctgctgaaactgctggaagagccacccgagaaaacgatattcctcctcatctccgaagctccggaaatgatactacccaccatcctcagccgcacgcagcgcttcaacattcccaagattgaagaagccgacatagccgaagccctgcagcagaagtacggagtgcagccccgcgacagcgagacgatagcccacctggcaaacggagacttcatcaaagcattggagaccatccatctgaacgaagagaacgaactgttcttcaacctctttgtcagcctgatgcgactctcctaccagcgcaagatacgggaaatgaaacaatggagcgagcagcttgctgccatgggacgcgaacggcagaagaacttcctggactactgccagcgcatgacccgcgagaacttcatctacaacctgcaccgcaaggagatgaactacatgacgctgcccgaacagaacttcgccacccgtttcgccccctttgtcaacgaacggaacgtcatggggatcatggacgaactaagtgaagcacaacgccacatcgagcagaacgtaaacgcccgcatggtgtttttcgacttctctctcaaaatgattgttttattgaaacaatgaaaagtggcaaaataatgaaatgcaaagtatcaaatcgtaaatagtaaatagtcaaatagtaaataaatagatgatggaatttaaactacataacggaagcggaggtctctgctgcaagagttgcggcaggcaggacaagcaactgaacacctacgactggctggcagacattccgggcaatgccgatgagagcgagctggtagaggttcagttcaagaatacccgcaagggatatttccgcaacagcaacaagatacctctggaaaaaggcgacatcgtagccgtagaagccacccccggacatgatatcggtgtggtgaccctgaccggacgtctcgtgccgctgcaaatgaagaaagccaatatcaagtctgaggcagacatcaaacgcatctaccgcaaggcgaagcctgtggatatggagaagtacaacgaggcaaaagcccgtgaacactccaccatgatacgctcgcgtcagatagccctggacctcaacctcaacatgaagattggagacgtggaatatcagggagacggcaacaaggccatcttctactacatagccgacgaacgggtggacttccgccagctcatcaaggtacttgccgacgctttccgcgtgcgtatcgagatgaaacagattggtgcccgccaggaagccggacgcatcggcggtatcggtccctgcggacgcgagctgtgctgcgccacctggatgacctccttcgtatcggtatccaccagcgcggcgcgcttccaggacatttcactgaatccgcagaagcttgccggacaatgcgccaaactgaagtgctgcctcaactacgaagtagactgctacgtggaagcacagaaacgcctgccctcacgcgagattaccttagagaccaaagacggtgagttcttcttcttcaaagccgacattctgagcaacaagataacctactcgagcgacaagaacatccccgccaacctggtgaccatcagcggcagacgcgccttcgagattatcggtttgaacagacgtggcatcaagcccgacagcttgatagaagaaacccatcgctccgagcccaaaaagccggtggacttgctggaacaagagagcctcacacgctttgaccgcagccggaaaggcaagagtggcggtgacggcaacggtggcgagaacagcaacaacagccgtaacaagagaaagaaaaagagtgggaacggtcgtccgcaaggaggtgagcagcagggtgctccccaatccaacaaccagagagaacaatccaggcaagaccggcaaccgagacagaaacaagaccggcaagcacccaaacaaggtgaacagcaacaaggcgaacgtcaacaacggaacaataacaaccgtcgtccgccccgtaacaataagcccaaacctcaaggtgaaagacctgcccaaaatgacaaaccggctcaagaataggaatctctgcctgaaaggtatcatactactgtttgtcgcaagcctgctgagcgcttgcgacaaacagactgtataccattccttccaatcccttcccaccgaaggctggctgcgcgaagacacgctctctttcgacgtgaaggtcaccgactcactgacctactacaaactgtctttggaagttcgtaaccgaagcaactacccctatcagaatctacctctatccatctgctacaccaccgcagattccattccgtcacccacggacaccatacagctaatcctcgcggacaaagaaggaatctggaaaggtgacggctggggaggtctctatcagactgccgtctccgcaggaagcgttcgaatcggcaaacccggcacctacctctttaaagtggcctatacgctaccggacgaaaggctgcaaggaatcaatgacatcggcatcaaactgaagagataggaactccctattgttctttattaccttcttctaacaaccacctcagtctcccactcacgtctccttgaagcggaaacgggcggggtatcataacttgccctcttacctcgtagcgttacgtcttttacgccaggatgtaacgaccgttacaccagcatgtaaagggcgttacaatatagcgtaaaagtcgttacgatacagcgtaaaggacgttacaatgcgatgtaacggccgttacattacgatgtaaacaatgtgtaaatgcaatgtaatgtcttttcctgatttagctagacgctttttctttttataaccgatatcagtagacggttcttggaatgtt

SEQ ID NO: 4418 - DNA, 54898 bp, Unknown
  gut microbiota DNA sequence
aaaatactaatctatacagacaatgacggtctgacaaagatagatgtgaaacttgaggaagataccttatggcttactcaagcgcagatgtgcgagctgtatcagacgagtaaatcgaatgtaagtgagcatattaagcacattttcgaagaaggcgaactacaagaggactcagttgttcggaaattccgaacaactgccacagatggtaagtcatacatgacaaccttctataatcttgacatgattatcgctttacttgatttcgcagaacgccaagccgagaaagagcaacccatgaccatgaacgattgggcaaactatctggatcgcatactcacctcaactggagaacaactcctgctggatggaggccgagtatcccatcaagaagcaatggaccatgccactactgaatatcgtaaatataaacaacgcacactcagcgatgtggagcaagattatttgaacgctatcaaggcgattagcgacaaaagtaagaaaggaggcaaaaagtgaaaataagatataaacatcaacgctttcaagcggaagccaccaaatgcgtgagcgacgtatttcagggacaacccaaacacgacggcagccgcaccttcttgaacaagtttggtgcgctcagtttcgacggcttcggcaatctgccccttgtacttgacaatgaaagcatttgcgagaatgtgcgtggtatacagatggcagaaggattgaagcccgtggagcatctggagggcgacggacgcacctttaccatcgagatggaaacaggtacgggtaagacctatacctacatcaagaccatgtacgagctgaacgcccgctatggttggtcgaaatttgtgattgtagtgcccagtattgccatccgcgaaggcgtgttcaagagttttgagagtatggcagaacactttgctggagaatatggtaagcgtatgcaatacttcatctacaattcgaagcagcttgctaagattgatgcctttgcttcggataacggcattcatgtaatgattatcaatacgcaggctttcaatgcttcgcttaacgaggataaaaacaaggaaggtcgcgcaggtgattccgctgcccgtatcatcttctcacgccgtgatgagttcggttcgcgaaagcctattgacatcttggcaaaaacgaatcccatcctaattattgacgagccgcaaagcgtgttgggaacggataaaagtaatgccacacgaaagggtatcaaactgtttaacccactctttaccttgctatacagcgccacacaccgtgaaatattcaaccaagtatatcgcctcgatgccatcgacgcttataacaagaagctggtgaagaagatagaagtacgcagtgtacatcaagtgggttctacagccaccaatggctatgtttatctagatgaaatcgtcattagtaaaggcaatccacaagctcgattgggcttcgatgtcaagacaaccagtggcacacgccagaccattcgcttggtgaatgagggcttcgacctcaaagagcaaagcggcggtttgcaggaatatgccgataactttaaagtggaacgtatagacggactgaccaacaccgtgcatttcctcaacggactgacgcttcatcccggtgaggtggtgggcagcgtgaatgaggagattctccgccgcaatcagatacgagaaaccatcaaaacccatttggagcgtgaacgccaacttttcgctcgcggtatcaaagtgctgtcattgttctttatcgaccatgtggacagttatcgcatctacgataaagacaacgtggaaaagggtaagttcgcaaagatgtttgaggaggagtaccaacgtgccttgcaggagtttatgcctacctttacggatgcctcttacacacgctttctttccgacccgaagcatgcgcccgaaaacattcacgatggttacttctctatcgataaaaaagggaagagcgtggaatcgaagaataaggaaggcgaaaacgaagaacgtggtttcgaccttatcatgaaggataaggagcgtttacttagccaaagttgccccgttcgcttcatcttctctcactcggccttgaaggaaggttgggacaatcctaatgtgttccagatttgtacgttgaaagacacctccaacgaaatcaagaaacgtcaggaggtgggacgtggtatgcgcctatgcgtcaacgataagggcgaacgtcaagatgccgatgtattgggcgaccatgtgttcgacaccaatatcctgactgttattgccagcgagagctatgacgactttgccaagaagctgcaaaccgatatggcagaagcctgcgccaaccgtccggcagtggtgacagccacactgtttgccgaccaactggcacagacacaagatggacacagcataaagattacgaccgaacaggccgtggaaatccacgaagaactgataacccaaggttacatcaagaaaggcaagctcacgcaaaagtactttgacgaaaagaaagccgattcgctccagtttggtgaggtggaaaatctacattcgtttatcatcaaacagttggataaagtgttcaatcccgatgccttcaaaccagccaatggacgtaataaaacggaggctcacttagttaaagacaacttcaacaaaaaagagtggcaagagttgtggcggcgcatcaatacacgtacctactataacgtgagttttgaaacgccaaaactcatcaagagtgccattgatgcactcgacaagcacctgaatgtgacagaaatccgtattgtagtggagagtggcggcatggaaagcatccgtgaccgcgaagaattggaagccggagcagccatgagtgccgctacagtgaaaaccattcgggtaacggaagttattggagcagaagtaacttacgacttggtaggtgaactcgtgcaatccaccggtctaactcgccgcaccattgtagaaatgctgaaaggcgttaatcctgcgactttccatcagttcaagctgaatccagaagagttcatcatcaaagccggtcgcatcatcaacgattgtaaggctatctcgctcatccaacacatccagtatgagaaacgtactgggacctttggtactgacatctttgaggaagctacgctgcgtggtacacttggcaaggacgctatcgaaagttccaagtcgctttacgaccttgtagtggtagatagtgaaggtatagaaaagagttttgccgagtcgctggaagctgaggatgatgtggtggtatatagcaaactgcccggtggattctacatcaacaccccgatgggcaaatataatcccgactgggctgtagcttttcgagaagattccgtgaagcacgtttatttcgtggcagaaaccaaaggcaacgacatcgaagtatcacaacttcgccgtgccgaggatgccaagatagagtgtgcccgtcgtcactttgcagctatcagcactggcgatgtggtgtatagtgtggtgaaaacctatcaggatttgtataatgcggtaacaaagtaaaatcagccaaacacgtagagaggcacattctctctatgtgtttattctttcttttcactggcataaactcataaatgatgtcatattgcaaagaataacttataacaattaccttgtagagataggaagatacaggtggcttcattatcaggggtttgcgtgtgtcgcttgtagagattatcaccttattcctcttatttaagctttatttccccccttcttcttgtagagatatggtttttgtaatcctttgtttttaagtgatttatgaaaatcggttgtagatgccattttcttgttttcccttgtttcccaccctaactttgcaacatcgaatttgagaaaagcagacggctgaatcgttgaggcctcacgatgaaaacttctgcttctcgggtgagacaagagaaacagaatatacctattattaatcatttaaaacattacgattatggcattttttaaaagagttcaaaaaaaagtaaacgatttgtggtatcctcaatcagtaacctggggcaaggcggttactacccgtgaagtggcagatgaactgtctttcatttctaccgtgacccgtggtgacacgtatgcggtgatggagaacttggggcgtgtattgagcaatttcatggggcagggacgtactgtgaagatagacggtataggcactttctactatactgctacctctaccaaaagaggggtgccgacggctgaggaggtaagcgcttcgctgataaacggagtacgtgtccgtttcctgcccgaagtggagcgtaatagtggcaatcaggtgactacccgcagcatggtgaatacaaagattgtttggaaagagtggggtaagacttctacctccaccggtactactcccggcgacaataccggtggaacccccggcggcaacgacggcgaccagggtgagaatccgttgggctgattctccttccttgaaagcaattgatgactgacaccgttttatgctaaaagtttcctgtaccgcctcattggttgtgcgggaagctttactttttagcatcttttatcattcttctctgcctttctttaatggattatcgttaatttcgagcgatttttcgtaaattcggctgaataactaataatttataatatggaaaacttgaatacagcacttctgctgatggtggtaggtatggcaacagtcttcgctatcctgctgattgttattaacttaggaaaagctcttattgcactggtgaataaatatgcgcccgaagaggtgacaccggctaaagctgcggcaaatggtcccgcacctgtccccggtaatattctggcagctatcagtgcagccgtaacagtagtgacacaaggtaagggtaaagttgctaaggtagaaaaaatctgaaataataatcttatataaaaacacaccgaataatttagtatgaaaaaggaaattaagttcagtttggtattcagggacatgtggcagagtgccggaaaatatgtaccccgtgttgaccaactggtgaaagttgctcccgccatcattgagatgggttgttttgcgcgcgtggaaaccaatggcggaggttttgaacaagtaaatctgctgtttggggagaatccgaataaagccgtgcgcgagtggacgaagccgttccatgaagccggtatccagactcacatgttggaccgtgccctgaatggcctccgcatgagtcccgtgcccgccgatgtgcgcaagctgttctataaggtaaagaaagcgcagggtacggacatcacgcgtactttctgcggtttgaacgatacccgcaatatcatcccttctattggctatgcacacgatgccggaatgatttcccaatgctcgctctgcatcacccattcacccatccataccgtagaatactacacggagatggcactgaagcttatcaaggcaggtgccgacgaaatctgcatcaaggatatggcaggtatcggacgtccggtttctttgggcaagattgtggccaatatcaaggcggcgcatcccgatattcctatccagtatcatagtcatgcgggtcccggtttcaatatggcaagtattcttgaagtgtgcgaagcgggttgcgactatatcgacgtaggcatggagccgctttcctggggtacgggacatgccgacttgctcagtgtgcaggccatgctgaaggatgcaggcttccaggtgcccgaagtcaatatggaggcatatatgaaggtacgcgcactcatccaggagtttatggacgacttccttggcttgtacatcagcccgcgcaaccgcctgatgaactccctgctgattggtcccggactgccgggtggcatgatgggcagtctgatggcagacttggaatccaatctggagtccatcaacaaatacaaggcaaaacgcaacctgcccttcatgaagcaggatgaactgctcatcaagttgttcaacgaagtggcatatgtttggccgcgcgtgggttatcccccgttggtgactccgttcagccagtacgtcaagaacctttccatgatgaacgtcattgctatggagaaaggcaaggaacgctggggtatgattgctgacgacatctgggatatgctgttgggcaaggcaggtaagctgccgggtcagctggctcccgaaatcatagagaaggccgaacgcgaaggacgcaagttcttcaccggcaatccgcaggacaactatcccgatgctctggacaagtaccgcaagctgatgaaggagaacaagtgggaactgggcgaggacgacgaagagctcttcgaatacgccatgcacccggctcaatacgaggcttacaagagtggcaaggccaagcaggacttcctggaggatgtggagaaacgccgtgccgaacgtgacaagtctccgctggacgatgccaaacccaagacgctcactgtgcaggtggacggtcaggcttaccgcgtgacggtggcatacggtgacatcgacctgcccgcttcggccaccgaaaaggtgacagctccccccgtaggcgaaggtcaggacgttccggctccgctcgaaggcaagttcttcctgacaaagaatgcgcaggaaaccccgttgaaagtgggtgacaaggtgaagagtggcgacctcctctgctatatcgaagctatgaagacatacaatgccatccgcgcagactttgatggaacggttgttgccatctgtgtcaatccgggtgactctgtttctgaagatgatgtattaatgaagataggataatggaagatatatttgcaaaactctatgatatgacggccttcagtaacatcattgctgatccgtcgttcctcgtgatgtatgccatcgctttcatcctgctttatttaggtatcaagaaacactatgaaccattgttgttggtacccatcgctttcggtgtgctcattgccaactttcccggcggcgagatgggggtgattcaggcagatgaaaacggaatggtcatggtaggcggggtgatgaagaatatttgggagatgccgttgcacgagattgcgcacgacctcggactgatgaacttcatttattatatgctgattaagaccggctttctgccgcctgttatctttatgggtgtgggtgcgctgacagacttcggtccgatgctccgtaacttgcgtctctccatattcggtgcggctgcgcagttaggtattttcaccgtactgctttgtgctgtgatgatagggttcactccgcaggaagcaggtgcgttgggcattatcggtggtgccgatggtcctacggctatctttactaccatcaagctggctccccatctgttgggaccgattgccattgctgcttattcttatatggcgctggtaccggtcatcattccgatggtggtgaagctgttctgtaccaagaaggaattgatgattaacatgaaggagcaggagaagctgtatccttcgaaaaccgagattaagaatctgcgtgtattgaagattatcttcccgattgcagtgactacgattgttgctttatttgtgcccacagcagtacctttgattggtatgttgatgttcggtaacttgattaaggaaatcggttcggatacaagccgcttgtttgatgctgctgctaatagtatcatgaatgcagctaccatcttcttaggattgagcgttggcgccacgatgaccagtgaggcattcctgaattggacgactatcggtattgtgattggtggtttcctggcatttgcattgtccattacgggaggtattttctttgtgaagctgttcaacctattcagcaagaagaagatcaatccgctgattggtgctaccggcctgagtgccgtacccatggcaagccgtgtctgcaatgaaatagcaacgaagtatgacccgaaaaaccatgtgctgaattactgtatgtccagtaatatctccggtgtaatcggttcggctgttgcggcgggtgtgctgatttcattcctgggataaacggtcagtaggaaaaatataaagaaactccggtatggctttgtaaagctatgccggagttttttgtatgtttttctttgaggggcatttcattcactaaccaccttccaatattcagccaccgccatcttctctgccagatacgcatcaattaggttggtgtgtgcctgcgtccacgagagttgtgcggacaacacatctgccatgctggcttttccttcattataagagaaggtgacaaggcccagattctcttcggcgagtatcatattctcccgggccgtcttgacttgctgttcagtttccgtcagttttgtggtggctgcggagagttcctccagaatattgtccgttacatagctttgttgcagcttctgtatgccgatataggctttctgttggcggtttgtcttgaagcgggctccccaacggaagatggggatgctgacattgactcctacgacgggagtatgaggtacatcctgccccatataggtgattcccgtatcccaaccggtagcgagaaacatgctgacttgtgggttgtagcggctgagggcggcatgccgttgcgcttcactgcgggcgatgttcacggaggtactggcatattctgcccggcgaagcagcacatcatccaggcccagaggtatgatggaggcagtcggtatatctatttcggctatgctgtctatgggagcgtccggttccgagcccataaggatattcagtttttgcagggcaagggtatggttttggcgtgccttgatgtactgcaattcggcttccttacgtcgggtggaaatcatcagcaagtctgtgcggctgatggcaccgtcatcaaagcggtcttggatgatgtcgtactgctgttgtacaatatcctgaaaggtagccgcggctttcagaccggcacgggcggcagaggcattccaatagacggcgtcactttgatagtgtatctggtcgagggtcagctctgtggtaagttggtccagtgcctcttcggcttgcgccactttcttttgggctattagggaacctccggtataaagcggctgcgtcaaggtggcaagtgcctgataggtataagggtggtagtctcctttcggactgttccattggtccagatgattgagattggcggtaccctcggcagtgatgtcaatctggggcaggaaaccggtggaggcaatcttgcgtgcctcggtactggcgaatgttttcagatgctgttgtttcagaatctggctgtatgcttctaccttgtcgcggtattcttcgcggctcagatatgcttgttgtgccccggcattcagtcctgagcacagtaatgatagaataagtatatttgttttcatcattcaattggtaaactgtaaattgttgaatgttctctcacttgattttatgaatggcgcaataagccaccggcagcacgaatagtgtcaatgccgaggctaccagcaaaccacccatgatggttgccgccatgccgccgaacatggcgtcgaacaataacggcaacattcccaggatagtggtacccgatgccatggccaccgggacaatacgggtggtcgttgcactgataacggcttcacgcggtgcttttccggcagcggtttccgtatcaatctggtccaccagcacgatggcattcttgatattcattccaatcagccccagcaagccgaggatggagaagaagtcgaatgatttccccaataccaccagtcccagtacaatacctataaagataagcggcagcatcagcaggataacaatcggcttccggtagctgcggaacagaaacagcaaggtgacgaacataaggaagaatgtcagcggcaggttagctgccagtgcggcattgctttctgcctggctttcctgctctccgaagtatttcatggtgtaaccttcgggcacatcaatctcttcttgcacttgcttccatatacggttgaaggcggcaatggcattcacaccgcggcgtgggtcggcctgcgccatcatcaccatctgccggttgtagtctttcacattggagaacttgtactggaagtcgaaccggctgacgacttgttccagagtggttgtttcgcgtgcagtgccgaatacggggagtgtacgcaagtcgttgatgcggaaagagtcgatagttttatccttcaacagaacgggaagtacctggtctccttccctatattccccaagtgtcatgccgttcgtaccgatctggatactctgtgccatgctttgacgggagatacccaacggttgtgcacgctcctgactgtaaacgggatgccataccggtatcttattgccccaggagttgcgcacgttgataagttcgccgtcacggtgcatgatgtccagagccttgttggtcaacatgaccagcgtatccgtgttattgccgatgaacccgatttcaatggcggcatctacagcaggagagagcttgaacaacatggtacgggtgatggcattgggatagttggccttcatgtaggcatcaagattctcttcctgcttcttggtatatttgctgtccgttacttccaccaggatattggcgaagttaggtttggggccgacggaagtggaggccagatagtaacgcaacggtgtgctgccgaatgtgacggatacccgtttcacttccggctgctgcatcagatgcgcttccacctttttcatttcggtttctacttcgcggatgctgtacccgtccggatagaatacatctgcccgaaagtagggcttgtccagagaagggaagaagttctggggcatcagtcccatgacgatgagggagaggatgaacagtgctgtaatgcttccaagggtcaacgccttcttgcgtatcagtgtgccgaggatggaggcgaatttatggtagaaaggcttgtcgtatgggtctttatcaccatctttagcctttgctttcagtatgaagttgccgaatgtagtggtttgtgtcaacgccagcacccaacttaatcccagggaaatggccaacactacgaatagcggtttcacgatttcggctacggaagagggagccagatacagtggcagaaacgaacagatggcaatgaacgttgctcccagcaatccccattggggaccggtggcaccgtctatcagcgcttttcggcggtcgatgccgcgggcaatggcaatttgggcattatctgtcaccacgatggcattgtccaccagcattcccatggctatgatgaatccggcgagggaggtccggttcagacctacgccaagaaacgacataatgagcagtgtgcctccgatagagaatataagggaagagccaatcagtactcctgcacgcatgcccatcaccagcatgatgattacaatcacaatcaggatggattctatcagattgatgatgaacccgttgttggcttctttggcaatcacgttttcgggatacagactttccagttccagccccacggggatgaggggcatgagttcggcaagcctccggtctaccagttcaccggtttttaccacatcctttgtcgggtcggtggagatgccgataccgatggcgcgctttccgttgacgtgcatgatattgccgggaggttccatgtatcccttttcaatgatggcgatgtcacccagcttgacttgtccgccggaggtagtgataacctggttgcggatatcatcgacagtcgtgtaggtaccgttggccacgatgcgtaactgttgttctccggcactgatttcacctgtattgataatctggttctgcgattgcagtaggccggccagttgtttggggtcgatacccattcctgccagcttgtttacggagatgaatatatggatgacctctgtctgtgtaccgaaaagggctaccttcatcacaccgtctgctgtgatgacatgtgtcttgattcgttccgcccagtttctcatttcttcataagagaaaccgtcgtcacccaccaggccgtaatagatgccgaaaacgtctccaaaatcatccgagacggtcggtacagaagagcctgcgggcagttggggctgtatgttgagcactttacgccgcagttcgtcccacttctgcggaatggatgcggcagagagtgacggttgcagttcgaaggttatcttggagagtccgtacatagactctgactttatcttgtagacgccgctcatcgactgtatttctcgggagatgggttcggtgacgagccgttccacttctgccggctccgctcccgggtagcgtgtcatgatgactgccgacttgatgacgaaaggtgcgtcttccttctttcccaacctgccgaatgacagtatgccgccgataagcagcacagccagaaagaagtagactatcttcgtgttgtctaatgaatatttggctagattcataatgaatattttttagataaatggggaatgtaatgtgccaatgtgattaatcacattagtacctttattgcttctccttctgtcagctggtatactccggccgtcacaacggtttctcctggttccaaccctttagagataagcaggtttgcctctcccgttggagaataaacggtcacttcgcggcgactgactttattaccttccaccacccatacatacgttttccggttttcactgtcgccgaatacggcgcttaacggtacattcatcagcttttcttccagaaagggagcgacatccgatgccagctttattttgcatgtgaatcccggttttacgtcataacgtgtacggtcaaagtgcgggtcgtcaattgttattgtcaccggaatacccgtccctgctgtggagatgtcaagatactcttccagtctggcatcgaaagcctctgcagggtaactgtcgaacaccaccttgaactttacgtccttggcacggagcagatagagataatcatccggtacggtgaacttgattcgtagcttctgtgtatttaccagctgtacaaccccttctcctgcattgacacgctgatagttctctaccagccgtttttcgatggaaccctcgaaaggggctgtcagccgcgtatcccgcatattgttgccggacaactcgtaagtggattttgctttctgatagttggctacgctgatttcgtattcctgcacggagatagcctggcggccaagcagccgtttgttacgttccacttgtgcggcagctgtttcgtaggcagccttgtcggctgcatattgcagggagatgtcgcgtgggtcgatggcggcaatcagttgccccttttttacccgctgtccctctacaaccgggaggctgatgatttgtccgctgacgcggaaggcaagtctcacatattccacggcttccactattccggagaagtctttgcggataaccgactgtgaactgacttgcgcagtcttcaccggtcggataagggtattgctacccttttgtttttgcccgcacgacgtgatgaacaacgtcgtaaccagggcgaaaagaaacatttttttcattggtaaacaagtatatagttattcgttcaggtatatataaaaacataaaaccgggaaaacaaccaaatgttctcccggttataggataaatgatgatttaatgtgccaatgtgctaattggctgcgcaatgtttatgttgcgctatcacgccgcaggtcattggcacattggcatattaattttcaattccgtcccccgttccagcgtatatgggtgtccgtagacttgtatgtccactttgctgcctgctgtaagcgagatttcgatttcttttcctacccgtatgtgaagtgtgtttttcagataattcaccttgaatgaatagctgtcccatttttgcggtatgacaggggagaaacacaacgtctccttcagcacctgcatacctgcaaatccgcgtacaatggccagccagctgccgggcatactggttatgtgcagaccttggtccgcttcgttgttgtagtcgtccaggtcaagccgcgtggcatgcaggaaaagctggtaagctttttccactttgccgatgcgtgcagccaggatggaatggatgtggggagaaagggaggattcgtgtacggtcatcggctcatagaactcgaaattgcggcggacggtttccgtgtcgaaatagaaataatagaggtaaagtccgagcaacacgtcactctgcttgatgtagcaagagcgcagaatgcggtcccatgaccaatgttggttgatggggcgttcttcggcaggaatgttatctgtactttccagtactttatccatatagccgtcattttggataaaaataccccgttccttgtcttccggcagatacatgtgttcgatgatgtctctccaccgggcactttccttcacttggtcgagattggtgatgcggcgtatgtgggcatattcatccggatattgctgtgccaccatttccagaaaacggagggtcatcttgaggcactgtatacaggaatagttagtgtaccagttgttgtccacattgttttcgtattcatccgggccggtaacccccagtatgacatatttctgtttgggttgggagaaggatacccgttggctccagaaacggctgacggcaatcattacttccaggccatatttagcgatatagtccatattgcccgtcagcgctgcatgctgaacgatggcatagacaatgatattgttacggtggatttcctcgaaggttatttcccattcactgtggcattcctctccattgttggttacctgcggaaacaacgctgcaccgtccttgaaacccagtttacgggcgttttcgatggctttgggaagctggttgtaccgatatgccagcaagttctttgcaatctctttgggagtggagagcagaaaaaacggtacacaacacagttccgtgttccaataagtatttccgccatatttttctccggtgaatcctttggggccgatgtttaggcgcggatcatctccccggtaagtctgatacagctggaatatgttgtaccggataccttgttgcgcttccggatccccttcgatgacgacatccgtttcgtcccagatttcctgccaggcccttcgatgctcttctaccagcgtattccagcctatgctcttggcttcgcgtgcctcggccacggagtgttccaccaattcactccgttcgtggtagagagaagaagcaatggcggtgtatttgatgagtgtcacgttgtctccgggtttcacgtcggcacctacgctgaaaccggtctgcttttccttttctatccgtatgaggttggcagtggtttccttgttgtttttgaagaattggtaagtcatggcgtagcacacttgtgcatcttcccggcgggtctgtgtccagagataggcacagctgctggtagaaccggaacgcagtatgttccatattttcaggtttggcagatcggcatcgtctactatattcccgtcaaggatgggcacgagtgagattctgccggtatagttgatggaagacacgctgtacttgatgagacagaggttgggtcttgccatatttgtgatatgctctacatggatgcggagctggtttccgcgaggagacgtcacctccatgtcccggtagaagataccttccttcatatccaggcggcggttgaagctgtcgacatcccagcctgccaaatcgagttcctcatcgatgaggcgcaggttgatgcggctccagtcagcagccttgggtatacgggtgtaatatgggggaaatccgtttttccaccatcctacgcgggttttgtccaggaaagtgatgccggccacaaatgaaccacggtaactgtcactgctgtaaggctcctcaaaatacccccgttgcccgaaacgtccgtttccgagactgaatatactttccgacatccgttgacggtcggggtggaattggtcttcgatgatgttccattcatcggtcttgaggtatttcttcatggcgacgtgttttctgtagttatcgccgtaaagttaagcaatatgcggaaataaagaagaaatggaaaggaaaaaaacaaacgtgcggtaggcttttttttacctgctttcttgccggagggctggtaggctcgtcaataacagatgctatgtacggtcagaagaagaggtaacaatcatacggtatgaaagcatgaatcatacgatatgattatggtaatcatacggtatgattcatgtctttattacaaagataacggctgtcctttgtacggtgtgccggtctcggttctttgtgtgttatgtttcggaggcgtgtgcttacttgcttttttctccttggttctctttgatgaggtatacgcaggcggcgccgattatcagcatgattcctgccagcacaagcatattgatttcaggaggcagtcctccttggggagtaaacaaggcaaggatggtgccgcccaaagcagctgctataatctgcgggatacagatagtaccgttgaaaagtcccagataagtacccatgtgtcctccgctcagtgcgttggtcaggatggtgaacggcagtgccagcatggcagcccatgcacaacctatcagcaagaaggaaatgaagagcatataagggtcgtgtatgaagtaggtggaaatgaaacctatacctcccagaacaaggctgagtgagtagacccggcgacggtccttgaacatcggtatgcagatggcccaaagcacagagccgatggcttgtacggcaaacagtacgcctacccagtcggcggcattctgatattgcaggctcttggtgtcgagtaccactttggtgacaccatctaccaggtgctctactgtaggagcgtcaaaagcattggcagcgatgctgccgttggtataggtccacatgaacataaaagcaaaccagcagaagaactgtaccagtccgatagtccagaatgctttcggagccttgatgagcagcttcagcatgttggtcttttcatgttcctcttcttcggtgatgccgtgatactctgcatattcggcaggcggcatctcttttactttgaccgaagtgtagatgacgcagaagataaggatggccgctccgatgtagaatgagtaaatcaccgagtcggggattactccttggggagctgtattgctgatgccaatccatgcaaagatgaacgggaagagatatcccaccaggctgcctgcattgcagagaaaactctggatggagtaggcgagtcctttttgtttctcattcaccatgtcgcccaccatcattttgaagggttgcatggccatattgatggaggtgtcgaggaacatcagcgataccagtccgaaaatcatggctgtacttactgccatgccgaagcttccggcattgggtagcaggcacatgacgagtacggccaccaacgaacctataaacagataagggatgcgccgcccgaagcgtgtccaggtcttgtcactggcggctcccacgatgggttgtacaatgatacctgccaacggcggtaatatccagaaataactcaaattatgcgggtctgcacccaaagtggaaaagatacggctgatgtttgcactctgcaaagcatatgcaatctgtacgccgaaaaaaccaaagctgatgttccacagcttccagaaacttaaatcgggttttactttcatgatggtttaatatgttttattatttcgtagttcctcttatcaccagattggtacgtactatcttgttgttgcttttctcttctccctccagctttccggtcagaatgctgaaagcgcttttacctacttcctcgccatgctgctccacggtagtcagcttcgggtcggtgctttgggcaatggctccgtcggtgaatccgcagatggatacttcatcgggaacttttacgccgaccagtttgcaggcatacagtatgcccgaagctgtctcgtcgttgatggcaaagaaaccgtcagggcggttttcgctttccagcaggtcgggagtgatggagatggcgcgttcacgggtgtcgcacaacagaatcatgctgtcgtccaccggaattttatacttcttcatggcatccaggtagccgttccggcgattcttggtaatctctaggtggggagccgcaccatagaaaaggatacgcttgcatccggtctgtatcatgtattccacggctgcaaaggagccggcatagtcgtccaccaccactcgctcggttttcagccccgtacatatacggtcgtaaaagacaatgggaatatcgttgttcagcagctcctggtaatggtcgtattgggaagtgtccttggcaagtgaagcgatgactccgcagacacgggcggcaaggaaagaatgtacaattttcacttcctgctcgtacgattcgctgctctgcgccactatgatattatatccggcatccgccgctgctttctcaattccgctcaatacgcaggaaaagaagtggtgtaccagttgggggacaatgacgccgatggtattgctgcggcttgcgcggagatttacggcaagtacgttgggcttgtagttatgctcgcgcgcataggcatggacaaggtcacgtgtttccttgctgatgtccggattgtctttcagcgccctcgacacagtggagggggagacattcagcgcccgggcaatatccttgatggtaatctgcggtttattcatggtatagttttgaggacaaagataaggtaaacttccctaatccgattgcaaaaataacgtaataaggtaaattgtgcttatccgttgaggtttatcgggttgtaagtttgtgcaaacgattgcagatacccgtattttgacaaattaaggtgatatatagttctatattccctaaatgcttatatttgcagtacgcaattaatgatgataacgccatgaaacacatgaagtttttgactttcttttttgtattgcctttgcagtatttgcatgcagcagcaataatgagacagaccccaatgctggtggacttcccgataaggaggaacctctggctacagactttgctaaaggtgccgacatcagttgggtgacggagatggaacataagggtatgaaattttacaatacctccggtgtggagaccgattgtttccagctgatgaaggatttgggcctgaatgcggttcgactcagagtatgggtcgaccccaaagaacacgataactggtgcaatacggccgatttggtgacgaaagccaagcgtgccgcagagctgggcatggacgtaatggtagacttccattacagtgactggtgggccgaccctggacagcagcataagcctgctgcatggaaaggactgaacttggccgacttgaagaaagccgtcgccggtcatactgccgatgtacttaatgcgctgaaagcggcaggagttactcccaagtgggttcaggtaggtaatgaaatccgttcggggatgctctgggatgaagatgctgcattgagtggtgcgtcctatgatgtgagggaatgtgatgtaaagggttccaacagcacttccgaggaagtgaaataccgtgagaactttgccaacctggctgcttttatcaatgtaggatacgatgcggtaaagtccgtcttcgacgatgccattgtcatcgtccatctggacaatggatatgacaacgaattgtatacctggttctttgatgaactgagagccaatggcggtaagtgggatatgataggcatgtcgctctatccttactggacgatgctcgagcacaaggaatatacagctgatagaactatcaccgagtgtattgccaatattaatagtgtagcccggaaatacaactgtgacgtgatggtggtggaaaccggcatggagtgtgccgacgacaaagggaatctggcaagtgcttccgtgctggcagaagggaaacgccaactggcacgtatcctgaaagagtgcaaggagaataccggcggacgctgcaagggcgtgttctactgggaaccggaatgcaggccgaaccaatatcggctgggggcattcactgaagacggccgccccactgtgataatggatgcttttaaataattatattaacaaaatcttttaaagaagaatgagaaagacaatacttatcttttcctgctgcgctttttttgccttggcggcaatggcgcagcgtacagaagcattgttggaaaagaactggaagttcaccaagggagatgttcccgaagcaacacaaacaaatttagacgacagtaagtgggaaacagtgaccattcctcatgattgggccatctttggtccgttcgaccgcaacaacgatttgcaggaggtagcggttacgcaagaccttgaaaaacaagcttccgtaaagaccgggcgtaccggagggttgccttatgtgggtgtcggttggtatcgtacggcttttgatgcttctgcagacaagcaggtcactctggttttcgatggtgctatgagtgaggctcgggtctatgtcaatgggaaagaagcttgtttctggcctttcgggtataactcttttcattgcgatgttaccggtttgctgaatgccgacggtaaaaacaatgtgctggctgtccgtctggaaaacagaccccagtcctcccgttggtatccgggggcgggattgtatcgcaatgtccgcctagttactacggaacgtgttcatgttccggtttggggtacacagctcaccacaccgcatgtttctgctgaatacgcttccgtgcgtctgcgtactacaatacggaatgccggtgatgcggatgttcgtatttctactgatattattgcgccggacggtaagatagtagcccgtaaggataatagccggaaaattaatcacggacagccatttgagcagaatttgctgataaatgctccgtctctgtggtcccctgagacaccttatttatataaggcagtatctaagatttatgtagatggcaaacagactgacgaatataccacgcgttttggtatccgcagcattgagattatagctgataagggattcttcctgaatggtaagcaccgtaaattccagggggtatgcaatcaccacgatttgggcccgttgggtgcggctgtcaatgtggctgctcttcgccgtcagttgacattattgaaggatatgggatgtgatgcagtccgtacctcccacaatatgcctacacccgaattggtggaactctgtgacgagatgggctttatgatgatgttggaacctttcgatgaatgggatattgccaaatgtgagaatggttatcaccgctatttcaacgaatgggcagaaaaggatatggtaaacatgctgcatcattatcggaacaatccttgtgtggtaatgtggagtataggaaatgaggttcctacccaatgtagtcccgagggctacaaagtggcttctttcctgcaggatatttgccatcgcgaagaccctacacgccccgttacttgcggtatggaccaggtaacttgcgtgcttgccaacgggtttgcggcaatgattgatgtacccggtcttaattatcgggctcaccgttatgtggagtcttatgagactcttccacagaatattgtgctcggttcggagacggcttccactgtaagttctcgtggtgtctataaatttcccgtacagaagggtgccagtgtgatgtatgatgaccatcagtgctccggttatgatgtggagtgttgttcctggtcgaatcttcccgatgaggattttgctttgtctgatgattatgactggacaatcggacagttcgtctggacgggctttgattatttgggtgagccttctccttatagtacggattcctggcccagccacagctccgttttcggtatcatagacttggcaagcctccccaaagaccgtttctatctgtaccgcagcctatggaacaagcaggcaaataccttgcatgtccttccgcactggacgtggccgggcagggaaggggagaatactccggtttttgtttacaccagctatcccagtgccgaactgttcgtcaacggaaagagttatggcaaacaacggaaacttactgctgatgaaagccgtgctttggaaggtcaggactcccttgctttgcagcgtcgctatcgcttgatgtggatggatgttccttatgaaccgggcgaagtgaaagtggtggcttatgatgtttccggcaatcctgcagaagaaaaggtgattcgtaccgctggcaagccccatcatctggagctggttgccgaccgcacgcacttgtctgccgatggtaaggacctggcatatatcacagtccgtgtcgtggataaggacggtaacctttgtccggcagacagccgcatggtaaacttctcggtgaagggtgccggaaaatatcgcgctgctgccaatggagatgctaccagcctcgatttgttccatctgcccaagatgccggctttcagcggtcagctgacggctattgtgcagagtggcgagcaagccggtgagattgtgtttgaggcaagggctaaaggattgaagtccggaaagctggtactttatacttcagagaaataaatagcactatttgcttccactctaccacacctgctctgtaaccctttgttcatcggtgtttgaggtgcggtggaagcaacagaaaaaggtggaagcaaattttgcttccacctctgtttttagggccgatatgatgttaacttgttgtaatgtaacaagttaatatcatgtcggccattttgttaatatcgtgttaatggcatattaatattgtgcagacacgttattcatatcctgaaagtatgttgcttggttcatacatgcatggcatttcttcagtaaaagctttgtgtttcttttgttttgtcttgatgttgtgtagtacttaacggtcgtaaagcgatttgttgacggccgtaaagcgatctgtcaacggccatcgacaaatcgcctaacggccgttaggcggtgaaaatctctgtactttagcagaataaacatatatgttatgtgcaagaatgccacatgtagagtggagagaagcgctgtattatgatatatcaagtgatttttctatcttgtgcaaccgcatgcaatcgtttgcactgttcgttttccacattttacactctctttatactttactaaagtaataaagcatatttttgttgcgtcatgctttaggtacttgaaagacgttagaaagcgaaagtacgaaaattatttttcgaataatatatataggtaattaatattgttaactttaatttattaaatgcatgaagcaagttaatcttagaatctgtcaaacgattcttaccctaatgttagggttattcttgtctgtaggcgcttatgcacagaacatcaccgtgaaagggcatgtaaaagatgctttgggaggagtgataggcgcaaatgtagtggaaaaaggaaattccacgaatggtacaatcactgaccttgatggtaattttacattgacagttcctcagggagctacgttggtcgtgtcttttatcggatacaagacgcaagaagtagctgctgctccttcagtaattattacattacaagatgatgcggaattgttgggcgaggtggtcgtaattggttacggtacagccaaaaagaatgatttgactgggtctgttacggctattagtgcagataaaatggtaaaaggtgctgttacatctgctactgatatgttggttggtaaagctgccggtgtaagtgtgattactgacggtggtgctccgggagctggtgctacaattcgtgtgcgtggcggttcttctatgtctgcatccaataatccgttgattgttattgacggtgtgcctgtagatgacggtggtattaatggtatgtcaaatcctttggctactgtccatcccaatgatattgagacttttactattttgaaagatgcttctgcaacagccatttatggttctcgtgcatctaacggtgttattattattaatactaaaaaaggaaagtctggacgtgtacaagttggttatagcggtacattctctattaatacaagacccaataaagtagatgtaatgtctgcaaatgaatttagagaatttgtgacttctaaattcggtgaatcaagtgctcagtttaaagcattaggtcaggcaaatactgattggcaggatgaaatattcaaaacctctttcagtacagaccacaatgttaatgtttctggtgctataccacacatgccctatcgtgtatcagtttcttataccaatgaaaatggtatattgaagacttctaatatggagcgtttgactggtgctattagcttgaatcctaatttctttgataagaaattgaatattcagttgaatgtgaaaggtatttataatacaaaccgttttgcagatactggtgcaataggtatggcgacgcaatatgatccgacacagcctatttacatggatggaaatccctatggtaacggctactttatgtatatgaaaagtggcaataatcctacaccggttgatattggtttggctaatcccgtttctattttagattcaaagcatgacgaatcaactgtttatagaagtattggtaatgcacaaattgactataagtttcatttcctgcccgaattgagagcaaacttgaatttaggttacgacgtgtctaagagtgaaggtgatgttattatagaagataatgctcctatgacttggtgccaaggtaactataaaactggttttggggaaaatagcagctattatcaattgaagcggaatacattgctggatttctatttgaattatgctaaagagtttggtgcacatcatgtcgatgttatgggcggttattcttggcagcatttctataattctacatggaccaaatatccttattctacagtaaaagctgaagaaactggtaaggaattctataaggatatggaagattattcaactgaaaactatcttgtttctttctttgggcgtttgaattatacattattgaatcgttatttggtgacatttaccttgcgtaatgatggttcttcacgtttcaataaagacaatcgttggggattatttccttcagttgctttggcatggaagatgaaagaagagaatttcttgaagggagtggattggctttctgatttgaagttgcgtttgggctatggtattactggtcagcaaaacctgaataatggtgactatccttatatggctcgctatatgtattccaaagctggagcaaattattattttggtaataacaagtattcattgattgctcctcaagcttatgatgaaaacttgaaatgggaagaaactacaacttacaatattggattggatttcggtgtattgaacaacaaattgacaggtactcttgatttgtattatcgtaaaactgatgatttgctgaatacggttacagctcctgccggtacaaactttagtaaccagttgttgacgaatgtaggtacattggagaataaaggtattgaacttactttgacggctcatcctatcacgacaaaagattgggactggacattgagttataacatctcttataataaaaatgaaattaccaaattgacatttaatgatgacccggcttataaaggtgtgattcatactggtattgatggagcaaccggttataatatcatgataaatgctgttgatcatccttataattcattctatgtatgggaacaactttatgataaggctggaaatccgatagaaggtgcttatgttgatcaaaatggggataataaaatagacgaagaagatttggtcgcttacaaaaagtctgctcctgacgtatttatgggattaacttctcaattgtcttataagaattgggatttgtcatttgctttgcgtgcaagtattggaaactatgcttataacaatgtacaatccaatcgtgaggcttgggatggttcacaaatgtatgaccaaactggtttcttgaaaaatcgtttgacttctgcatggaaaacaaatttcaagacagggcaatatcgttctagttactatgttcagaatgcttcttttgtacggatggacaatatttcattaggatacacttttaacaagctgttcaatgataaacaaagtgcacgtgtttatgtcacggtacagaatccgtttgttattaccaaatatgatggtttggatcctgaaattagcggtagtggagttgataataatatctatcctcgccctcgtgtatttatgttaggcttgaatcttaatttttaatcaatgaagttatgaaaatattaaaatataaatatatattgtcggcagcccttttgagtacgatgttaggggttacctcttgtgtgaacgatctggatacggttccattggataaggatgaattggtttcggatgtcgtttttggaaaggagataggagcttatgaacaaagtttggctaaaatatatgcaggtttggtaataggtggtaatgcaggtggagactcagaccaggatgttgtcggcattgacggtggttctcaggcttcatttattcgcgtattgtggaatatgcaggaattggcttctgatatcgctcattgttgctggaatgatcctggtattccagacttcaatcatatttcttgggctgcttcaagtccatggatcaaaggatcatattatcgtttgtattatcagattaacttgtcaaatgcgtttttacgtgaaacaactgatgataaacttgcctcacgaggttgttcagagcaagtaaaggcttctattaaaactttccgtgcagaagctcgttttatgcgtgctttgatgtatctgtatgctttggatttgtatcgtaatgttccgtttgtagatgaaaacagccctattggtagcgttcgtccacaacaaattatgaaagatcaattatttgaatacattgaaagtgaaatgttggcatgtgaaagtgatatgcttgatcctgtagttggatttaatgataattatggacatgctaataaagctgctctgtgggctgcattgtctcgcttgtatttgaatgcagacacgtatgtaggtgtaaataaatatactgaatgtgtgacttattctaaaaagattatttcagcaggttaccaattggaaccggtttatggcgatatgttcaaagctgataatgaccaatccaaagagatgattttcccattgagatatgaaggtgaagatacaatgacctggggaggtatgacagctttgttatgctggggttctgctgattttcaagaagaaacgaatgcaaagggaggttggcaaggtgttagagctaagtcgtctttatataatatctttgaaaaagaggatagcagtgataaggatactcgtaaagcaatgttgcgtacagaagctaccacaaatattgagatcacaaatgaagctgattttgtcaataatggcattcccgttaccaagttttataatgtgaataaagatggaagtaaacctgcatctgcggaagcttggacagattatccattattccgtttaggtgaaatctatttgaatttagcagaagctgttcttcgtggcggacaaggagcaacaaaaacagaggctttgggatatgtaaatgatttgcgtaaacgtgcatattcagacaaggcgtccgcacctatttccgatagtgattttactttggactttatgatggatgaacgcgcacgtgagctattctacgaagctcaaagacgtacagatttgattcgcttcggtaaatatacttctgctgattatgtttggccatggaagggtggagttgcggcaggaaaatctgttgaaagcttttatcaagtgttccccttgccttcagacgatgttggttctaatcagaacctggtacagaatgaaggatactaatattaatgattaaacatgaatgatatgaagacaaaatatatttatttacttttggctggaatcttcgcattgatgtcttgtgaggaggatgctacccccatattggaattgaagactgctgctgcattgcatgcgctttcccaaacagacattactattactaaagacaataaggatgcgcaatttccggaaatagcttgggataaggcagattatggagtttctgcagtagttaattatgttgtaactctaacaaatacttctaccaataagagtattgtaataggagaaacaggggatgcaaaactggcatttacaaatagtgaaatgaattctttattggctaaggtaggagcatatccggggcaaacgtatgattttactgtttctttggtttctgaggcatatgatgcttatactgatgcagctagtaactcaataacttttaaggctacaccttatgaccctaatgtagataatattacatggaagtatgcttatgtagctgttggctatcctgattgggactacactactgcctatttgataggtgaccctgacggtgatggcatttatagtggttatgccaattttgatggtgctgcttcttatgcaatcattgatggtgcagaccttacgaaagtattggctaaagaccagcaagttactgctgatggtaaaggtttcattgaaattactttagatgcagaaggtaaggtaacccaatcagagaaagggctggtttggggagtaattggagatgctacgtctagtggttgggacaaagatacccagatggaatacgataccactactcgtctttggacagtggttactccgttgctcgataaggaattcaaatttagagccaataatgactggggattcaattatggagcagaagaaggtaaactttctgagttggccggtaacttggttgctggaggtcaaaatttcaaagtggtaaaggcaagtccctatattattactttaaatttgactaatgcaggaaaatatacttatagtatggaagaaacaacgattgagctttctagctctgcaatgacattgcctggtagctatcagagtggtgatggttggaagccggaagctgatgattgctataaggtagaatctgcagctcgtgatttcaaatatactggcactcactatttccctgccgatacagaattcaagttctatgattctggtacgtggattggtgttgttggagatattacttggaatgaggctaagacatcaactacgtttgttatcggtgatggcggtaatgttaagattgaggctgccggttattatcgagtaggtgccgatactaagaagatggttgctactttggataagacaggttgggagattattggtgatgctactcctggtggatgggataaaggcactttaatggattatgatgctgaaacgcaaaagtggtcggtgactgttacattaggtgatggtgaaatgaaattcagatgggatgcagcttggactataaactttggtggtagtttaggtgcgctgacgcaggatggtggaaatattaaagtttcagctggaacatacacgattgtattggatccagaagctaagaatgctacaatgacagccaattaaggctctcttatttatagaaaaaggattaagggggggacctttaatccttttttatttgtcagaccaatgaattgtaaatagatgaggaatttattttatactatacttgtattattgacagtgtatgcttgtgccggaaaacgcgagatagttactgaacaaaagcaagtattacctgctgtagaagacgttgtgatgtacgaaatcaatccacgtgtttttgctctgaagaatgcatttaatgtcatatcaaaacatcttgattctattcagtttttgggtgttaatgttgtttggtttatgccaatctatgagattggtgaggtaaatacggtgaattctccttattgtatcaaagattataaaagaataaatcctgaatttggaacagtagaagaatttaagcgtttagtggaattatgccatgaaaaaggaataagtgtaattttagattgggttgctaatcatacatcttgggaccatgcttggattaaagaacataaagagtggtatactcaggatagtatcggaaatataatttctcctgcaggaacgggatggaatgatgtggcagatttgaactacgataatgcagatatgtgccttgcaatgattgatgctatgaaatattggatacaagaagttggtgtagatggttttcgctgtgatgctgctgattatgttccatatactttctggaagcaagctgttgattctctgagggctattccaaatcggaaattgttaatgttggcagaaggtaagcgcaaagatcattttgatgcaggatttgatatgaactatgcttgggatttgatggaggcgatgcgggatgttttcgttaatgatagtagtgcggcacgcttgttggaggtggattggagcgagtatgactcaattccggcaggaaaaatgaaattacgttttattaccaatcatgatgaggcttctaaaatgtcgccaattgtggagttaggaagtgaaagggcagctatggctgcttttgttggaacagtttttttgcatggtggagcattgatttatagttcacaagaaattggacatgaggctcctattaatttttttgcatatacatccgtggattggtccgaatgttcggatatttatcaagaatatgggtgtttaatgggattgtataataaatatcctgcacttcggaaaggaatattaactgggtatcctgcttcagacgtcttgatgtatcagaaaagtgatggtaaagatgcttttatgatattggttaatgtgcgtaatagagatgtttctgttatcttaccggagggttggaagcatcatgtagctactgatatttacgaaaataaacctctggaattgatgaatgaaattaaactgaatgcattagagtatagaataattagattctgacggctggattttaataaaagaggagaccctatactattatattgtgtaaggtctcctctttctgtttgatatgcaaacgttttcgtgatattgttctcgttttcctttacgttaattgatttgccctttcttttccggttatatttgtgaagtgataactttaaatacttcatattatgaaaattatcgttcaacgtgagaatcttgttttatggcatttgatatgcttcagcgtgctgctggcattcacggcatgtagtgacaacaaagaggagtttcaggaatatttgactcctgcctccggtagtgaagctatttttgaacaaggttttagctttgctgaagctgcttcttcacaaagtgtcagttttgaggccggatatcaatggactgctgagctgagtggtgaggatattggctggtgcagtatcaatccggcaaaaggcttgtcaggaaaagctacgattatggtttctgttgctaaaaatgaaactggaatagcgcgtacagcacaattgaatattatatccggttcaaaaagggaagaaatatccgtcactcaagctgccaatgcaattgcaattcctgctggtctgagttatacaccggtggtaccagatgctgatcagtctcttgtcattacgtttaaagcggatacaaagtctgccctctatgagtataaaggagatgtgtatgtacatattggtgttgtcagtgaaggtcgttggcaattcgtgcctgcagagtgggcagaaaacaaagataaatgtaagatgactttatctgaggctaatatttggagtattacattgagtccgaatatccgggagtggtttgggagtggaaagacaccggtgaaccaacttggaatagtgattcgtagtgcggatggtagtaaaaaaggaatagatactgattcctttatagcggtaactgatacaaaatatgaaggatttgtacccggtgagattaaaactgccgctgtaccggctgatatggtcgaaggtatcaacataatggataattctacagtgacactggtactttatgataaagatgtgaatggaaatcataaggattttgcacatgttgtgggtgactttaacaattggaccttaagtaatgacgaaaagtcgcagatgtatcgtgatgatgcttccggatgttggtggattacgttggcggggttagatgctggtaaagagtatgctttccaatactatgtgggtacaaaggaaggtgaagtaattcatttggcagatgcttatactgaaaaaatactggatcctgataatgataaagatatttcagcttctacctataatgaaaacctggtttatcctaagggaggggtaggaatcgtttcgaccttcaagatacagaaagatagttataactggaagtataatgattttaaaatagcaaatcctgagcaattagtgatatatgaattgcacttgcgcgactttacggctacgagtgacattaacggtgcgatgggaaagctttcttacttgaaagaaatgggtgtcaacgctattgagttgatgccggtgcaggagtttgacggcaatgacagttgggggtataatccttgttttttctttgcgatggataaagcttatgggacaaaaacaatgtataagcagttcattgatgcttgtcatgaggctggtatggcagttattctggatgtggtttataatcatgctacaggaaataatccgctggctaaactctattgggatggtgataagactgcaaagaataatccatacttcaatgtggaagcacctcatccttatagcgtgttccatgatttcaatcatgaaagcccattggtgcgtaagtttgtgaagcgtaatctgcaattcttgttgaaggaatataaggtggatggctttcgttttgatttgacgaaagggttcacacaaacctcttgcactgaaagtacagcatccaattacgatgcgggtcgcattgccgtcctaaaggattataatgcggccatcaaggaagtgaaaaaggactcttatgttatcttggagcatttctgtgattcaaaggaagaaaatgaactggcagctgatggtatgcacttatggcgtaacttgaataatgcctattgtcagtcggctatgggggatgctgaaaatagttcttttagtagcctttatgagaaaaacactgcatgggtaggttttatggaaagccatgatgaagaacgcacagcttacaaacagtcgcaatggggtgatggtgtgctgaaaaccgaccttgatgcccgtatgaatcagttggcactaaatacaactttcttccttaccgttcctggtcctaagatggtttggcagttcggagagatgggatatgacatctctattgaagaaaatggccgtaccggtaggaagcctttgcattgggaatatttagataacgccgatcgtaaagggctgcacgatgtttatgcaggtttgatgaagctgcgcaatgctcatccggagttgtttgatgcaaatgcaactttgacatggaaggtggaaacttctgattgggacaacggtcgtacattattggtaaaaagtataacgggtaagcaactggtggtggtgggtaactttacacataccgctactgatattgttttccctgccactcctggtaactggaccaattactttacaggaaaaagtgaaaccgtaaataaacaggttaatgtaccggctcatggatatgtggtctacactaatttctgatttcggtaagaatcattcatacatctttatcagcacccgattcagccagttccaacggaaacggaaccagcgtcgggtgctgctttgttttcctccaaagcggagaacgaactcacggtagccatgtttacggaagggaagtcccacgtccatgaactctaagtggcggtatccgcgttgtttggcatcatccagtgctttccatacggcaagaatccccggatattgcagggcataagtcttgcgcatgccacctgagaaccatagataggcgctatcatctgaataaatgcatgcgctgccaccgataatcttctccttataaatgacgatgaagattttgctttgctgcccttttgtcaactggttttcgagatgctgaaagaacttgatactggggaagtggcgccgtatcttggaagaatatacgtggcgcaacatctgggcgaaacagagaatctcctctttggtacgtgcttcccgcacttgggcaccgtttttgaggcctttcttgatttgccggatacgtgacgggctgaaacgctcttccaccttttcgacgctgtgcaacgagttgcgcacccgcagccaattgatggcgatgtattggttgtctcggaaagatttgtatccgaacatggcattttccaggttgcggaactcgatgagaaaagaatcgcgcaatgcttcattggtaagcctttgcagcatgtcactgaagatagtctctttgtctgcctcgttattgaaatattctcccgtaccgtacacctcacatcttttgatgatgccgggtggaaacatgcggacacttttacgtatggcggcaagcagtttcgcaacgggcttgtcatcttcggatgccacaatgagtatgggggtataccccggagtttcctcgtagattcggaacaactctgtggaatggaaggtgttggtgcctggcaggtcaggaaccttgctcccacggtaatatgtagtgagtttgaggggcattgcttgcaaacttaacaaaaaaactgaaatttcggttggcatgggtaggcttttttattaaatttgtcactatagctgaagtcttacataaaaagaatggatatgatttttaagaaaaagaaaacggttctcgaagaacagccgctgtgctactgggaagagtcctcttatatgatggcagtgcctaaggggggtggaatggatttgtcggtacggctttttgagcgcgtggctgctatctctggagtggaattgttgaaaaaacgtttgcctgatgaagacgaaccgggatatatggaagtaggatatgatggcgaagtgtatgaaataggtttctatgaaggtgatttttcaatgcctgatatgtttaatcgtcgggattattatttcactgacgaagaactatatgctattggcagagccgatagggcacttacggtgttcatgaagttcggcgttgacgggcagaagtcctaccatctgcaactgaagattgctgtagctatggtgcccgacctgcttgccattgtggacgaaagtgccgagaaactggtttgtgctcggtgggccactctggctgccgactcggcggtagttcccggaacgagtgttttgttcacggtacatgctgtgaccgatgaaggaggcgaggtgtggttgcatacgcacggattgaaccgttgcggtttgtatgaacttgagattctgaaatcagacaaggagaattacaacaaccattattacttgatttccgcccttgctagtcatctgctcgataaagacgataggacttccgaacctggtgttggcgtatatatcgggatgttgaatgaccgtttgccgatagtggccacctacgtttcgtggacaaaggcgctggatgagtaccgaagcctcgttcttggcagtgcggacgaccgtgaggagggacacaacggccgtacggcacccgtgttcatctatacgagtgaggacgacgagaagaaaggcagactgcggaaggtgtccgaatacgatagcatgtggggtgagaatccgctattctttattagtacccgtgaaaccaatcgcatgagtgcgttggctcgcgagcgtttcggtcttgtgaaatacatggcaaagaaggacgaaggctctatcttgcttaaaattggcttgaagacagacagtgccgagcaggctgacgaccgcgaacatatttggtttaagctgttggagtttgatggagagcgtttcaagggacagcttatacaagaaccttacgacgtcagccacatgcacgagggtgatgaagggtggtttacggtagaggatgtgaccgactggataatctatttagaggaattttcggttactccggataccgcctatctgcttgtatgatacaaaaggaagcggggagaagattgtaagggcttttattcgccattcccggatattttatctaaatttgccttcgctaaacacgaatatgttatggaaagtttcagtgaattgataaaagcccgccgcagcatgcggaagtttacagaagaagaattgacacaagaacaagtcgtcactttgatgaaagctgctttgatggcacccacgtcgaagcgtagcaatgcatggcagttcatagtggtggacgagaaggataaattgaaggaattgtcctattgcaaggagcaggcatcgcagttcattgccgatgcggcactggctgtagtggttgttgccgacccgctggcaagcgatgtgtggatagaagatgcctccattgcttccatctacctgcaacttcaggccgaagatatggggctgggaagctgctgggtgcaggtgcgcgaacgttttacggcttccggtatgccttccggcgagtatgtgcacgaggtgttggatattcctttgcagttgcaggtgcttagtgttattgctatcggccataaggggatggagcgcaagcctttcaacgaagacaatctgcagtgggaaaagatacatatcaataagtacggaggaaagtaacagtgagtgcagcaaaagcaaacaataaccgtgatacatataaggccactgccatcacactgattgtattcggcattctttacttggtggacaaattggtgcatttttctgcaatcggcttgccgtgggtgatgaataaggataattttctattgtataccgcagtgatttttctgctgttcaagcatgacaagtcagtgggattggtattgataggtttgtggctgatattgaacttcgggttgataactgccttactcggtacgatgtccgcttatctgctgccgttggcgttgctggcattaggggctattctgtattggttggcaacaagataagcgtatggcaggaagaagtatagaagatatgtccattgcctttatcggtgccggaaatctagctactaatctggcaaaagctctttatcggaaagggtttcgtattgtgcaggtctacagccgtacaaaagaatcggcgcagggattggcacagacggtggaagctgcatataccacggagctgcaggcggttacgaaggaggcgcagctttatatcgtttcgctgaaggacgcggcttttgtagaattattaccccagattgtttctggaaaggagaatgctttatgggtgcatacagccggcagtattcctatgaatatttggcaggggcatgttgcgcgttatggagtgctttatccgatgcagactttcagtaagcagcgtgaagtggattttggacagataccgtgttttgtggaaagcaactcggaagaggatgtgcagcttctgaaggacattgcttccgccctatcggaaaaagtgtatgaagcaagttctgagcagcgcaaaagtttgcatctggcggctgtgtttacgtgcaattttaccaatcacatgtatgtgttggctgctgaactgctgaaaaagtacgggttgccgttcgaggcaatgctccccttgatagacgagacggcccgcaaggtgcatgagctggaaccgcttgccgcacagacaggaccggctgtgcgctatgatgagaatgtcattgacgagcatctgcggatgcttgccgatgagccgcaaatgctggaactatatcgggagattagcgagaatatacatcggttggcaataagataaccggatgccgatgcttgcctcttttgaactaatgttttgctgcatataggtatattataatgaacaagaaaaaagtgcaatgagtaccataaactatgatttgaaaaagataaaagcccttgtttttgatgtggacggtgtgctgagtgccaatgttatccctatgagttcggagggtgaacctctgcgtacggtcaacataaaggatggttattccctgcatctggccgctaagcaaggtgtgttgctgggtataattacgggtggacgtacagaagcagtccgcaagcgttttacttctttaggttttgaggatggaaatatctatatgggttcttctgttaaaatccatgattaccatgacttccgtgaccgtcatggcttgaaggacgaggaaatattgtatgtaggtgatgatattcccgacttggaggtgatgcgtgagtgtggtttgccgtgttgtcctaaggatgctgtgcctgaggtaaaggctgtggctcgctatatttcgtatgcagaaggcggttatggctgtggtcgcgacattgtggaacaggtattgaaagtgcaagggctttggatggcagatgaaaaagcttttggttggtagttgtttcaatcgttaaattgtaaatcgtcaaatcgtaaatgatatgatgttagataatctgaagaaatataaggtgattcttgcctctaactctccgcgaaggaaagaattgctggctggtttgggagtggaatatgaagtaagaactttgcccgatgtggacgagtcttatcccgaaacgttgcggggagcggatattcctctctacatatccagggaaaaggcagatgcctaccgtgatatgatgcatccggacgaattgatgattacagcagataccattgtctggctggatggacaagttctcggaaaacccaagaatagggaagaagctatgcagatgttgcgcgacatgtccggacgtacccatgaagtgtttaccggtgtatgcatcactaccactgagtggcaacgcagttttgcggcggcaacagaagtgcgttttgccaaactgaacgaagaggaaattgcctattatgtggacaaataccaccccatggataaagccggagcttatggtgtacaagagtggattggattcatcggggtggaaaacatatccgggagttactataatataatggggctccccgtacagaggctgtacagggagttgttggaggtctaaaccagatccatcattagagggatatctttttcactgattccttgtctgacaagtgtttctttgtctttaccgaacatttctctaaaaatctcctgcccgccatattccaaagctgctttactgtaaagttctgcagctttttctattttgcccgttctccaagcaacatgtccggcattgagatagtctgctgcgagtggtttggaggcgagtatcttttcgtaatacttcattgcttgctcatacttgccgttgacaaacgaacaccagcctatagcacgccatgctttgatacaattgctttcgatgaaatcaagcttgaagaaatattgcagagcctcttcatatctttccagttcggcaaggcagcttccggcgtagaaaaggatattatggttttccggctggattgcctccactttcttgtagtattccagtgcagaggcaaagtcccttatctgcctgtagcacgtagcgagatggcggattgtccagacatggtcgggctttagtacatcggctttcaggtaggcgtctatcgcttccttatacctcttttccttttgcaggcaatagccagccttttggaaaatgtctgcatttgcatggttcaaggctatcaattccttataaagctccaatgcttctgccgggtgttctttgcggaagtggaaatcggcgatggtaatcagcagctcgggtttgcacagaatatctttgagtgccgggatacggtgcagggcaatctcttccttgaagatgtcacggaactcgtgtctgcgctggcttaacttgaagaaacggtataagtcgtggacatactggttgctgatgacatccggtcgttcggcatactgccgtaaagcggaagatttgctttcgtccatgagtgcatccaaatcctgggaagtcatctggctgagcatcatcgtacgctgtgactgtggtatatgtgccattgtaaagcaaagggaatacttgtcactattgcagaagaaaccggattggaggataagggagaggatggcattgtctccggtaggcttgaatccgaattccttgatgatgctggagtgatgcatgtcgaacggatagaaccagttgtacggttccttaaagaacggataagtcttgagttgtgcaaacgtactcatatagacgtcagcgccttccagctgtaattcgttcatctcccgtatcttgtctcccagtccggaactttcaaaagctttctcccaatccggattaagatcgttttcctcagggttctcttcaaaaccgaacttcatgttgcgcatgatgttcacattcctcatcatctccggaatgatttcttcacgcatcttcttgtctatcttttccgtttcctggctacggagcagctcgatgtaaatacggttcagttgcttgccgaaactgccgtcttcgttgagcagggaaaggcgggctgtcaattcgggataaagcgacagacgggtgggatgaaaaagaagtgcgaaagcgatacctaccaaagcccgttggtttacttgcgtatttgcatgcgttacggcgtctagcaaccatgagaatttgcgggtatcgaagcattccatcagactgagcatgacggcactggtgaacaggcacaaatcattgacgggaagcatttctgattccagtaatcctttggcttgctgttcgtcttctgcagaccagtcactgttactccatgtggaaaggaaaagaacctgggcggtttgttcgtgccgttgcagtacggcgtccatgccttggttatccggcatcagctgacaaacggccaggtcatcagggaaagattccaataccttctgcagtgcggcaatattgtattctttggggaggcgttcccggttattgcgcagggaatggtaatagtgcgtggaaactccgtcaaggagagacagacgtgcctggtcagcgacttcccaagtttcggtcagaatctggcgatatagtttctgtcgttcaggatcgtcgattccctggcgcatgtattgcagcatgtactgataggatgtctgagcttgttccaagcggttgcggagtgtccagtcaccgctgttccaaagaaaggcttccagttgggattgtgcttccttcagccgttgctgcttgagtagagtaacgatatgctgatattgttcttgtatggcttgttcgttcataaatcagtctctttttgggtatgtatcttataaaactacaaaaaggatgccaaaaagttcataaatttccatttccccagctcagaaacgaacttgcaactgtgcttgaagcaggtttgagttttctcctttatggcggttacagtatgtatactgggcttgcagacggcatttgggatagaaccaatactgtacacctgctacataattggtctgtttatcggaaatagttttatttttgttgaaatagtcataagaggctattacgtcaaatttgggaagcacatgggcagatacggttgcatagtaaccgtcacttttaacgtgtccgtcttttccggccaagtattctgtacgtacatctacggattttgttttgatggtggcacctgccgaccagcggtttcgggtgtaattctctcctatggctatgtctggattaatggaagaaacggctacggcgcatcctttccctttaacaaaggaaccgccgacggacaaccatttcaatggatgtaccataaggctgcctacaatatctttctgattgtttttatcttttaggttgatgccttgtccgttcatgatggcaaggttataagtcatcaaagagtcgaacaagtctccataaattaacaatcccatatcacgaccgcttgcagagccatacaacggatcactgccattgataccggccaggtaattgacggcttgagaataacagtttattaattcgacaaagcagggagacatcgggttctcaatggtatacatggttttgaactgtccgatacgtgctgtgagttgagggagaaagcggtattccgtgtaggcttccagaatttttccggtattggcaaagctgtacatgaagtaagccgaccatttatcggtgattttaccgcgcgccataaagataactctctttatatcgaaagtattgctggtaccttcgcccgcatcatcgtatgtatatcccacttgggcatagccggagagtgaaatgcggtcttttaaagtgttgactacatcattcagacaagcatcttgtgctttcaggatgcatgtggctgataaaaggatgcaggatagtagaattcgtctcattatagggatggatagtagtaaaaaaggcaacccttttttcaaagagctgcctttgggtgttattttgcttgtttttattcgttgatagcagcgatacccggaaggatttttccttcgattgcttcaagcaatgcaccgccaccggtagatacgtaagacacgccgcttgccaagccgaacttgttgacacaagctacagagtcaccgccacctacgagtgagaaagcaccgttcttggtagcttctacgatagcttcgcctacagcgcgtgaaccgtgagtgaagttctcgaattcgaatacacccgtcggaccgttccaaaggatagtcttggagttcttgatgacatctgcaaagatcttttcagtctcaggaccgatatcaagaccttcccagccatcaggaatttcgtcaaccgggcagaacttggtgttggcatcgttggagaaagaatcggcaatcttggcatcaacagccaaaacaaggtttacgcctttttcttttgctttcttcaccaggtcaagagccaaatccagtttgtcatcttcgcagatagaaataccgattttgccgcccatggctttggtgaaagtataagtcataccgccggcaataatcaggttgtctaccttgttcagcaggttttcaatgatttcaatcttggaagaaactttggaaccacccatgatggcagtaaacggacgttggatatcgttcaaaactttatcaacagcctttacttctttttccatcaggtaaccgaacattttgttgtccttgtcgaaatatttagcgatcaatgcagtagaagcgtgtgcacggtgagcggtaccgaaagcgtcgtttacatagcaatctgcataagaagccaatttcttggtgaattctttctggctttccttaacagcagctttggcagccttcttttcttcgtctgtagcatcttcagccaaaccgcggggtttgccttcctcttcagcgtagaaacggaggttctcgagcaacaacacttcacccggttgcagagcagcagcctttacggcagcttcttcgcccatacagtcgttagcaaattgcacctcaacacccaacaactcttcgagatgcttcagaatgtgcttcaaggagaacttgtcagccgggcctttcggacgaccgaggtgagaaccgataattacactaccgccatcggccaaaatcttcttcaatgtaggaagagcggcacgcatacgggtatcatctgtaatgttgaagttttcgtccaagggtacgttgaagtccacacgaacgaatgccttttttccggcaaagttaaattgatcaattgtcataatactctattttatttaaaagtgttactaatttctttttagtgagcgcaaagttagcatttatttcttttttttgctatgaaaccgttgtttattctttgtctttgccgctctctttgctaactttatatttctggcaataatatttgcacattaattgcaaaccgcaggtatcacattgtggagtacgtgcctggcatacatagcgaccgtgaaggataagccagtggtgggctatagggatgtctgtttccggtatatgttttaccaattctttttcgacactgaacggggttgtacatttatctgatacgagacccaggcgatggctgacgcggaacacgtgtgtgtctactgccatagccgctttattgaaaacgacggattggatgacattggctgttttgcggcctacgccgggcagttttaccagttcttcaaggctatcggggacctcacttttaaagtctttcaccagcatttgggccatgcctacaaggtgcttggccttgttgttgggataggacacgctgcggatatactcgtataccacgtcgggagtagtagcggcgagtgcttcgggagtagggaagtcccggtaaagggcaggggtaatcatattgacgcgtttgtccgtacattgtgcagagagaataactgctatcaacagctcgaacggattgtcataatgcaactctgtttcggctacgggaacgttctccctaaaccaagcaaggattttttcataacgctctttctttctcatcttaatttgtttttatgatagtgaggagatactttcagattgaaataaaagatggagataaccgtgaggcaggctccgaaaaaatatgccatatcgaaagaggtaatctgtgcgatataacctcctgctgtcagacctatgccaatgcctacatcccatgaagtcaggtaggtagaggtggctgttccgcgctggttgttgggggccagatttacgaacagcgtattgaaggcggggaacatcgtcccgaagcctactcccaataggagggcaaccataaaaaacaatatgtttgtcaattctgggacggtcttcatcagtagtccgcaagcggacaatatgaagaaacagctacataccagatatagtcctaaagttatgacttgggtgatacgccctttatccacttgtttgccggagaacatgcgggacactgccatgccgacggccataaaagtaaaaaacaatccggaattcaaggtaattcctatttctttggcatacatggctacataagtgcttgtcatgccatatggtatggagagcaatagcagtgcgattcctgccgggatacctttcagcagcacaaagcggtccaatgagataggttctcgtttgacaggttgtttgggtggggtcttgacgaggcatgcggcaacaaaaccgatagttcccgatatgagcgagcaggcaaaaatcgtttcaaaggaatagatgtcatgcatgaaaagaccaatcatcgggccgaagctcatggctgtattgttcatcagtccataatatcctacggcttcgccgcgacgagatgaaggggtaatgtcaatcacaattgtatttcctgctacagtcaccattccaaatgcaagaccgtggacaacccgcaacatgatgaatatggataggactcccgccaacatgtaacctgcgaaaatggtgataaagatgaaatatgccaccagataaagaggcttgcgggccagtgtgtcgagcaggtatcccgaaaatgggcgtatgcagagcgaggcaatggtgtagcatgacaagatgacacctactgctgcatttccggtatggaatacctcagtcaggtagaatggaagaaccggtagtatcagataaaaggcaaaatacaaaaggaaattggcagccaggataaggcaatagccggaggttacaagtttgtcttttgccatagcgaaaaatagtggttagcgatgagtggttagtgatgggtgattaatgatatgctgaaaatgcgcaacttattaatcactaatcactaaccgttattcactatatttagtaagcgctctcgaattctttcaagaagcgtgtgtcattttcagagaacatacgaaggtctttcacctggtattttaagttggtgatgcgttcgatacccatacccagggcatatccgctatacactttgctgtctattccgttcagctccaatacattcggatctaccataccgcatcccaaaatttctacccaacccgtgtgcttgcagaaggggcagcccttgccgccgcagatgttgcagctgatgtccatttcggcacttggctcggtgaaggggaagtaggaaggacgcagacgaatcttggtgtcactgccgaacatctcttgcgcaaagagcaataaagcctgcttcaagtcggtgaaagatacattgcggtctacgtacaaggcttctacttggtggaagaatgcgtgtgcgcggtagctgatggcttcattacggtatacacgtcccggacaaagcacgcggataggaggctgtgtagtctccataacacggctttgcacgctggatgtgtgtgtgcgaagaatgatgctgtgcgatacgttttctgtatcattttcgatgaagaatgtatcctgcatgtcgcgtgccggatggtcttcggcaaaattcatggaggagaatacgtgccagtcgtcttccatttccggtccgtcggcgatgttgaatcccatacgggcaaatatatcgatgatttcgtttctcacgatggaaagcggatggcgagttcctaattctaccgggtaggctgaacgggtcaagtcaatatcgtcacagccggtatcctggctttcgaattgttccttcaaggcggcaatcttttcttgtgctttgtttttcagttcgttcaagcgcattcccacctcttttttctgttcggcggctacattgcggaaatctgccattaagtcattgatggctccttttttactgaggtatttgatgcggagtgcctctaattcctcggcgttagcggctttcagcgcctctacttcctgcagaagctgattgattttagctatcatatcgttgttatcttatttattttctaagttaaaaacggtgcaaagatacaatattatcattgttttgcctccacttggggaagataatttggtatcagtggtacaaaattttatgtgaagaagaaatgatagaggatgggagaaaaaatgatatatatgtaaaagtcttcatattgtttatggaaaaaacataaatgagcgttgtttagtgacttttaaaatatacttttcgtatctttgcgccccgtttactgttctatggaggtagaacaaactggcggttggtatttattaacatacgtcaaagagagagagttaacggagtaattgttgcattaaagttagagtttgaattgatgaaattgaagacaatcctgccagtcgtggcagttgcgggagtactcatgtgtgagcctgccgtattgttgcatgccggtacatctgattttgcttctcccgaagctatgggatggttccgtaagaaaaagaagagtgaaaccaaggacagcgttcaatccaagagcgactacgaaaaattgactggttccgatgctattgcccgcaagggaatgttcaatgtttaccagaagaagagcgattattactttgaagtgccggcaaggctgttgggacgtgatatgctggtagtaaataaattacaacgtgtgccttccgaactgaatgaggcgggtgtgaaccgtggtacgaattacgaaaatcagatggtgcgttttgaattggacaaggctgccaacaagctgttggtacgtcagagccgtcctcttccgttggcactggacgaggatgccatacggcagtccgtactggataattatatttctccgctgatagccggcttcaagatagaggcattcaataatgactctaccatgatagtggtcaaggtcaacgatatttatgatggtacggagacgagtatcaataatgtctttacgaatatcaacctgggaacttcggccatcaagaatctctcccgcattttatctatcaaagcttttgagaacaatgtggtagctacttccgagctgacaactaaggtgactgagggaacaacgactgtgtttgttacggtcgaagtcagttcctctctgttgctgttgccggagaaaccgatgatgggacgtctggatagtccgcgtgtaggttattttactaatccgttattaaattacagtgacggtcagcagcgtgtagacaagaaaccgttcatcacccgctggcgtctggaaccgaaaccggaagaccgggagcgttaccttcgcggtgaattggtggaaccggccaaaccgattgtgttctacatcgagaactccactccccgtcgttggcggaaatatatcaagcagggaatcgaggattggcaggctgcttttgaacgtgccggattcaagaatgctatcatagccaaggaactgacggacagcatgaatgtggataaggatgacgtgaactactccgtgctgacctacgccgcctccaccaaagccaatgccatgggcccctctatcctcgacccccgttcgggcgagatattggaagcggacatcatgtggtggcataatgtgctgggcatgctccaggaatggattacagtgcaaaccggtgtcgtacgtcccgaagcaagaggagtaaggctgccggatgaactgatgggtgatgccatgcgttttgtggcatgccacgaggtggggcactcgttgggcttgcgccacaatatgattgcttcctggacttttccgacagattccctgcgttccaaaacatttacggatcgtatgaataccacttcctcctctatcatggactatgcacgtttcaactatgtggcacagccgggtgacggtgttacggagctttctcctcatatcggtccgtatgatatgtttgccatagaatacggctatcgttggtatggtaaagaaaccccagaggcagagaaggacttgcttgccgacttcctgagccgtcatacagaccgtttatataaatatagtgaggcgcaggatgtacgtgatgccgtagacccgcgtgcgcagaatgaagatttgggcgatgatgctgtccgctcatctctgctgggtattgagaacttgaagcgtattgttcctcaaatcatccaatggactactactggcgagaaaggacagacttatgaagaagcttcccgcctatactatgcggttatcaaccaatggaacaattacctctatcatgtattggcaaacatcggtggtatctatatagaaaacaccgttgtgggcgacggacagaaaacctatactttcgtagaaaaagaaaagcagcaagccgccctgaagtttctgctggacgaagtgctgacctatcccaaatggctgttcgacacggaagtgggagagtacacttacttgctgcgcaacactccactgggcgtagtggagaatgcaccgacacaagtgttgaagaatgcccaatcctatatcctttgggatttgctgggcaacaaccgcctgatgcgtatgttggagaacgaatcggtgaacggcaaaaaggctttcacggtggtagagctgatggatggcctgcatcgcaacatctttgccactacggaacgcggtgccttgccggacgtcatgacacgcgccttgcagaagaacttcgtagatgcactgattacagcagctgccgaaagcgaaggagtgaaaataaacaaaaaactgatggacaaccacttcttgctggaccatcagactgccctttgcagctgtgacgagcatgccggtaagactttggatgccgaccgtatgggtgcacaccgcgaactgaacttctacggttcgcagataaaccgcgtatctgatgtcatctccgtgaagcgtggtgagttgcttcgcatcaaagaattgctccaaaatcgtctgggtgcatcggatatagccactaaatatcattataaggatttgattttgcgtatcaatactgcattaggagtaaagtgatttttcttttcaatagagtattaattaattttatatgtaacgcatgaaaaaacgtgtattaatcgttttgctatgctttgtaggagctttgtcatctgcttttgctgcagagaaaaaagtccagggcgtagtaatatcttcagaggataacctaccgcttatcggtgcttccgtttatgtgactgcggaagacttgaaaaaggcggggagtgctcagactacaatgggggtcatcactgatgtggatggtcagttctctatcgctatacctgcggggataacccgtttcttttgtagctacgtgggatatgacgtattggaagtgaagcttgttccgggaaaggaacattatgaaataacacttcatgcatcttcccaaatgctcgatgccgttgttgtgacgggttaccagacagtggagcgccgcaagctgacggcagcggtatccaaactggatatatcggacgagaccatcggtgcagtaaaaagtatcgaccaggcacttgccggacaaattgccggactttctgtcagcccgacttccggtgctccgggtgctccggcaaagatacgcattcgcggtactgcttcattgaatggtacacaagaccctttgtgggtgctggacggcattcctttggagggaacggatgttcccgaaccggatgagctgaatgacatcaccaacatgaagcaatcttccattgcaggcctgaatccggcagatattgagaatatcaccatcctgaaggatgcggcagccactgccatctatggtgcgagggcagccaatggcgtcattgtgattacaacaaagaagggtaaggtcggtaaaccggttatcaatttctcgtcccggtttacctatactcctacattgagccttgaccggttgaacttgctgaactcagcggagaaagtaggattggaaatggatatgatccgtaataactattctccggacaatcataaaggaggcgtatataatattctttccaattacaatgagttgtctgcttttcagaatggaggatgggatgccttgagcagtgatacacaagctgccatcaaccgtttgaagagtgttaatacaaactggggagatatccttttccgcgatgctttcagccaggaatataacttgagcctttccggcggtacggaaagggttacgtattatacctctttcggctattataaagaggatggaaatgtggacggtgtgggtatggaccgtttcaacttggtaggaaagacttcctataaggtgaacagtatactgaaagtgggtgcctccatgtttgccaaccgtcgcaaaaataccaattatctgacagatgcatacggtatgtcgaatcccgtgttctattcacgcaaggctaatccgtattttgaactttatgacaagaatggcaactataattacgactacgatattcagaacaacactgataaggatttaggattcaacatctttgaagaacggcagaacacgtctaatgaaagcgtggtgaattctttttcatctatatttgatgcggagctacggttcaatgacaagtggaagctgacttcccagtttggctatcagttggaaaagacttccagagaagaaatagcggactgggaaagctatgccatgcgctattactataagttgagcgaatactcccagggcggagaaaccaaacacttcctgcccgaaggaggtatgcagaagtcttatgaaaactccaattcacagattacttggaaggcgatgggagaatatcgcgacagtttcaatgatattcatgaactggaagtgatggcgggtaccgagctgcgcaagacctggtatgaaaccttgttctcggcagggtatggcttcgaccgcaagacgttgacgaccaaaccggtgattttccccaacgaaagttacgccacgtctttcccgctccatcagacaacgtataaggagaatgcttatgtatctttctactctacggcctcttactctttgttgaaccgctacacggtgggaggaagtatccgctttgacggttccgaccttttcggtgtggataagaagtaccgctatcttcctctttattctgtcagtgccttgtggcgtctgtcacaagaaccgtttatgcagcaggccaagtgggtggataacctggtgttccgtgcatcttacggtctgcagggaaatattgacaagaatacttctccgttcctgttgggtacatatcggtcggaaagtattttgcccggagtatcggaagatgtaattattattaattccgctcccaacaagaagttgcgttgggaaaagacgcagtctgtcaatgccggctttgatttttctgtattgaaccaggctatcaatctgagcgtggactattattatcgtaagggtaccgatttgatagctttgcgcatgcttcctctggagacgggctttacttcgatgaacgtcaactgggcaagtatggagaacaaaggtgtggaaatcagcttgtctacccgtaacataacgacaaagaacttctcctggtacacaaatttcaattttgcctataacggtaataaggtattgcaggaaaacataccggagcagcagaccactccgggacgtgaaggctatcccgtaggggcaattttcgcactgaagactgcgggagtgaataaggaaaccggtaatatgatgttctataatccggagggagagaaagtgaccttgaaggagctttaccgcctgaaggacgagtgggggataggtattgcctcttccgatgtaactgcagccgaagagagaaccttttattcgtatatcgggagtagcgatgctccttatacgggaggtttgattaataccttcagctataaaaactgggagctgaatgtcaatttctctttgacgtttggcgggtacgtacgtacgcaaccctcttatgacatcatcaatccggattatggcaagaactataatgcggatgtgctgaaccgctggactccggaaaacccgaatgcggagcttccggcatttatgctgagtgcttccaacccggaagagtactcctggtatgattctaaaaccatctggagagatttggatatctgggtgaagaagctgaactacgtacgtttgcagaatctgcgtctgggttaccgtatccctgagctcctgacaaagcgtttgggaatgaactcggcaacggtatctattgaaggacgcaatctcttcgtgtttggttcgggatataataactacatggatccggagtcgatgtacaatccttatgcaactcccgtacccaagtcggttacattcagtttgaacttgaatttctaacttcaaaagcagaaagaaaatgaagaaaacaataagtctgatgataatggcctgcatgcttctgcttgcggcatgcgacaactatctggatatacagcctaccggtagtgtcattcccaattctttggctgagtatagagcgttgcttgcccgttcttataaggacgtgagtaaattcagtgaccggggaatggcttgtttccgttccgacgagatgcaggttcgggataatgaatatgaccaaaattattatatggatatagagcgctggaacgaccttgctcccaatgcctatacctcatcgtttgaatgggccaagtattacaatgtgctttttattgccaatcacgttattgagagcagaagtgatattaaggaaggcactgaggaagagataaatcagcttgtaggagaagcgtatatgctccgtgcttatgtacatttcttattggtaaatctttatggacagccctatactaaggagggagctttggataccaaatcggtaccgctgaaattggatacggatttagagaaagtcctgaaacgcaatacggtggaagaagtttatacttccatccaagcagatattgacgaggcacgcaaactggtcatgaaggcagaatgggaacagagatattcatatcgtttcaatgcggcttcggtagaggcgtttcaatcacgcgtatccctttataagggcgagtggcaggcggcttgggatgctgctgaggcagtgcttgccgtgaagtctgtattggtagatttgaatgatgccgctgcaactcttcctaacagttataattccgtggaaaatattactccactggagacacctctgagcagtacaatcaatggggctgctctggctactccggtttttctctccctttatgctgagaacgaccttcggctggacaaatattttgctgaaacggatgaaaaaggtttccggaagaataagaaggcgggaagcaataactacttgtgtactttccgtgtgggtgaaatatatctgacggctgctgaggctgctgcccgacttggagaactgtctcaagcacgtactcgcctgctggaactgatgcggaaacgttatgcaccggaggcctacgaagcgaaatccgttgttgtcaatgccatggataaggaagcgttggtacaggaaatattagatgaacgtgcccgtgaacttgcttttgaaggacatcgctggtttgaccttcgtcgttccacccgtccgcgtttggagaaagtgcttgatggtacgcgttatgtactcgaagagaatgatgcccgctatacattggccattccgaaagaagccatagaagccaatccgggattgctgaactgataaagataaaactccccgattctgtattgacgagaatcggggagttttgtctttatgtggattggatatgtattttttacgtacctttgcaccgttttttgtaatagacagtcactagtgtccactaaaaattttttggtcactagtcggttaaaaattaaataaattcgattcacttgaatcatttagctctttgatatttttgaaattcgatttgtcgaacaaatctctaagatgagttttatcggttag

SEQ ID NO: 4419 - DNA, 54436 bp, Unknown
  gut microbiota DNA sequence
ctagaattgtactgcacagcctctatactcaaacttttattttaccatcttggaatttccaaaccgtccttgctcggcaaagccgggaatttggcatgcggctcggcctggtaccagaaagtggtcgacgagatatccgacttctggttgttgtagcgtccgtcatgacgccatcccaaatcctgtatcgtgaccttcaggtccttgtcgaagcgtaccgggtcaaggatatgccagcggtacagtccgaaagcggtcaccgcacggtacagcccgtcgggacggattacctggtgcatgccggcataaggggtggtgaactcctggtactggcgcgtcttctggttctcgaaattgtacgaaccgcagatgtagtcctcaaccccggtcccgcagatagtcgggtattccctgtcaccgtccatgtagaacttgatttccccttcaccccaccagcagttgtcgtttacacgccatgccaggtaggtacccacgtactgtcccttgcccttcacaccgtcaatcagcgtgtgcagcgacccctgggtcgggttggagcggcggaactgcgcgtggaagtaggcctcgtcctcaggaacttctgtcaaggtgtagttgatttggtagtacaggcgcatctcctcggcggtgttgatgttctccagcgtgatacgggctttcttgcggaaaggcatcttccagtagcagttgaaggcgctgcccggattcacgcaaacggccagtgaggagagctgtgcatattcattgtatgcgctgcagaagaagtcacccaccggacattcgacggaaggctccttctcgtcgtcccagtacattctcaggatggagaagcgccagttcccggtcggtgtcatccagatctgctggatggctcccggaccctcgatttccgcaatcgtgattgtctctcccggtttcacgatgatgaaggggtttaccttccaacccttgcccaggtccttggccgcatgatgagcgttggccacattgcgctgatccttgtccctgaccggatcggccatgccgcccttgcccttctcgcccgtgaagttctcagggctgatggaacgtgtcttcgcatcggacagtcttgacaggttacccatgttcatgtccagaccgttgaacgggtagttgctttgggcgtaaacacccacggtggccatgcataaggccgccaaaattaatgatttgattctcatgttttaaatagattaatggtttgtatatttagttaatggtttcagcaagttttgccagttcaagatatttcttgtatagtttttcgtagatgagggctcttttctcatccggccggtattcagcctcgatgtccgaccccatgtgccttgtcgcctcgttgatatccttgtacacccctgcggcaactgccgcgaacattgccgctcccaaggcacaggtctgttccgagcgtaccacacggataggcatgtccagcacgtccgccagcgtctgcatcacgaagggcgccttcttgctgatacctccgatggcattgaccgaatcaatgcgcagcccctggcccttcatatgctccacaatacggcgggaaccgaaggcggtggcttccaccagcgcacggaatatttccggggcgctggtacccagcgtgagtcccgcaacggcacccttcacgttctggtccgcatcgggggtacggcggccgttcatccagtccagggcgacaacaccgtcctcggagggttccatgtcctgggcctcacgggtgagttccaccagcatgccgtccagaactttctgcctggcctcccctccggggatatctttcagtgtccatgccagcatcttcctgaaccaggcgtagatgtctccgaaagccgactgcccggcttcgaaaccgacgaatcccggaagcaccgaaccgtccacctggccgcagattcccttgatacagcgtccgcctacctcgtctttgccggcaaccatgatgtcgcaggtggatgttcccatgatacgtgtcagtatccccggggcgacggatgcgcctacggctcccatatgggcgtccagcgcccccacggccacggcgattcctcggggaagtccaagcctgtctgcccactcgggtgtcagttcccctgccttggtgtcgctggtgtgggtttctgtgaacagatgggggagcatttccttcaaggccggattaagttcttcgagaacttcgccggaaggaagaccccaactggcatgccacattgctttatgtccagcagcacaacggctacgaaaaatctgttccggaatagtgttaccagttactaatccagtcatccaatcacagtgttctacccaagcataagcagcatcctttatagcgacgtttgtgttgataatatgtaaaacctttgaccatacccattctgatgaataagtaccaccttcataaagtaaataatcaaggttacgtttattaatcagtgcgttgatttgctcagcttctcgaacagctgtatgatctttccaaagaataaacatagcatccggttcttctgcaaactcgggacataaagctaatggcattcctgccctatcagttaaagcaggagtactaccagttgtgtcaaaacataatccacaaatagaagcaatctcttcttccttcaaatcagataaggctatatgtacagcctctgtcatggattcaatataatccaatggatgttggcgatagcgattgttgtgtgcatcgcagtaaagccccgctttccaacgggggtaaaaacttacccccgtagccatttcacggccagtatatgtatccactaccagtgcacgacaagaatccgtaccaaaatcaagaccaataacgtatttcttgtttgattccatagtttaaagcattatttggttgttaactcttgttttcttgcaatgaagaacccataataggcaatcactgcaaaagcaacggccggtacagcatatgcagccataatactacctgtctggtcggagacaataccctgaatttgggtcagaacggcagcaccggcaatagccattaccatgaatgaaccgccgattttagtatcatcccccaaacctgtaagaccaaaaccataaatggtcgggaacatcaatgacatacatccggaaatacccatcaggcaatagacgccgaaactgcccttgccgaacatggcacccaaacaacacattacagcaagaagcgcaagtcctatcaagagtttataagctttcacatatttcatcatggcagtacatacgaatctcattactacaaagagaataagtgacatgatatagtaagtagctgcagcctgttctgctgtacgtggcagcaaatcattcaatccaagccattcacaacaattatagaatgcggcagctaccggttccactccccgtaatgcatttacaacagcatctgcagaagcagaatctcctaaagaagccaatacaccgtcaaaattcagctgtaccatagcataacggatcacgaatgaccatacggctatctgtgcaccaatattgaaaaattgtgctattacaccccatacataattcttattctttataagacgacgaagagtggcaccaaactctattttttcacctttttcactaagattaggcattttggtaagccggatggcaagcaagagcaccaacatcaccagaccaagtaccacataagcagtagtaacagcattcaattcctgcccctggatggcggccagttcctcagccggaagttgggcacgctctgtcgccgtcattccattcagttgtgagaggatgaaaatctgactgatcaccactcccgtaatcgctccgaacggattgaaggcctgagacagattcaaacggcgtgtcgcggtactttcaggaccgattgccaatacataagaattagtagacgtctccagaactgaaagtccggcaaagagaacaaagattgccagcagatacataaagaagctgaaatcaacattcactcccgagctaagcatggcaggatagaacagtaaagccccaaatgcatatagaccaagccccagcatcacgcctgatttataagtgtatttcttgataaacaaggcaccgggaacagcacaacatccatatcccaacaaatagcacactacctgtatccaggctgtttttgaatcactcatactcatgatgcgcttgaaagctgcaagcatggtatctgtcagattattcggcacagcccaggcaaagaaaagagtagtgagcagaatgaatgggaagaggattcctttcggtattattttatttgattccatacgaattctccattatatagttaccctattgaaactttgtttttattacattcaaatctgctccaaataaatcttgcacgataggaaccaattgttcatccttaccctgtatatgaatcaccttttgcgtatggaccaatgaggcaccgggagccagctccgcaccaggagaagacgtttcaatttcatagaaaggtcccattatagaaccgtcttctaccggaccgtcattataagagttgattacatcgccggcaaacggatcttcctgaggtccccattggccatttacgtagactgaaggagtttcgggaagactacaccacaggattgtgagtacgcctttcgatgaatcataacttccgcaaatatccgttgcccgtgaagccggcaatcccagcttggaacgatagagcccgtcaatcttgaaatagataataccattttcctttatcagcctatccgccggtatcttaccgaaatattcatcattcacaattgttccttccgcatcttgcttataaggaatgaatacagtagtggtcggtgtaggattaaaacagccgagcatccacacagatacaagaccaccctcttttgtccatgccttgtcacctgtattggtaatcttattctcgctcttgtaagctacaattttcatatcatttgtaagctggatattaaaatcggcagccacttcaccggcatccatcaacgatacagtacggtcaatattcatatcaaaagtagtaccggaagcatttgtcaaacgggtatctttcacaaaacggatactaccgctgtcctgtgactttatgtcaaaagcttcagtatcaagtaccggaggaactatccaattatcataaacctgctcttgtcctcccttaaaataaagtgagaacggaccaccttccggaccaagccagaagcgttcctcacctcctaccggattaaactgggaactgactttgccttcatttatgaaacgataattaatccagccgtaactatcaccctcatcgccggaagcggaagtagtcattacacggccttgccatgcgggaataaccatcactttagaattcccatcagcagataccaattcagtatattcaatgccgtggtcctttaagaactgggcatcataagcataacttcccatcttgatttctttttgtccgccgcatgatacaagtattgcagttgcacctaccagcagagtgtttttcagtttggttgatttcaacataacgcctgtttcctttatttatagagaggtccataattcttgcaagctctatagtcactgccttccatatcctcgccaaaagcagtccatgcactgggacggaaaatattttcctcagaaacattgtgcatgcataccgggatacgaagcatggaagccagagtaatcaagtcagcaccgatatggccataactgatagcgccatggttagccccccagttattcataacggtatatacatcacggaaatatcccttacctgtcagacgtggagcgaagaaagtggaaggccatgtacggtcagtacgttcattgatggccttgaagacatccttatccaagtttactgtccagccttcggcaatctgtaataccggaccttgaccttttacgagattcagacggcacattgttaccggcatttcaccacgggtcaggaactgggaagaataaccaccgccacgcatatattcgcgactggccggatgccacttggtcgcagaaagacaagcttccacttcctcttccgtaatttcccagaaaggcttcattaccggtttattgtcacgtgtctggcagcctgtcccatcaagcgtacaggagcctgagttgatcaggtgaatgaaaccgtttgccgccttaccttccaatttcttacccgttacccgttctatggcattcggactccaataagtacgcacatccgcaaatatctgtgcagtattggtcaatagatgattgaagagcattgaagtacaattcagcgtatcattttccgtagcgaaagtaaacgcttcacggataccgttccaatcgaaagaagtattcagtatagcttctgaaaaatcaccgtcaggcttataatccgtccactggcgctgtccctggaaacccgcggcaatcgcattgtgtcccattgactcttccttgaaccccatttcagccaatttcggattgccaatcatcatatcacggaaaataagggtcatttttaccacatattcccaacgggcatctttctcttcacgggaatatactagatgttccggattaaagtctgtcccttcattactcttgcaatacttttctgtccatgccatggcacgtgcgaactcttcatggtcataaatgcccagctgaacacgacgttctatctcactggcatccacatactcattacgcatgcccaaatactcctggaagaaatcaggattgggaatagagcctgcaatgcccatggatacactgccgattgaaagataggatttccccttcattgtagccacagctatacctgcacgggcaaagcgcaacaatttctcctgtacatcttccggtatctccatatcggtcacctcctgtacatcacgtccgtaaatgccaaaagtaggcaatcccttctgtgtatggcttgccaatgccgaagccaggtaaaccgcacccggacgttccgtaccgttaaagccccagatggctttcggcatctctccgtccatatcaatagtttcgaatccataacaccagcaaggagttacagaaagtacgacacccactccactattacggaatttttcagccgccatggcagcttcagccactccaccaatagttgtatctgcaatgacgcactctacggaagtgccgtcactatgacgtaagacagaagaataaagctcggccactttatgggccatggccatagtcatatcctccaatgactcacggatacctccacgacgaccgtcaataataggtctgataccaattttcggctttccaccgattaatcttgaatttctcatggttcaactgattttattgagattaatataaaaattaactaaatcgattaagctatcatgtaaaaaaacagctctcctaaggagccatttcaataaattctccttcggcaagcacagactgcactgtattaccgttaataatgatatctatcagtatttcaagtgctttctgtactaaaacatctataggttgctgaatataggatataggggcgtcaaaaaagtcaaataccggattaccgtcaaaacccactaaacctattttaccaataattccctctcccatgtcctttattgtatataaacaagccaatgaaatcatgttggtggcaaaaagaaaagcgtctacaccgccatcaatcattttaggcaacaaacggtctgcggactttctgggagcatcctgcctcaaaaagaccacgttagccaagtttctcttaccggcttcatccatagcctttttataaccacggatacgctctttcatatggataaggttgacatcataagccaccatacaaggagcgttatagcctgcattcaaaagatgtttggttgatatataggaagcattgaagttattcaacgccacatagctgacattgatttccggaaaatagcggtcgaacaaaacaatagggatattattgttcacaagtgaagcgatggatttctcagaattgtcacaaggaacaatgatgagtccatctacccctttattaataaggttactaacaacacgggtcatcttatccttatcctcatctgaacttccaaaaagtacggtatatccccgtttggttgcctcatcttccaatacacgcgctaattgagaaaaaaatgggttggaaatatcagaaaccactaatcctattgtttttgttttgccactacgaagacttttggccgcaagattaggctggtagttcatttcattggcaattttcaatatgcgttgggcagtttcttctcccacgcgatactctttctttttcccattcaaaacgaacgaaaccaatgctgttgaaacgcctgcagcttcagcaatatccttcagcgatattttttttagtgacgacatatatttgtgtaacgtttttgctatataatagtattatacttttaggttacctcttgaatcagtagcacttatcgtattctcacgatgcaaatataaacataaaaattaaatctgcaaattattttgctaattcgttataacatttttatatttgcagtaccaaatcatgctaaaaacgatatgaactaccataaacgacacataaaaattaattttaaacttttaaaatcatgaaaaccaagattctatttacacttttattctttgcatgcagaatacactacctttatggacagactaacctacaaatagctccggaaactttagcaactccggaaaaaaatggaatatggttacaacctgctcaaaatacaaaagcacaacccatttggggatttgcaaatggtatccgaataggaattgctccattaggaggtccacgtgggctaattcgtatctatacaccttatttagaacatgatgaatttgttgttaccaatttcattgcttttgaaccaattgataaagcaaaaaataatagggggctctcagaattggaatggagtcaacttgataatgttcgtggaaaacgtttttggagtgggaatactcctgaagctccctcattcccaaatcaatattatccagctcacggagtaatagcaaaggaaaatggagttgaaacacttactgtgtatttcttttgtgaaacttttgataatggtgcggatatctatgtccggactaaattcacagaaggaaagccttatgagtttgaattaactacgtataccacggaagagtcagatgagctaaatcgttttatactcacagctactatgggaaacaaagcaagacttaggacattacatctcgcagatggtaaaacgaaagaagccggccaattatggccgagctataaagattctaatttcacagaacataaccatactccagtggcagaaatgataaaagataaaaatggaggtgtatggtttatagcgtcacctgatgagaaagaccctacaaaagctgtatatgctgaagatacacatacacattggaaatatactggtaaaaaagcaacgcaatattggtattgttccaatccaagtaatgagttagaaggagttgtgaatggtcgttatacttattgggcaagtaaatctccgatacctggtggtatcgcttatgagaactttgaactgactgaaccatttcagtctggtcaaagctatatttttggtatcacacctctttcaccggaagaattaataaaccacattatgaaataagaacggactactttttgggtagaacttcttttcctccttatttatcccctcttttgttcttaatttatagaacagaaaaggataaaaggtggataaaaataagaaaaggataaattacaaaacttactaaatagcttattactctaatgagagcagcagaaaatagatactctatttctactgttctcattttatatatatatacaacttgtcatagtataaaatctcaaaacaatcttttaaagtcaacttaagagatacttcttaactattgttggggtcttccttccggcgaagttctcgaagcatttcacttgctggaaccagttgctatctttgatgtttggccaactctcgaatcgtgagagtctgagagatttgattgtcgctcttgatgctcatcattctaaatgttatcatctggggatgggcagaaatgtttcaagatcatccttggctagagccaacggggacagggactatcacatctttgaggcgtatgcttactacttggtaaacgaagcaagacaaaagcgtgttaccgacatcttcaaactcggtggaaacgtttacgcctttgattcaacaaccattgatttatgcctctccgtattctggtgggctaaattccgtaagaagaagggtggtatcaaagtgcatacattatatgatgtggaaacgcagatacctgcatcctttcacattatcgaagcttctgtgcatgattcaaaggcgatgaatgaaattccctatgaatctggctcctattatatctttgaccgtgcttacaacaacttcaagatgttgtatcggattcatcagataggtgcttacttcgttgtcagagccaagaaaaatcttcaatacatgcctatcaagtggaagcacaggttacctaaaaacgtattttcagatatgactattggattgacgggcttttatcccaaacaatactatcccgaacctcttcgcttggttagatattgggatgaagaacaaaaacgtgagtttgtttttttaacgaatgcaagacacatttctgcccttcaagttgctgaactttacaaaaaacgatgacaagtggaactgtttttcaaatggctgaagcagcacctcaaaatcaaaaagttttgaggtactaccgagaatgccgttcggatacaaatctacgctgctatatgcacctactgcctggtcgcaattgttcaacacgacatgcaactggataggatcacgtacgaaattcttcaaatattgagcatctagttgacagataaaacgcctcttcgagacctctttgacaaaactaaattgcaaaatgacaaagaacgatttggaccaaatggaccaagtttatttgatttttaataacgtcccaattttaatgggacactaatgttcaattgccatttataaaaaatctgcgatttacaagaatttcaaaggactattctattcatcacctttttcccgcccaataaactccccccaatatcagcaccgcccccatcagagcaaccatcgtcagccgttctcccaacagaaaagcagaacctatcagcgtgaagagaggattcagataaatatagttggaagctcttattgttcctaattgtttcaatattacattccagactacaaagcaaatcaaggaagccaatacacccaggaaaagtaaattgaacagaatagccggctcgagaagacgagcaatgtcgaactgccagggatgaaccagaaatgcaggaagaatagtcaatactccataaaaaaatatcttacgggtaatgaaagttataccataacggttggacattttcctcattatcaagctatagaatgcccaggaaaaagcagcaagcaaagtaagaaaatcacctaaaggagaaattttcaatacaaagctaccgttgtaaaccaccaatgccacaccaaccaacgccagtaaagaaccgcctatcaatccacgggtggccttctcctttttataaatccacaaagaaagaatggtggtgagcaacggagccgtacagacaataaacgacacattcgtcgccaatgtaatctccaaagctgtattttctgtaaaaaagtagaatgaaccgcctgtcatgcctcctaaaaacatccaaaattcatctttccaattgtcggcaaacagttttcggggagaaataagccaaatgcccatataagctatcaggaaacgaagcaagaatatttcctgtggagaaagaccgtgcccaatcaatactttcgttgaaataaaggtcagcccccaaatacctaccgtaaggacggcaacaagatgataagtataatttttcattgcgttcatacacttccgataagtcgcacaaatatacgtactttcttttttcaatacaatgaaaccaaccataaataatgttcagggaggatttactaaaactcgaaggaagatttactaaaacgggaggaaagatttagtaaatcttccttcgagttttagtaaatctttaaaccccttattagaagcctattgaacgaactctcatttatcggcagaataataaacaacaatctgccgaatacacagacaaaaaacacaaaggatgaaatcttcccagacttcatccttcgctatatcctaaaaatcttttagtaaatatcctattgaattaatttagctattatttgtattacaaacaaaaaattagttttaaaagcacatcacaaatgtaagtaataaaaagtgaattatcaagtctttgccattgttttttatgttacttcgctacaaatctgaaaataaacccgtaactttgcaccgatattaaccgaatactaaccggttttaaccattgaataaacaatgttttcaacaaaatattaataagtaccactatggaatacaatttcagggaaattgaaaagaaatggcagaaaaggtgggtggaaaacaaaacctaccaagtgacggaagacgaaacgaagaaaaaattctatgtactgaacatgttcccctacccctccggtgcgggattgcatgtaggtcatccgctgggatatattgcttcggatatttacgcccgctacaaacgactgcaaggtttcaatgtactgaatcccatgggatatgacgcttacggacttccagcagaacaatatgccatacaaacgggacagcaccctgcaattacgaccgtcaacaatatcaaccgataccgcgaacagttggataagataggtttctctttcgactggaaccgcgaaatccgtacctgcgaaccggaatattaccattggacccaatgggcattccaaaagatgttcaacagctactactgcaacgatgaaaagcaggcacgtcccatccaggaactgattgaagcattcagccaaaccggtaccgaaggaataaacgtggcttgcagcgaagaactgagtttcaccgccgcagagtggaatgccaagagcgaaaaggaacaacaggaaatcctgatgaactaccgtatagcctatctgggcgagacgatggtaaactggtgccctcagctgggaaccgtacttgccaacgatgaagtggtggacggcgtaagcgaacgaggcggcttccccgtcattcaaaagaagatgcgtcaatggtgtctccgtgtatctgcctatgcacaacgcttgctggacggactcgataccatcgactggaccgaatccctgaaagaaacccaaaagaactggataggacgcagcgaaggcgctgaaatagaattcaaggtaaaagacagcgatttggaattcactatcttcaccacccgtgcagataccatgttcggcgtcaccttcatggtattggctcccgaaagcgaactggtacagcaacttaccaccgacacacagaaagatgaagtaaacgcttatctggaacgcaccaagaaacgtaccgaacgcgaacgtattgccgaccgtagcgttaccggtgtattctccggaagctatgccatcaatccctttaccggtgaggcagttcccatctggataagcgactatgtacttgcaggatacggtacgggtgccatcatggctgtgcctgcgcacgacagccgtgactatgcttttgccaagcacttcggtctcgaaattcgtccgttggtagaaggctgcgatgtaagcgaagagagcttcgatgccaaggaaggcattgtatgcaactctccacgcgaaggcgttactccctattgcgacctctcactgaacgggctgaccatcaaggaagcgattgccgctaccaagaaatatgtgaaagagcataacttgggacgtgtaaaggtgaacttccgtctgcgcgatgccatcttctcacgccagcgctattggggcgagccgttcccggtttactacaaggacaacatgccttacatgattgacgagagcgccctgcccttggaactgcccgaagtagccaaattcctgcctaccgaaaccggtgaacctccattgggacatgccgcaaaatgggcttgggataccgtaaacaaatgcgtcgtagaaaacgaaaagatagacaacatcaccgtcttcccgctggaactcaatactatgcccggatttgccggttcaagcgcctattatctgcgctacatggacccacacaacaaccaggcacttgtagacaagaaaacggatgagtactggcacaatgtagacctttacgtaggcggtaccgaacatgccaccggtcacttgatatactcccgtttctggaataagttcctgtacgacctcggcatttccgtagccgaagaaccgttccaaaagctggtgaaccagggcatgattcaaggacggagcaacttcgtctatcgcatcaaagataccaatacattcgtgtccctgaatctgaaagaccagtacgacactaccccactccacgtggatgtgaatatcgtatccaatgatgttctggaccttgaagccttcaaggcatggcgtccagaatacgaaactgccgagtttattctggaagacggcaagtacatctgcggatgggctgtggaaaagatgagtaaatccatgttcaacgttgtcaatcccgatatgattgtcgacaaatacggtgccgacactctccgcatgtacgaaatgttcctcggcccggtagaacaatcaaagccgtgggatacaaacggaatagacggtgtgcaccgcttcatcaagaagttctggtcactgttctacgaccgcaacgacaattatctggtaacggatgaacctgccaccaaggaagaactgaaatccctccataaactgattaagaaagtgacgggagacatcgagcaattctcttacaacacaagtatcagtgcctttatgatttgtgtaaacgagctgttcggaatgaaatgcagcaagaaggaaatcctgaaccagtttatcatcgttctggctccctttgctccgcatgtatgcgaagagttgtgggagacactgggcaatgcaggctccgtatgcgatgccaagtggccggtatgcaacgaagaatacctggtggaagatacggtcaactatacggtttccttcaacggaaaagcacggttcaacatggagttcccggcagatgcggcatcggatgccatccagactgctgtattggccgacgaacgttctgaaaaatggatggaaggcaagtccatcgtcaaagtaatcgtagtgccgaagaagattgtgaacatcgttgtcaaataacagatatgcaaattacaaaaccaaccaaagcggaagtgacgagagagctgaaggattatattttcatcactctgggactcatcagctatgcactgggatgggcggcattcctcattccctatcagattacgaccggaggtactaccggtatcggtgccatcatctattatgccaccggatttcccatccagtggtcatacttcatcatcaatgccgtactgatgacttttgccatcaagatactcggaccgaagttcagtatcaagactacgtttgccatcttcggactcactttcttcttatggttttttcagttgctggtgaacggttcggacggcgtccctccccaactgctgggcgaaggacaagacttcatggcttgcctgataggtgcggcaatgtgcggtgccggactgggtatcgtgttcaactgcaacggcagcacgggaggtacggacatcattgcagccatcatccataaatacaaggatgtcacgctgggacgcatgattatggcttgcgacttcattatcatcagttcctgctatgtggtattccatgactggcgacgcgtgatattcggttttgtaactttgtttgtcatcggatttgtactggattacatagtcaacagtgcccggcaatccgttcaattctttattttctccaaagaatatgaaaagattgccgaccgcatcaccaaagaaacccatcgcggtgtaacggtactcgacggtatcggctggtacagtaaacacaacgtgaaggtactggtcgtccttgcctacaaacgccaatcggtagaaatattccggatggtgaaagatatagacccgaacgctttcatttcccaaagttccgtcatcggtgtatacggagaaggtttcgaccggttgaaagtgaaatagggacttgtataagccacaagtataaggagaacataatatgagaaagaaatttgtatttgccaccaacaattcacacaaactggaagaagtgactgccattttgggagagaaggtcgaacttctcagcatgaaggatatcaaatgcgatactgacattccggaaactgcagacacacttgaaggaaatgctttgctgaaagcaagatatatcttcgataactatcatctggactgttttgccgacgataccggtttggaagtggaggcccttggtggggcaccgggtgtatattccgcccgttatgccggcgatgcacacaattcggaagcaaacatgaagaagttgctgaaagatatggagggcatcgagaaccggaaagcgcaattccgtaccgtatttgtacttatcatcgacggaaaggaacatctgtttgaaggcatcgtgaaaggagaaatcacgaaaaacagaaaaggcgcttcaggcttcggttatgaccccatattcattcccgaaggatatacgcagacttttgcagaaatggggaatgaactgaagaataaaatcagtcaccgggcattggccactaacaagttgtgtaagttcttaatgagataatgtttttaatgtgctgatatgctaatgtgccaatgtgctaattggctgcgctgtcacgccgaaaggtcattggcacattggcatatcagcacattataaccccagttgagccgatatttccaacatcctcttaatcggtttcactgctttttctgcaatctcagcatccacctttatttccggtgattcgtttttcaaacaatcataaagcttttccagtgtattcagccgcatgtaactgcattcattgcaggcacaagtgctgtcgttgggaggagccggaataaatgttgtctgcgggcattgtttctgcatctcgtgcaggataccgctttcggtagctacaatgtagctcttttcgggatgtgccactgcgtacttcagcaaagctgccgtagagcctaccacatcggccagtttcaagactgtactcttgcattcgggatgtgccagtaccaccgcatcgggatgctgctgttttatttcaacaatcttttcaaccgagaattcctcgtgtacatggcatgcgccatcccataataacatgtttcttccggtaatggagttgatataattacctaagttccggtccggaccaaagattattttctcatctttggggaagctttccacaatctgctttgcattggtagaagttaccaccacatcggtcaccgcctttacggcagccgttgtgttcacataggatatcaccgtatatccgggatgctctttgacaaactgactgaatttgtctgccggacaactgtctgccaacgaacagcctgccgccatatcgggcaccagtaccttcttgtcgggacaaagcaccttcgccgtttctcccatgaagtgcacaccgcacatcacgatgatgtccgcctccgttcgggccgcccattgcgccaaagccagactgtcgcccacgtaatcggctatatcttgtatttcacctttctggtagtagtgccccagaatgattgcgttcttctccttcttcagctgcttgatagcttctataagattatccataattatattttttaatttctctttcttctttaaaaatcctttgatagtaatgataggctgttaacagtgtggacaaataaatacgatttttcttgcctatgaagttattagtatcaagctgaattttactcttatgcttataaaccggggtttttaagtttatccgttgataataagacttctgctaaacagcattaacatgttgttaataatatgcaaagttaataactttagagttataaaccgatgaaaccaggctgaaaaatatgttgaatgaagcctggaaaattctccttaacttttttggtttgttcgtttcactgctgtaatatgcagacctttgaataatgcaaggattatttttaaaattgtttccctattgtattgacaccttttcaacggttattaaccgggatataaacggaaaaaagtatctttgcagggagatttaaaagtatattgtcatgcgtaaactgaagataactgaactgaatcgtattagtgtagaggaatttaaggaagccgaaaaactgcctttggtagtggtattggataatatccgcagtctccataatataggttccgttttccgtacttcggatgctttccgcatcgagtgcatttatctttgtggcattacagctatcccaccccatccggagatgcacaaaacagctttgggagcggaatttaccgtagattggaaatatgttgataactctgttgaagctgttgataacctaaaagccgagggatacatcgtttattctgtagagcaggcagaaggtagtgtgatgctggacgaactggtgctggacaagactaaaaagtatgctgtggtaatgggaaatgaagtgaagggtgttcaacaagaagtgattgaccattcgcacggttgcattgaaattcctcaatacggcacaaagcattcgttgaatgtatcggttacggcgggtattgttatttgggatttattcaagaaactgagataataacagggctgttaataagctgtcaatatatcgggtttgttggagctatagatcgaacacggtgcatctatagatccagcgtgttgcatctatagatccaataaactagttctatataggtatgatgagagattttatgaacagtggttgatttttataatcaaccactttattcattgtaaattaatgctttatctcctaatttatcctttttgttaaccatgtattcaacacatatcggttgtatgtggaaaacttgctgtacagttggtgtcttttcttattttttgtatatttgctgaatatatataaatcatatcgatatgaaaaagataatatcttcatggataggcatttttgtaggttgtactattctggcagcaggttttgtttactttatcaatccttataatcttgttcctggcggggtgtatggagccagtattgtgcttcataatctgttcccttctattcaggtaggtactttcggttatatgtttgatattcctttgcttatcatttccgtgctggtactgggagcaaaattgggagcacgtactatcgtggcggcactattcactccgcttgccatgaatgtgctgtctctcctctcctatccttctgaagaagcgctccatcagttggaccctacacagttgctgggtggcagtctgaatatgtccgaccatttgatgctgacttctgtgattggtgcggtggttatcggtataggctgtggtattgtagtgcgtagccgggctactacaggaggtacggatattgtggcgatgatattgcagaaatattgccatatacgtttttcaaaggcgatactgctggtagatggtattgtggtgggattcggcctattggttatcggtttcggtatcggaaatccggatgatgctacacaaccttcgtggcatttgtctttctattcactgatagctatttttgtcacttcgagggtattggcctatgtgataaatggggagaagaatgacaagatactgtttgtcatcagtgatatgcgccttaccgctttgcacgactatattcttaaagatttggaccgtacagccacttgcatcaagagtagtggtctttataccaatgtagacaaggaaatgctgtttcttgtggtgagttacaaggaagtggtaggtatcaagcagaagataagggaagtagacccaaaggcttttgtagtggttaccgatgcttatgatgcatttggtgaaggttggaaagagcttccgatggcaggagaggtacaacccgaataggtagtaataaacaattgttcattctattattaactgaatatatagcttaatatcaattgtttaataactaattatttgtgttgctaacatagttttcaacatggtgttaacgataagttttttgtttgaatgaacggtattgttgcgaagtcgatgatgtggaacttatggcatggttgccataaattgagtgcaggttgtaagcattgttatgtttatcgtggtgatgcccggcgagaggtggacagttcggtggtggtgcggacaaaaaactttgacctgcctttgcgtaaaaagcgtaacggagaattcaagataccacctggaacatttgtctacacctgctttacttccgatttctttgtggaagatgctgacaaatggcgggccgaagcatgggagatgattcgttgtcgcagtgacctgcattttatgatgattaccaagcgtatagaccgtttttctgactgtctgcccgatgattggggagacggatatgataatgtaaccatttgttgtacggttgaaaaccagacttgcgccgattatcgcttgcccatctataggagagctcccataaagcataagataataatctgtgaaccgctgctggaaaggatagatttaagtacttatgctgttggcgaatggattgaacagatagttgcagggggagaatccggttacgaagcccgcccttgtgattttgaatgggtgatggaccttcgcagaatttgtgtggaaaataaagtggacttctggttcaagcagaccggttctaagttcgtcaaagacggaaagacatataatgtgaaacgccaatttcaacattcgcaggcacgcaaggcgggaataaacatcagtttataattgtccgctttctaccatcaatatcacccgttcggtcaatgcatcgtctcccatagggtcgtattgcttctttagactggcgccgaagagtgcggcaaaagtctggtagaaaccggctttgaaagggcccataaaagcttttaccagttcatatccggtggagttggtctgtcggtctaccagttttattaacagtttgccttgggcaaaggtaagtttcttcatgcggggagtgtattgctccttcaagcttttctctactgctttcatgtgtttctggcgggctttctcggtgggcagggtcatcatgtattcgtaggtttcaatgatggcacggttaatctccttggagatgggaagtaccttctttacgtcacgaatgagtttgtagtacttgttcatgtcgcgcttgttcttgaatttaagcggcttgaagatgtagacagtggggagcttgacataagggatggtatctccttcgtaaacgcacatgggagtaagatagacactcttttgcgcagcagactgtggttgctgctgtgcaaagcatttcaggcttccgagagaaagaaacatgatgagtattactatgttaagccttgcgttcatgttgcaaaagtacaccattctgtgtaatgttgttgcatcatgttgatttttccttgctcaattaacttatttaaggtaacttcgcttcccaaaacatgaaagtgacctactattaatggaattactcaagataggagtttttgtaagtatgctgtcaatgactcctatgcttgaagctcaaaatatatccggccttcagaaagaacagcctttacttcttttggaagaaaatttggaacaactttccatcgggaatgaggaagaatacggttgggaagatgaattagaggagttgtcccgacgtctgcaagagcctgtcaacctcaatgccgccactaaacggcaattggagcagtttccttttcttacggatatacagatagagaatcttctggcttatgtctatatacacggacagatgcagaccatttatgaattgcaactggtggaggagatggataaacgtaccatcgacctactgctgccctttgtctgtgtgcgggcagtgaaagcgggtagggggtatcctgctttaaaatctatactgaaatacgggaaacacgaaacattggcacgtttggatgtaccgttctatatccgtaaaggatatgagaagaattacctgggaccttccctttaccattctttgcgctataattttcattatggagattatctccaaataggcgtgacgggagagaaggatgccggagaacccttctttgccctgcacaacagaaaaggctatgattactattctttctattttctgataaagaatctggggcggctgaaggctttggcattgggcaattaccgtctgagcttcgggcagggactggtacttagtacggattttcgtttaggaaaaacattctctatgtctacaacagaatatcgtaccggaggcatccgtaagcatagttctaccgatgagtacaattatttccggggagtggcggcaacggtgggagtattgccttacttggatatttcggctttctattcgcatcgctccatggacggtgtggtggaggatggcgagataacttccatttacaagacgggattgcatcgcacgcagaaggaggcagataaaatgaatgcctttgccttgcaggtgataggtggaaacatgacctatgaaaagaactctctgaaggtgggagtgacggggatttactattttttcaaccatccttacaagcctcggttgaacaagtatgcaaagtacaatcttcatggaagtgatttctataatgtgggcatggattataggtatcgtctgggccgttttgtctgggtgggggaagcggcaaccggcagtaaaggctatgcgttgctgaaccggctgaagtataatctttcttccgattatcatctgctacttgttcaccggtattattcatatgattattggactttgtttgggcgttcctttggcgaaagcagtataccgcagaatgagaacggatggtatctggcagcagaggccacacctttcgcccggtggaagtttttcacttcactggatgtgttttcttttccttggtggaaataccgtataagtaagccctcaaagggagtggatgccatgtttcaggttacttatactcctcgaaagagcctttcgatgtattttaattatcggtacaaacagaaagaaagagacgtgacgggtacaagcggtgcagttatcgaacctatttatcaccataaactccgttatcggctgacctatatgccgggaagatatatctttcgtactacaatagattataaccacttccgtcagcaggatgggaaagggtatcgctttgatagacggcaaggttatcagtgtactcaactttgctcgtacactttccccttccctctgtcagtttccgtgcagggaacctggtttcatacggacgattacgattcgcgtgtttacgcctccgagcgtggattgttatatactttctataccccttccttctatggcaaagggttccgttactccgctcatctgcgatatgatttgagtaagaacttcatgtttcttgccaaattcggacagacggtttatcaggatagggagacgattggttcgggcaatgatgagataccgggaaataggaaagcggacttgcagatgcaactgcgtatcaagttttagaggaatgattgatagcttttttatttctttctttatctttgtccgtatgataatccaaggatgaactctggagtgctaagattagtagatactcggagtattaaatagtaaatagtaaatcgtcaaatagtaaatagtatgactgtcatttatccatcccccatattcggtcccgttcattcccgccgtctgggagtatctttgggaataaatttattgccggcagacggcaaagtatgcaccttcgactgtatttactgtgaatgtggtttcaatgccgaccatcgtcccaaacagccgttgcctacgcgcgaagaagtccgttcggcccttgaagcccgtctgcgggacatgcagcaaaacggacctacaccggatgtactgacttttgccggtaatggagaaccgacggcacatccccgtttccccgaaatcatagaagatacacttgccttgcgcgacaagtattttccgaatgcaaaggtgagcgtactgagcaattctacctttattcatcgtcctgccgtattcgaggctttgaacaagattgacaacaacatccttaaactggatacggtggatgaagagtatatccgtgtacttgaccgtcctaccggacattactccatccgggagattatagaagggatgaaagcgttcaaagggaactgcattatccagaccatgtttctcaaaggaagttataaaggacaagatatggataatacatccgataaatttgttcttccctggctggaagctgtcaaggagattgctccccgccaagtgatgatttataccatcgaccgcgaaacgcccgaccatgatttgcagaaggccacccgcgaggaactggatcgcattgcggaacggatacgggaaacgggtatatcggtaagtgtttcttattaataatatacttatgaaatcaatagcaattaaagatttaagcgagaacttcttcgaagtgataggcaaagagtggatgctggttacggcaggcagtaaagaacatttcaacaccatgactgccagttggggaggtattggctggctttggaacaagccggtggtgtttgtctttattcgttccgagcgctatacgtatgagtttatggaggagaacgaatatttcaccctttcttttttaggaaaggaaaaccggagcatttacaacctttgtggcagtaaatcgggtagggaagtggataaggtaaaggaaactggtctgaatcctatcgttaccgagcggggaaacattctctttgagcaggaccgcctgggattggagtgccgcaagcttttcattaccgatatgaaagaagaactctttctcgaccattccgtctacgagcgttggtatggcggtgaccacggtggattgcaccgggtttatgtagccgagattgtagatgcctgggtaaaggaatagctcctttaccacagtttcaagtcatattcggcttccaccttctcttctatttcatccggaagggcggggaagaagtcgatacctgtaatacgttccacttcgtccactgtattgacgtagctgtccaacggatgattgcctgatgcattcttataaatgaagccgatggctttggggggattgctgtctgcacacagaacgaccttgaagaatgcttcgggcactgtaattttgtgcttcttaccaatggtgcggtgacgttggtcatagagaataggaccgcatacaatgtatatcttgccttcttcttgtgcccaacggcggcatgactcttccagttctttccagtcgccacggtttagattgtggttctgcgggcaaatgtttgtcgtgtagaagctctcttgcatggctttccagtgccagcggttgtcaccggccggacacatatgtccgcggtccatgccggctcctttgtagtcatcggtggttactgcctcgtgctcaggcaggtcggggtcgggcaggaacttgtctgtacggctttcacgctccaccagtttttcgggagtgagttcccaggctacccagttgggtatctttaaatctttgttgtaggatactgtgtagcctttccgctggagaatctgttcggagacgttcttcagctttgccggtatttcaaggcgtgtgcctgccgtgagttctatcttggcaggcgtagaactcttttgcctggcatccgaaagtatctttgcaacgggttcataggcaaggcagaccgcacatataaacaatataagataatagacgccttgcgattgtttctttttttttcgtgccatgccgggattagtgttggataatcattttggccctttccagtgccacatttatgttcggacagatattttcttcgcccaacagctcatagaagcccgatttttccagtaccttatgtaccttttcattgacaccggagagcacaatggttattttttccttttgggacatctcacaaaggcttgtcaagttgtggataccggtagaatcgatgaacggaactttacgcatgcggatgatgcgcactttggggcggtcgcccagccgcgccatgatttcttcgaatttggtggcgatgccgaagaagtaaggaccgtttatttcatatacttccacatcctcggggattatcaggtgctcgtcattgcttgcaatgtccgattccgcgttcgggtctatttcatctttgatgacggatatttcggtagtctccatgacgcggcgcataaacagcacgcaggcaatcaccagacctacttcaatggcaatagtcaggtcgaagatgacggtcaggaagaaagtaatcagcagtaccgtgacatccgatttaggattcttcaataatgccttgaacgtacgccaaccactcatgttataggatactatgaccagtacacccgccaggcaagccattgggatatactgtgccagcggcatgaggaacagtaggataagcagcaataccactgcatgcaccatgcctgctacgggagtttttcctccgttgttgatgtttgccatggtacgcgcgatggctccggtggcagggataccgccaaacagcggggtagccatgttggcaacaccttgtgctatcagttccgtgttggaatcgtgtttgtcgcctatcacaccatcggccacggtggcagacagcaaagattcgatggcacccagtacagcgattgtaatggctacggggaacaagttctttatcgcttcccaatccagggcaggcatcacggcatccggcagttcggcacggatgctgaaacggtcgccgatggtatcgatacaatcaatgcctccatatactttcatcagccagactgccactgtcaccacgatgatggcaataagtgaccccggaatcttcttcgagaaccgcggtgtaatggcaatgatgaagatgctgacaatacttacaatcgtgttccaccagtttacggtatcgaaatgtcggaaataaatcatccattttcctacaaagtctcccggaactttctctcctccgaacgtcagcccgaaaatgtcggcaatctgcgtagtgaagatggtgacggcaataccgcttgtaaaacctacgatgatgggataggggataaacttaatgacagctcccagcttgaacactcccagcaggatgagcagtacgcctgccatcagtgtggcgacaataagccccgattcaccgtattgctggatgatgccatagataatgacgatgaacgcaccggtcggtcctccaatctgtaccttgctcccacccatcagggagatgatgaaaccggctatgatagccgtaatgatacctttctccggtgatacgccggaggcgataccgaatgcaatggcaagcgggagggcaacgatacctacaatgatacctgccatcaggtctgccatgaacagttctttagagtaattttttaaagccgtgtatagctttggtctgaatccgaacgctttcattataatctacttttttatacgtttttttatacagaatgtaatgtatatattgcaaattgcctgcaaaagtagataaaataatggatattagtgaacacaactgtgatgtattttgttttccttatcagatatgtgctattaattatgtctgaaatacctcttcgggttatcggtgaagatagattctttctataagacgataaataaatccgatggggtagaggtgtgattattccaaactaaattcgtaattttgtgttgtttataaacagtacgaacgacatttatacgtaattatattaactaataaaaaaagagactatggctaaaagtgttaaaggaactcagactgagaagaatctgctgacttcattcgctggtgaatcacaagcaagaatgcgttacacttattttgcaagtgtagccaagaaagaaggttacgaacaaatcgccgctattttcacagaaacggctgaccaggaaaaggaacacgctaaacgtatgttcaagtggctggaaggcggtatggtggaaatcaccgcttcttatcctgcaggtgttatcggcactaccctggaaaatcttcaggaagctgctgccggcgaacacgaagaatggtcattggattatcctaagtttgctgatattgcagacgaagaaggtttccccgaaatcgctcttatgtaccgtaacatcgccattgccgaaaagggacacgaagaacgttatcgcgcttttatccagaatatagagactgccagcgtatttgccaaggaaggcgaagtagtatggcagtgccgcaactgtggtttcatctacaccggtaaggaagctcctcaggtatgcccggcttgcttgcatccgcaggcttacttcgaagtaaagaagtcaaactattgatgataatttcctcatagagagaacaaagtcccgcagagcgaaagcaagctctgcggggctttttgtttgctgtgacagtcatatagcttgtaattgctgcacatttgctgcagcgtcactgcaaacaaattgcagtgcgactgcaaaactgttgcagtgctgctgcaaatcaattgcagtactgctgcaaaccggtatgcagtgacgctgcaaaaagtatgcagtcgttttgcagtggctgtacagtacgacagcaagctgtgtatggcgatgctgcagcgggcagagaaggattaatagccggttgttggagatgtagggggattaatggttgcttggaacactattgaaagtgcttcataactgttggcagcatcggttatttcaagcagtttctcccagttggctaccggttccgtcttgtggttgatgcgtttttcggcttttattcttaatgttccgtcttcagtggtggcttggacaatgaaagcgccgcagtcgttttctacttttacgttcagtctttccaggccttcgggagaaattcgataaccttccggcagattgactgtgatgtcccattggtaacaacggggcatctcccaataaatgtcctccttgcgcaggcgttgttcgcctttcagctctggctgtgaccctatcaaccgacctacggagagaacaaagtttgtacccgctttctttacgtatccgtccagtacatagtccacttgataggcaagtgccgcactgtctgcccggtttccgatgctgaaaagctggtagccgaggagtgtttccagtccttcttccgagccatgataaccgatgatttcattacggtaacgctctttctcctgctcccgttcacggcggtaactttcgcgcaggtcggcatggaatttttctttggtttcgtcgtagatggtggctgtaatacccagttggcgacgaacggagttgtaaaggtcctcgtccataatgaggtagggttggaagtgttctttcagtgcaccgctcatctcttcccggcggctgatgtggagagtggtgccgcttatagaagcgtttatggtagccatatcccggttgtcttggggggtggtggagggaagggtaaggcatgtgttgtcttccagtatggcttcttcgccttgcaggctggcaggcacttcaccgggaacagcatagcaggccggtggagtatagcattttccgttggattccagatagataaaccaagtggtattgctgtagttgatgagctggtccagaggctcccgggtatctttggtcgtgattcctgtccggtggggaatacctgctttttccagaagttcgtgcatcagcaggatgaaactggcgggagtatagtctgcaccgttttccatataccggtaatagcagtattggtagaggtagtccatcagtttcttatcgctccatccttcggcttgacgggctttgagggctttggatatttcgcctttccgtccgctgcgcagaccggaccagttggtgccgggagccttcatggaggcacgtgtgtcatctgtcatcagttttggattggggttggcatatagtcccggcttgcgggcgctgggtggcatccaggcatagggtgtcttgctgttgtagatgtacatcagaatcatgggcgtttgccgggcactgttgtaccagaagtcgggaatgacacgtccggagtctccggtatgcaagtcgaggatatggtttccttcggtatcggtgctatggtcgaagtcccttgctccgttcaggcaacggtagaaagtgctcagcttggggtctatctcgcaatggacggaataggcaagcagaggatagctgtccataaagtaaaaaccgaaaggttcggggttctggttgttcagtatggtgtatcgtacgaagaacaagtcgatgatgtctccgatttccagtccgggtacggccagcttgttccatttctcttggatgttgtggctacgtgggtggctgccttcatcggtttccatgtactcctgcggggctgtttcctgaattgttccgtccggtttgatgatgcgcacacccagtatacgctgttgttcattgcgggtgtagcgttctttttcctgggaaaggaagctgaactgtgacatctcttccagtgccctttggctgttgatgtataccatttggcggtagatgctgcggcaggttatctgttgtttggtcaatcccattccccaccagtccaacttggttttccgggttacctccagacggctgtgtgcggcaaggataacggcgggttcgtttctgtatttctcgggtacagtcatatttttaaagtcgggcaggttcagcgaccatacttcattgcgcacttcgcttacgagcgcagcatatttgtcttcttccttttgggcatttagtcccgaagtggcaagtaacatcagcagcagtaggaaagaacgtgttgttttcatggtgatggcgttttatgttcaattatttgtttaaagggtgctttgccggattactatctgttcgttgcaggcttttttccattgtcgcagggcatcattccaagcagggataagagcaagtggaatacgttttctgcgtatctccatcacttttcggaagtggatatatcctgctccggcgcggtaggagcaactgaggatgccctgattcgtttcaatgtgaaagtctgcaggcaaataagacacggcatatccttgtggaatatcaatcgttacctcgcgtacaatacggcatctccacggcagtaggtaatcctgcttgcggcgggtggtgtcaatgggctggtggaagaaatcttcgtgcgggtctgcttcgaggcagtactctccatcggccgattgtacggcagcggtattgtttatctgattgtttagcaggtctgtctgcttctccttgggggtgtcatggtagagactgagcaggtattccttgtattcgcccgtacttacgcgggtggcggtgcctttcaaggtagggggattgctgtccgtcatcaagcgatagtgataattgagactgtccgtagaggcggaggcatcctgctggggaagagtcagtatcaggcagctgtctccgttttctaccagtgcttttcggccttgtataccttgggggatgtcttcgggcggtaggtatcggtaggtggcatccaggcaatatcttttcccttgatggaaaagaaggcagaaggcatggttgatggcagccagtgtcggcacttcgtcgggagaactggcgatgtcgtccgtaccgatataggccattcgggcatcgaatccttgggctttcagcaatgtgcgcagcaggagtgccattcccttgcagtcgccgtaacgcttgcgcagcacttcggcaggccggtcgggccgatgtcctgccaatccgttttcaaaggcgatgtagcgtatgttctgctgtacgtaggcataggtgcggcgtatcttctccagttcatcggtgcatccggcagtaatttcatccgtcagcatttcggcttgggggagagtgcagtccacctcggccagtccgttcagccagcggtacatggcctgtacatcggcaaagggaccggtcaccagcagatggggatagaggcagttgtctgcgggagcagcttcttcctttcgggtggcaggcactccttttaaggtgtagacaaaaagggaatccccttccttattcacgctcttttcacaccggatgccgggaccgaagttcttctccaccagccggaaacgggacagtgcggcaggaatggtgacggtgatacgtttcttgcggatgaagtattcctccggaaagtagatgtgtgtaaagtagcgcaggtcatggaaggtacggttgaactatacggccgcctttttcccctgccggcttagggagaggttgaagtagcagatacgggtatcgtcgaagaatacattttccggtgtggcatggcggtggatggctttgggggcaagtactcccttagctttggcttcgtccagagagatgaattcgccatagaacatatgaggttgtacggtagctcccattcgtgaagcttcatattcggtctttcgggtgttttgtacgatggggttgtctcctggtccttctttgaaaacatagctgtcttcacagcagttgatgatgatattgtcgtccatcgtctgactgtagagacagcttgagaaaatatacaaaaaaatgaaagagaaatattgtttcctcatgatggagaggatttatgtttatttcttggcgtgcggatagtctatcgtgtagtgcagtccgcggctttccttgcgttccatggcttgctttgttatcaggtatcctacgtttatcatgttgcgcagttcgcacagctctcgggtagccttgctccgcttgaagagtgcttctgtctcctcgtaaagtatgtccagtcggttccaggcacgtgtcaaccgggtattgctgcggacaatgcctacgtatgcctccataatttggttcacttccttcatgctttgtgtgatgaggacacgttcttcggtggaaatggtaccttcgtcgttccattcgggaatgtcttcgttgaagtcataacgttccagtacgctcagcgcgtgtttggctgccgcgtcggcataaaccacggcttcaatcagtgagttgcttgccagacggttgccgccatgcagtccggtgcacgaacattcgccgatggcgtacaggcggcggatgctgctctgtccgtccaaatccaccttgatgccaccgcagagataatgggcggcgggggctaccggtatgtattcctttgtaatgtctataccgatgctgaggcatttcttgtatatgttagggaagtgcttcttggtttcttcggggtctttgtgggtgacgtccagatacacatggtcctcaccgcgctgtttcatttcgttgtcgatggcacgcgccacgatgtcacgcggggccagtgagagtcgcgggtcgtacttctgcatgaattcttttccgtctttggtacgcagcacgccgccataaccgcgcatggcttcggtgatgaggaacgaggggcggtctcccggatggaaaagggctgtgggatggaactggatgaattccatgtctttcactgctcccttggcacggtagaccatggcaatgccgtctcccgtggccaccagcgggttggtggtatggcggtaaacggcttcgcaaccgcccgttgccatgatggtgactttggaaaggaaggtatccacctcgcccgtcgcttcgttcagcacataggcaccgtagcacttgatgccgggggtgtggcgggtaacgatgattccctggtgatgctgggtaatgatttccacagcgtaatggtcggtcagtacggtgatgttggggtgttgcttcacagcttcaatgaggctggtctgtatctctgcacccgtattgtccttatggtggaggatgcggaattcggagtggccgccttctttgtgcaggtcaaactctccgtcctcctttttgtcgaagttcactccccatttgataagctccttgatttgttcgggggcattgcgcaccaccttctctacggcttcacggtcgcttatccagtcacccgcaatcatggtatcttcgatatgcttttcaaaattgtctacggccagattggtgacagaggcgatacctccttgtgcaaaataagtgtttgcctcttccaaacctgccttacaaatgagggctactgttcctttatgcgctactttcagcgcaaaactcataccggcaagtccggagccgataacgagaaaatcgaactttcttaccataggttttgtgtattaaacgccgcaaagatagtgtaaaccaaacgtagagcaaaataagcgggcttatttttatttgttatgtaaggtattgtttcaatacttcatccagggatttttctttgggcaattccatgttcttgcgcatgcgcgaacggactacgtttacactattccggttgattcccatgataagggctatttcgtcggtactttggttcatgcagatgagcatggccagcaattcttcgttgcgggtcagttgaggataactttcgcggagcttgggcagataagaaggatgtatggtggcaaacgaccggcggaatgtgttctcatcttccctgctgagcaggctttgcacggtgagctggcgaatggagttgaggttattggtagccatggcccgttctatttcttccgtcagttgttcgttgcggcggttcaggtcttgctgccgggtaatgagggtctgtatttcccgtttgttgttttctataagctggtggttggccttccttcggatgatgaaataggctgtagtggtgataagtagcaacagtaatgtaatggagatgcagatgttgtagaacaactgctgttgctgccattgcacttgtgccgagagcagtttgttttctttctctttttggttggcatcaaaccggatgttggctgctgccacagcacgtttcttttcgttattgtccagagaatcggcaaactgtcggttacggatgtagcaacgagcaaaatcgtcgttcatgcctttggccagatagtaatccattaatatctcgttggcatcgcggccttccatgaacttcatgttgatgaggtcttgtgcagcccggtctatcaggcgtatgccgttttgttccttcccggtttgcagtaaggcccgtcccaggtggaggttgagttggtatttggcccattggggcatccgcacggtatcgggacagatgctaagggcaagttgcagtgctttttccaaagagtcgggatagtccagataactgtttaccgtttctactttgtttacgaatacgcccttaaagctgttttgtatcattgacaacttttctcccagcctgaggtagtggaatacagagtccttttgattcatgttacgaaagatctgggcacggtagcggtacaagtctcccagtccgaagctgtctttcagcatggagtagtattgggcttttttgttcatttccagggcctggtcgtacatacccagttcggcgtagagattagcttgttctccgtaggcaatcactacatttccaggtgctatgctgtcgttgtaagtggctatggcttcttggttagtggctatagctttctcgtattcgccactgaggtggtaatagatgcccaaccgtgacattatccgcagcatgttcgggaagtttccacctttccggtagacatctattgctttttccaaaatttggatagctttgggtagattgtttccggagtacatgtagacaccgcttatgatttctgcctgccggataaagtcattggcactggtacagaccggtaactggaggtagtcttctgccagtcggacagcttccgggttattgccatacagttggttcagtccggccttgaagctcagcagttcgtgtgggcaatgttcgcggatgaggggatggtttccaatgctgtccatatagtcgatgccgtctttgtattgtttggtgtttatgtaattgttcccgcaggcattaaatatcttgcgggcatagtaaatcagggtatctgtagttccgtttttttctgccgattccaggatttcgggcaaggtctgtttggcaagatccaacgtttgttgcgctttgttttcgagtagtaaggcattgatttgttgaaggacattgttccaatgcctcacttcgtcttgttccgaagaggtggagcggttggtgcaggctacagctacgagaatcagaagtaaaaatgaaagttttttggcattcatattttgtggactgtttgttttgtaaggcaaagatataatttcttaatttaaaatttacaacaatagacttgttttttgtttcttgttaattatttgataataaatataatatgaaattgtatatcagattgtatatcgtattcttatggttaggttgtgcatattttgcaaatttgtataaaacgattgtaaatatgtataatggtgaaataagatacaatgaaaacaaagaaaacagtgacaccttttaatatgcaggagattgccagagctttgcgcgaaatgatttcggaagattctcccaatgcttcggaggctttgttgtccggaactcgtgaggctgtattccgtgaaatctttatttttcattatccttcttttttagagaaactttatcagtctattccggaggtggataaggatgaagaactgatatgtatgctggtagctcttggacagtctgtaaaggagattgcagaactgatttatttttcgccggaacgggtagaattgttatgtgcttcggtctgccgcaagatgaatgtgacggaagttcgagaaatggagatgctaatgaagaagttgttatcataaaaatacgtaccttagcggcaaaaatcagataaaatgaatcgaatctttcatgcgcgcattgctatggggcagtatctgtttctcatcctgataggtattctcgccgtctatatgctttggtacaagtctccgttcctggctgctattttcatgctttggctggtggttattatcgagaagctgattcataccacctataccgtaacgcccgacgggaagttggtgctgtccttcggccgtttctcccggagtaaggaaattctgatgaaagacatcacttctgtggagcgtgcttcttccatgcaggtagggcggtttgcggtgatgcgctatgtgctcgtgaaatatggcgagggtaagtgtgtagtgcttcttcccgtcaaggaggaggagtttatccggttactggaggaacggagaggatgagcaatatggtgtgcccacgtatgcaattccgttttaatctgtcgttatcgcttccatggtaatgtctcctgtgtagctttccggagttgtttgtatgaactttccctttatctgtctttccgtagatgcaggtaatctttgaatcataaataaagcttaattttagctcttctgtttgcagtttttcggatatggcagcgtccattatgtaaaaaagaaacgaacatgaatttgaattgtgccattttacatgcagacccggagattgccggaaggttggaagagtatatcgacaaggttccttttctctctttgcacggaaagtacggcaatcctcttgaagcgctgaaggattattatgagacaaaagtggaagtttattttgtcggcatctatccggtggaagaaggtgaaatcgacggaatggatttttgcaggctcttgtcctcgtccactcgtgtcattttcattacagacaccgaccgctatgctgccgaatgtttccgtctggatgcgttggactatctgatggacgggctcaatttctccacgtttttccagtctgtcagcaaagcggcacgctggttctctttgcaggatgcaggtacgtccgactccaaacacaggcaaggtccggaagaggttccgaaggtgatttacatgcggtgtgacaaccgcatcatgcggctcgacctggaacggataaactatatagaaggtatgggcgattatgtgaagattttctgtaaagattcccctaagcctatcttgagcctatgcagtatgaagtacatggaggaaaaacttccggcgaacgaatttatccgcgtgcaccgttcttttattgtccgcatggactgcatcagcgccatcgggcgcagcacattgctcatcgagcagaaggatgtccccattggcgatgcttaccgcgaaagggtgaaagggtatgtgtccaggctggcagtgttgtaataccctgttttcagatactatatactttgtttgttggatctatagttccagcgtgctgcatctatatatgcaacgcgttgcatatatagatccaacaaatgataatcattcggtgtaaaatccgtgtaatctgtggtgaaccggaaccttgtattactttagttttgctctcgaaatcctttccccgaacgtcaagttcagattcaggctgaatcggctttcctgcatcagattgctgcgtgtgttcagttgtttccgccaggtggcgcccagcgaaagataggagtaccggatggggaagctcgcccctacactggcttccagatactgcatcttcccgcctttcaggttgatataggagttgccgaaacctattccacccatcagctcggtggaacgtgccagacgtggcttggtaatgtagctgcctcccaggttcactttgtgctggttctcgtatttcatggaagtgtaggaggaggagttgcggctccagtccaggtagttgtagtcggcggtcagcacccagcgttcggtggttatgctgaggccggtgccgaggtgcatgggcagatattgtgtacggctgtggtatcctttatcgaggttctcgctggtagatgagttgctgtaagtcagtgtattgtcgtggctgatgggaagggagggagcaaataccagccctgccgcccacttccgttgtccggtcgcaccccattcgtaatgtatgccgaagtccgcataaaaggcctgtttagaagattcgtactttacgacggcgctttcctgcgtttcgctttgcgtcactgtgcccgctatcatccccaggttgatgccgaccgacagttgcctgctcagtgcaaaggcattggtgacgtagcaccggtatagtccgcccgtaccctcaaagagcgagtaggtgtagttgccgggcattccctctatctcttcttcggtctggatgacatagcccacactgctgtatggtgctgcacctacaagggcataccagcgcggcaggacacggaagcccatgctgatgcggttggggttgccggtgaagttggagctgtgttcgctcagaaaggagtagcgggcatatgaggcagatacacccacatcgaacgtgaagcaggcggtgtccatgcgggtgatggctgcggggttcagcgtgttcagaaatccggtacggttcagggcgatgcccgtgttgcccatgccggcataacgtccgccgtcaccggcactcagttcgcccactccgtacatggaggtgggcaggttggtggtgttctgggccacggcggtgaggcttgccgtacacagactgcacagcagaaggggaatccggtaatggcgtttcattgctcgttgtatattttgaatcttacgtctaatctgcattgtctctcttgttcggggtcgttggtgaagatgacctggttgaaggtggtggtgctttcttcgtctgtcagactcatcagcagtttctgccgcttgatgcccgaagtgccgtagttgttgcggatgaattcggtgaggtcgaaggagtagtaggtctctttcccgtacatctcgtcgatggtcaggtcgccggtctgtacggttacgccgtcactgccgtatacgtagtcctccagcacattgttctcgtccgtgatataaaggcggatgtcattgggaagctggttcacttcgttgtagctccgggccagaggatagaggtagagtgtggcgctctctatggagactatctgtccggcacttccgaggctgttgaggtaggggaattccagttggttgtagtaacccgtcaatccctgcatataggccaggcaacccatgtcgctggagtggacgaggttctctattccgcttttcagggaagcaaggtgggtgccggtggggtcgtgccggataccggtataggcatagtcggtgtttacgttgaaagtcagcacttgtccggtacgttggttggagacttcctgatagtggaggttgatgctcatggcagagtcgttcaccatgaatccggtgatacactgcccgtcgttttcgggaacaaagaccagtccggggaatttcttcttgaacttgtcttgggtatcgaagtagtcgtcctgggccacgaggtcattcagcagttgttgtccccatgagtcgggcaggcggacgcttacttccttcttccgccccgggcagggggtgaaggtaaagctgaagagcggggcatcttccgtcgggagtacggtgctgttgtaaaggtcctcgtcgttgtccagcacgataggttttttcagccggtagatggagatgcgctgttgcgtcagggtatctccccagaaatggcccgaaggtatcattcgcagtacgagggagtcgagggtataggtatagtctgtgttgggggtgaagtcggacgtggagtattcggcatagtaggtggcggatacttctccccaggcgctgctccggtaatgtcctagctggcagatgctgtcgccccgggtctctatggagtctagcaggatggtgctgatgtctaccgagcaggtgtctgcgtatacattatagaaggagctttccacgaggctctttccaagctgcgagttctcgtcctggcaggcgcagaagatagcgaggactgcgaataagctgtacaatgacttcttcatttctgttcttttagttggcggcaaaggaaaggcaaaacttttatatcttcctacaaaaatcggcgttcggacggtttttatcggtaaaggcgtttaacgggaatttcggactgttcgtcggttatttttgtcggtgtggttgcggtggtttacttttgcggacagacaaaaaggacctcccgcagcttcttgttttggaaagtgggaagtataaagcttaatcattaaaaaaacaataaacaatgaacagactattggtaggaataatgttgctggccatcgtgtgcattgccggcagttgtacggacgaggatgaatacactcaggggcagtggatgaagaaagccagctataacggtgtgtaccgcgcttatgcctccggcttcaccatcggcaattatggatatttgtgtggcggcttctacggagcgaacaaggattacctgaacgacctttgggagtatgacatgagccggaacagctggacgcagtgtgccgacatgcccgttgccgggcgcaaggctgccgtgggctttgccgtgaatggcaagggatacattacgaccggttccgtaaaggacggctcctcgtcctactgtgtagcagatacctgggagtatgaccctgccacggatacctggacacggaaagacgacttcaaaggtggagtacgcgatggtgccctggctttcagtataggcggatatggctatgtcggtacgggctgcaacagcgacgctaccggcagcgagagtgcctacaagatggacttctaccgtttcaaccccaatggcgccgaaggttcgcaatgggaagcggtgagcgggtatggaggcgagaagcgctacttcggtacggcattcgtcatcgatgaggtggcctacatctgttgcgggcgaaacaacagtaccgatctggtggatttctggaagttcgacggaagcaactggacccagttgcgtgacattgccgatacggactccgacaatgactatgacgatgactacgccatcacacggtccgaagccgtatccttcgtcatcggtggaaggggatttgtggctacgggaatacgtaacagcacttccttgagcagcgactactggctgtacgaccctgacaaggacttatggtacggcgattccgatgacgactttacccccattacagatgtacataattatccttccggtgcttcttcgcgcagggctgccgttggtttctctaccggcgaacgtggttttgtgctgacaggaacaagtggtaccagctactttgatgatgtgtacgaacttctacccgatgaggaagaggaagtctgattcgccccataactgaacggaacttatgaagctgatgtttattatgataaagataggtgtaccggctgtgatggcggtatgcctttcttgctgttcgggtcatactgccggcggtggcaatgagttgaaatgccgggtgatggaggtggaaggcggttacggctacgtggtgctgcatggagccgataccctgatatatcaaccttttatacctgctttgagcggtcgcctgccatttgcaacaaaggtggaagcgctggcggccggtcggttggtatgccgcaagcttgccgatgggcaagctccggcattgagcagggaggaggtggagtcttgtctgacagacaccggactctaatcttctaaagaatcctttacttcgtgatgtatttccgagcagtcataagggtatctctgcatgaatttacccttgagtaccttctttgtatcgctaccgggacgtgaaagagtggcggtgaatgtcacttgaagccgtttgtagtagatggttgaagtgtatatgttccatttcatacctactatgtctacttcaaaatgtttatatctcagttcgtcttctttgtaatacttgccttggttgatgaagaataacagttgttgtcccatgattatttttccgtcttctatgtggttgggcagatagatgctacgtttctccgggtctatgcttttgaaggtttcatcagagtgcccatcgggtatgaatgcgtattctgtccatttattgatgaatggatagtagtcatgcttgtcggttgtgtttcccagattttcatttttataggtactcttatcaggtcctgttccggcttctttcactccgtcaccttcttccacgctgtattcgatggactctatctgatagaagttagtgcacggttcttggtgtatgatgatttgttccttgtagagtcccgttttcatctcaaggttgatgatgaggctacgggattcacctaagtcaaagttgtctttaaagtgcaggatgagatggctgtcggtgtcccgttccaagtcccaccatttataatgcaggcttcccgtaccttccagttgtgggagcttgttgccatccatcatgaggtctccccatggggtggtgatggaggttatgcgccagtcgccgcgtgttaggtctatctgcagggtagaggcttcgcccttcacggtagtttcctgaaagggcgagaggcggatttcatcgctatcattgcaagccgtcaggccgcaaaggaaaagagcgaacaaaaggatggattggaataagtcagtcgttttcatgttggttattatttgattatgtccattggacgtggcattctttgtaaatgctgcacgacaaagataattatttcctctttacgctgtattctccgaaagaaagatgtactcttttttgccggataatacgggttttattaacttgcgcacaaattatcgctaatcattaaccactaaccattaattccatgaaataccaagttgccattatcggtggaggtcctgcgggatatactgctgccgaagctgccggaaaagcaggattgagtgtcgtactatttgagaagcagagtctcggtggagtgtgcctgaatgaagggtgtatccctaccaagaccttgttgtattcggccaagacctatgacggagcccgccatgctgcaaagtatgcggtcagtgtgcccgaagtatcgttcgatttgcccaagattattgcccgcaagcagaaggtagtgcgcaagctggtattgggagtcaaaggaaagctgactgcccatggtgtgacgattgtcagcggagaggccacagtgacggacaagaatcatgtggagtgcggcggagaaacctacgaatgcgagaacctgctgctctgcaccggttccgaaacctttgtccctgccattcccggcatagacaaagtgtcctattggactcatcgtgatgcactggataacaaggaactgcccgcttcgcttgccatcatcggcggcggtgtcatcggtatggagttcgcttctttcttcaacagcctgggagtgcaggtaaccgtcgtcgagatgctggacgagatactgggaggcggtatggaccgagagctggcgggtatgctccgtgcagagtacgccaagcggggaatcaagttcatgctgagtgcaaaagtagtgtctgtcatgccggatactgccgaagcttcttcccttatccaggtgaattatgaaacagccgacggtcccggttccgtcgttgccgaacggcttctgatgagtgtcgggcgccgtccggtaatgaaaggcttcggattggagaatctgggcttggaaagaacggagcgcggaaatgtctttgtcaacggacagatgcagacttcagttcccggagtatatgcttgcggcgacttgacgggatattccttgctggcgcatacagccgtccgcgaggcagaagtagccatacattccatcattggcaagaaggatgccatgagctaccgtgccatccccggcgtggtatataccaatcccgaaatagccggtgtgggcgagacagaagaatccctgcagaagagaggcgttgcctatcgtgccgtgaagctgccgatggcgtacagtggtcgctttgtagcagagaatgaaggagtgaatggcgtctgcaagttactgttgggcagtgacgataccgtattgggggcacatgtcttgggtaatcccgcttcggaaatcatcacgctggcaggcatggctattgaactgaaacttactgccgatgaatggaagaagattgtctttccgcaccccacggtgggagagatattcaaggaggcattgtagaacccatgactattgtttcatataaacataaaagatgaaaaccgtaaagctaatcacctgcgacgatgcctttcaggcacatgttattcagggtgccttgaagaatgagggcattgcgtctgttttgcataatgaaaacatgtcttccgtgatgcgcggatatgtccgtgatgtcacgggagtggatatatttgtctatgaggacgaatatgacaatgccctccgtctgcttgaacggaaccagatgattccggaacagttgaggtactgcccccattgcggttcggatgagattaagtttgtgctgaagaagagccatcgggtgcgtgctgtggtggctgctgttattgcggcattgtcggccgcacctccgggcactgagcattgggagtatgtatgcaggaagtgcggcactcattttgagaagccggtggcgaaaggaacagttgaagaataatcaggtgtttattcttttaaccgcttttcaatccagtcccggtttttacgtcccaatcggctttccgcaaaatccaggaaagccgatgtgtctgttatatgggcttggatgacacctgccagaaagttgaagaaaggttcttcacccactcggacaagcaggtcggcgagtagtactgaccctttcctatagagggcaagatgcgcttcgcggtcgttgcggtcaataccccagataggacggatatggcgtgtttccttacggtaggcgtcgatgtaagcggcataggctttttcgccgcgggcgtggcgtatgtattgcaaagcactgaattcggcaaaagattcgttcagccagtcgtgccaagattccaccggagccttgttccaccagaagtggccgatttcgtgggcggtgttcttgagtacatattcattgaatgttcgggaactgagcataatgaaatttttacggctgtaccctcctgaggtgccggaagctgaaagcaggaatttcatgtaaatatcctcatctcccgcaattttataaaggcgtcggaagaatttcaaggcattgtagcaacattgaagtgccgagtctgcaccggcatccgggaagtctgtatagataagttcaatggtagttccgttatcattgatgcggcggcttttcagcatgggtgaagccaggataacattgtcgaaattctcccaaggttgctccatttcccacatcccttcttctgtatgggaaataatacctgagccgctcaccgtataaccgtcagtgatgccgattcgtaagtgcgaataatctgcccggttaccgttgcagacaggataccatcccgtatagtaaccaagttcaatccaatggtcattgaatgattttgcagggccctgcacttcctgcatgtagagtgtgtaacgggtatttatgcggcagcggtcatcggctcctgccagccggtagagggtcaaggtccgtccgtcgggaatgaattgggcaggtgctggggcaagcgtatcgaaacggtaggttatctcccggctgctgtggcgtagtgcgtcgatacgggcatggcgccatagtaccaacgagattgagtcactgtcatggaaatcgacttcaaacgaaccgccaacttcgacttgtcggttcggtacatcaatctgtacggttaagtcataactgacaatgcgcggagattcttgtgcccgaagcatgggggagaaaaggaggcatattgtaaagctggcaattgtaagttgtagtttcatggtacatcaattttagagtgatagtaactgggagattttgcctatgcaatctatgcaaaagtagtatttttaaaggaatattaagatggatggctggatataatttatgaaaagactacctcgttgttgttcatttgtaagattgtcgtacttttgcctttaaagataaatatatttatgaaaaggatattgttgctgttaattttatccgtctgcctgctcccattatggccccaagagacggtaactccggtgaagccgctctctgcgcggattgatgcgttgatagaacacaaacttcccgcaggctctaatgtggccatttcggtctatgacctgactgccggaaagcccttgtacggctatcaggcggacaagctttcccgtcccgcttccaccatgaagctgctgaccaccattaccgccctttcccgtcccgaagccgacgagccgttccgtacggaagtgtggtatcagggaaccattgagcgcgataccttgcagggggatatgtatgtgataggcggttacgacccggagtttgatgaagaggcattggattccctggtggctaccgtggcccgtttccccttctctgtcatcaaaggcaaggtgtatggagatgtctccatgaaagactccttgtactggggcagcggctggttgtgggatgatactccctattccttccagccctacctctcaccgctgatgctgaataaaggagtggtgaaggttaccgccacacccggcgaacggggcgacagcgcacgccttgaatgcactcccgcctcttcctattatacactgacgaacaagacccaaagccgtaccccttctgccggacgtttccgtgtgtcgcgcgactggctggtgaacgggaacaacatcaccgtgacgggcaacgtcgatgcccgccgtgcaggtacggtcaatatattttcttcgcaggacttcttcatgcatacctttatggaacggttgcaggcacggggcatccggtgcattccggcggtagatgcggaagtctcttacctcttcggcgagttcaggcaagacagcctctccgtacggatggcttcctacgaaacttccgtgcaggatgtggtgaaacagataatgaaggagagcgataatctcaatgccgaagccatgctctgccggttgggtgtgcagagcagcggaaagaagcgtgtctctgccgaggacgggctttctgccatccgcatgctgataaaagagatgggatataaccccgataggtataatctggcagatggttgcggtctttccaattacaactacatttcaccggaactcttggtttctttcctgcgatatgcctactcgcgtacggatgttttccagaaactttataaggctttgcccattggcggcgtggacggtacactggagttccgcatgaagaaaggcaccctttcccacagaaatgtacatgccaagacgggttcctttaccgccatcaactgcctggccggctaccttaaagcccgcaacggacacgagatagcctttgccatcatgaaccagaatgcactgtcgggcagggaagcacgcgctttccaggatgcggtgtgtgatgaagtgatacgttgaggtttagccatcgtaaagttgacctttagcgtcgtaaagttaaggtttagcttcctaatgcagacctttacggagtgagccccaagagtaggggaaatcattcctctttcgtattgcggtagcgtgccggagacatacccagataagacttcacatacttcccgaagaaagactggttggggaaattaaattcttctgcaatctccttgatggacttgtccgaatgcttcagccggtacttgatgtgctcgatggcactttcgttaatcaagtccagcggtgtacgtccgcatgcctgcttgatgaccttcgaaaagtgtttgggactatagcagagtgcatcggcataatatcctacagaacggtgtatgccgttgtctttggacaacatctctataaacttacgcaggatatagtcggactgtttgatgctttcttttgtatcgactgtcatttctgaagggttcacttctttgttgaggtgtcccaacatctcacagaaaatggcagaaaacaagtattgcatcacttccctgtgatagtgatgaggctcgtcgtttatctttgccataagcagttcccggtagaatttgaagatttccttgtccccttcctccccgacagactttatgggattgttgtggatatgcataacggtattccatgtatccttctccatcttgaccacgcgttgtaggaactgtgtggagaatgcggcaagccttatcttgtgctttgggcttaccatcgcgtggctgataatggtattgggaaggccgagcagtaagtcgcctgcttccagttggtaggttttgtagttgacttccaactggatacagccttctagacagatagcgataaggaagcatcctaatcttattgtatcttcattgtaggggcttccctccagactattgattatgacaaagtcattgtctacatagtcaaggacatgttcgctgtttttaaagtccgcgatttctacgatttttatgttccctttctccatattcttcctttttcgttttgcaaagttggtgaataatgggaaatatgggatgttccattatgcggctttcttgttctatatatcatttatagacaattcattagccttaaaaaagatgaatgtcgaaaaaggaacatctttggagtgtaattggtcattatggcgttgttcctttctcctacttttgccaccagttttaacaaaaagacaatgagaaaaagtatgattacattgaacaggaaatggatacggctgatagggattgtcggttgtacaatgtgtttggcatcttgcaagcaggcatcggatgcttccggaatgaaaccttcttatgctaccatgaaagtggaggcgacggacaaagagctttccacttcgtactcagcaacgatacgcggacggcaggacatagatatttatccgcaagtgtcgggtaccatcgagaagttgtgtgtgaccgaggggcagaaggtgcgccggggacaactgcttttcatcatcgaccaggttccctacaaggctgcactcaaaacggccgttgccaatgtggaagcggcacgtgccgcactggctactgccgaactgacttataacagcaacaaggaactgtatgcgcagaaagtggtttcggaattcagcctgaagactgccgaaaacagctaccttaccgccaaggcgcaactctcgcaggccgaggcccaggagataagcgcacgcaacaacctctcctatacggaagtgaagagtcccagcgacggggtggtgggggcattgccctaccgtgcaggggcattggtcagccccagcttgccgcaaccgctgacaacggttagtgacaacagcgacatgtacgtttacttttccatgaccgagaaccagttgcttgccctgacccgccaatacggaagcatggacgaggcattgaagaacatgcctcaagcggaactgagactgaacgacaattccgtctatgacaagaaaggaaccatcgagtccatcagtggcgtcattgaccgtcagacgggtacggtagtggcacgtgtggtatttcccaatgaatcgcgcctgctccacagtggggcgtcgggcacggtggtggtgcctaccacttataagaactgtattgtgattccgcaagaggccaccgtgcagttgcaggacaagacagtggtatataaggtagtggatggcaaggccgtttctgccttgattaccgtggccggaataaatgacggacgcgaatacgtagtgctggacggactggaagtcggcgacgagattgtttccaccggtgccggactgctgcgcgaagggacacaggtgaaataatgaactgctatttatcaactatcaatgacccattaagatgaaaggaaatatatttataaagcggccggtgatggctatctccatatccgtactgattctggtgatagggcttatctcgctctttacgctgccggtggaacaatatcctgacattgcgcctcccacggtgtacgtcagcgccaactacaccggtgcagatgccgaagccgtattgaacagtgtcatcatgccgttggaggagagcatcaacggtgtggagaacatgatgtacatcagctctaccgccaccaatgccggttctgccaccatacaggtctacttcaagcagggcacggaccccgacatggctgcggtgaacgtacagaaccgcgtatccaaagcgcagggactgctgcctgccgaagtaacgaaaatcggtgtgactacccagaagcgacagaccagcttcctgcaaatcggtgctttggtaagcaccgacggacgctacgaccagaccttccttgccaattacctcgacatcaacgtgattccgcaaatcaagcgtatcgagggtgtgggtgatgtaatggagctgggcgatacttacagtatgcgtatctggctgaaaccggaacggatggcgcagtatggactggttccctcggatgtgactgccgtattgggcgagcagaacatcgaagcgcccaccggttcgctgggcgaaaattcaaagaacgtattccagtttacgatgaaatatcgcggacgcctgaagagtgtggaggaattccagaacacggtggtccgttcgcagagcgacggttccgtgctccgtctgaaggacgtggcggatgtggcgttgggcacgctgacttacagtttccgcagtgagatggacagcaagccggctgtacttttcatgatgttccagacggcaggctccaacgcaaccgccgtcaacaagcagattaccgcacagatagacgagatgaggaagagcttgcccgaagggacggagtttgtgacgatgatgagctccaacgacttcctcttcgcttccatacacaatgtggtggagacgctggtcattgccattatcctggtgattctggtagtgtacttcttcttgcaggacctcaagagtacgcttataccgtccatctccatcatcgtgtcgctggtcggtacgtttgcctgcctggtggctgcggggttcagtctcaacatcctgacgctgtttgcgctggtgcttgccatcggtacggtggtggacgatgccatcgtggtggtggaggctgtgcagtccaagttcgacgccggatataagtctccctaccttgccacgaaggatgcgatgggcgatgtgacgatggctatcatctcttgtacctgcgtgttcatggcggtgtttatccccgtgacgtttatgggcggtacttcgggtgtgttctatacgcagttcggcattacgatggcaacggcagtgggcatctccatgatttcggcattgacgctttgccccgccttgtgcgccatcatgatgcgtccgtcggacggtacgaagagtgcgaagagcatcaacggacgggtgcgtgcggcatacaatgcttcgttcaacgccgtgctgggcaagtataagaaaggtgtcatgttcttcatccgccaccgttggatggtatggacttcattggtagccgccatcgtgctgctggtctacttgatgagtaccaccaagacggggcttgtgccgcaggaggaccagggtgtcatcatggtgaacgtcagcacctcgccgggcagcacactggaagaaaccacgaaggtgatggacaagctggaggacattttgaaacatacccctgagatagagcactattctaaggtggcaggctacgggctgatgtccggccagggaacttcctacggtaccatcatcattcgtctgaaggactggagtgagcgaaagggaagcgaacacacgtccgatgctgtggtggcacgcctcaatgcccagttctacggtgtgaaggaggcacagatattcagcttccagccgggtatgattccgggctacggtatgggtaactcccttgagctgaacctgcaggacaggacgggcggtgacagaacggtgttctacgagtcggtgatgcagttcttgggtgccttgaaccagcggcccgaagtggcgatggcgtatacctcttatgccatgaacttcccgcaggtatcggtagatgtggatgcggccaagtgcaagcgtgcaggcatctcgccgagtgcggtgctcgatgcgttgggcagttattgcggtggagcttatatctccaactacaaccagttcggtaaggtgtaccgcgtcatgatgcaggcatcgcccgaatatcgtctggacgagcaggcgttgagcaatatgtttgtacgcaacggtgcggagatggctccggtcagtcagtttgtgacattgaaccgggtgcttggtccggagacggccaaccgcttcaatctgtatagtgccatctctgccaacgtgaatccggcagaaggatattcctccggcgaagtgcagaaagtgattgaggaagtggcggaacagacattgccgttgggctacggttacgagtacggtggcatggcacgcgaggaagccagcaccggtggtgcgcagacggtctttatctatgccgtgtgtatcttcctcatctatctcattctggcatgtctctacgagagcttcctggtgccgtttgcggtcatcttctccgtaccgttcgggctgatggggtcgttcctctttgccaaagtactgggattggaaaacaacatctatctgcagacgggtgtgattatgttgattggtctgcttgccaagacagccattctgattacggagtatgccatcgagcgccgccgcaagggaatgggcattgtggaatcggcttactcggctgcccaggtccgcctgcgtcctatcctgatgacggtactgacgatgatattcggtatgcttccgttgatgttctccagcggtgcgggcgccaacggcaactcttcgctgggtacgggtgtagtaggcggtatgcttgtaggaacattggcattgcttttcgtcgttccggtgttctacatcattttcgagtatctgcaggagaaaatccgtccgccgatggaggaggaagccgatgtgcaggtattgctcgaaaagcagaaaagtgaggccgaacgggcgaagaattgagtttatgcagaggaaacg

SEQ ID NO: 4420 - DNA, 26525 bp, Unknown
  gut microbiota DNA sequence
tttgctgttcagcagttgcggcgtgtacaccaaatacaaacccgctaccgaggttcccgacggcctctacggggaagaaacggccgcttttacggagagcaccgacggttctccggtggctaccgaagacagcctgaaccgtggcttgggcggaatggactggcgcgagcttttcactgacccccacttgcaggcgcttatcgggcaggggttacagaacaataccgactaccagtcggcacaactccgcgtggaggaagccgaagccaccttgctgtccgcaaagcttgctttcctgccctcctttgcccttgcaccgcagggcacggtgagcagctttgacagccacaaggctacgcagacctattcgctgcccgtcactgccagttgggaactggatattttcggccgtatgcgcaatgccaagaaacagtcgaaggcgctctatgcgcagagccgggactatcgccaagcggtgcgcacccagctcattgccgggatagccaatacctactataccctgttgatgctggacgaacaacttgccatctccaggcagacggaagagacttggaaggaaaccgttgcttctacccgtgcgctgatgaatgcgggcatggctgatgagtcggcagtttcgcagatggaggctgcctactatcaggtgcaggcttccgtgctcgatttggaagagcagataaaccaagtggagaacagccttgctttgttgctggcagagacaccccgccgttatgaacgcggtgtgctggccgagcagcagttccccgcagacttttccataggaattcctgttcagatgctttcctgccgtcctgatgtccgttcggctgagcagacactggaagcggcgttctacggcaccaatgcggcgcgctctgccttctatccctccatcacgctgggcgggagtgcgggctggaccaattctgccggttcaatgattgtgaatcccggcaagttcctggcttcggcagtgggttcgctgacgcagccgctctttgcccgcgggcaggtcattgcacagtaccgcatagcccgtgcccagcaggaggaggcttcccttgccttccagcagacattgctgaatgcaggcagcgaggtgaacgatgccttgactgcctggcagacaagcctatccaaaagcgaactgctggacaagcaggtagcttccttgcagacagctgcccgcagcacttccctgctgatggagcatggcaacaccacctatctggaggtgcttaccgcccggcaaacattgctcaacgcacaactggcacagacggcaaaccgattttctgaaatacaaagcctgattaacctctacaaggcgttagggggaggtcaggaatagagtgtcatcatactactctctctgcatcttcactttaaatgtgaaggaagggctgtccgggaagtgattccggggcagtccgctttcaatgaataggagggattaaatggaggcaagtatttctctggacaaattattgcagtttttcactcaatgcgaacgataagtgttggctcggtgagagatcgattgaagaaactgaaaaggaaactgaagcaaaagatagtgagtttaccggtaagaaggaggttttgccaggaattgatacagggatgtagtaggtactgaaatagcttgttgttggaactatagatgcagcgtgttccatctatatatgcaacgcgttgcatatatagatccagcaaaccggaaatatacatgcaacgcggtatatctttcgggcggtttttctccgcctttttagggagcagtttatttatactgtgcccagtctacattcttcatgtctccacttttggccagctcagcgtgcatagccagtgcggcgcgcagggcatggggagtctgtgacttgccgtcggtcagtttcaggtaatcccacagaatgttcttgtagtccggatggacacagttttcgatgatggcttgtgcacgttctttcggactcttgccgcggaggtcggccacaccttgttcggtgatgatgatgttgacgtcatgctccgtgtggtccatgtgcgaaaccatcggcacgatagccgagattttaccttccttggcaacggacggacaagtgaagatggagatataggcattgcgggtgaagtcaccgcttccgccgatgccgttcatcatcttggttccgccgatgtgcgtggagttcacgttgccgtagatgtcggcttcgatggcggtgttgatggagataacaccgagtcggcgcaccacttccgggctgttggagatttccgacggacggagcaccagcttgtcgcggaagaagtccatatcctggtagatgccttccagacagtcgttcgttacggtcagtgagcaggcgctgccgaatttcacgcggccttcgcggataagtccgataacagagttctggatgacttctgtgtacatttcaaaagcggggatggtcttgtcacgtcccaaagcacccaatacggcattggcaatgttgcccacaccggattgcagcggcaggaaggtaggcggaatgattccgcgtttcatgtcggcggcaaggaagtcggccacgttctgtccgattttgtcggtcagcgggtcggcggcggcaaacgaacgtgcctcgtccggccagttggtctccactacgccgacaatctttttcgggtctacctggatgtagggcaggccgatacggtcactcggtttgtagatggggatttcgcggcggtaaggagggtcgaggggttcgtagacgtcgtgcaggcccatggcgttcttgctgtgggcggcattcagttccacgataatctggtcggccaggcggcagacagtcggagcgataccgccggctgccgtcaggtagattttgccgtcgggagtaacctcgcatgcctcgatgatggcaacattcacttttcccatgaaaccgtaacggacttcctgagccatctgtgaaaggtggatgtcgttgtaggctatttcaccgttgttcacggctttgcggaaatcggcgttggtggtgtaaggagcacggtagcggatagctttggcgcgtgaaaggataccgtcgcaggaatctccggtagaagcaccggtgaagatacctatctggaacgggtttccttttgcatgttctgcttccgcgatttttgctaattcagccgtaacggctttggctgttcctgcgggggtaaatccgctcaagccgatgttgtagccatgtttgatgaggctcgcagcttctgctgccgaaatgtaattgagtgccataatataaatagttattttttcgtgtaaagattctgaaggggctcgtaattggttctgcaattatcgactgtcaactatccgttctttaatatttccgttgaagtatttctgaccagatgatggctttcctcgcttcttctgccgagtggatgccgtattcggacgttgcttcatcggattcttgcggacgggatgccggggagggaggggaagcctttatggaagtgtgcttggatttggcagacggtttggataccggcttgggcttttctgccggcttggggccttcgggaataaagcctccgtaagtatctccgccccagtattcgggcagtgggttgtcaacgtcgggcataggtatgtcgggactcttgtcagcatttttatttgcttctttcttaaactgcttgacgagtccgattactatgacagccgcaactaacagaaacttgaagacatcttccatattctttttgattttccacccaaagatagtgcaattatctcttatctttgcttttgggcaaagttaattatttaatctgattacagccaaggaattggtaataaaaaagggcagcttcacagctccccttaatttttttaacctaaaccttaactatgaaaaaatctaatgtttctttcattccacaaatttgtgaattaatttgctctatgccaaattaacactcggaaaatgtttgctctcttaacataaattagctgataaggcgcagattgacaacttgtaatggcatttttctttcatttcatccgtttattgggagggaagaagtatctttgcgctccggatgacagataccaacttatgatataaactgattttaaacgaactgattatggaaaaagtaacgggagcagactttaaatctgcaactgctgatgacaacaagaagttgtttatcgagacttacggctgccagatgaatgtggccgacagtgaagtgattgcatccgtcatgcagatggcgggatattcggtggccgacaccctggaggaagccgatgcagtgtttatgaacacctgctccatccgcgacaatgcggagcagaagattctgaaccgtctggagttcttccactcgctcaagaagaagaaacgcggcctgatagtgggtgtgctgggctgtatggcagagcgtgtgaaggacgacttaatcaccaaccatcatgtggacctggtggtggggccggatgcctaccttactctgcccgaactgattgcctcggtagaggccggtgagaaagcaatgaacgtggagctctccaccacagagacctatcgggatgtcatcccctcgcgcatttgcggaaaccacatctccggcttcgtctccatcatgcgtgggtgcaataatttctgtacttactgcatcgttccctacacccgtggccgtgagcgtagccgtgatgtggaaagcatcctcaatgaagtggccgacctcgtggcaaagggttataaggaagtcaccctgctgggacagaacgtcaattcttatcgcttcgagaagccggacggagagacgattacttttccaatgctgctgcgcaccgtggcagaggcagcgccgggcgtacgtatccgtttcactacctcgcaccctaaagacatgagcgacgaaactctccaggtcattgccgacatgcccaacgtatgtaagcacatccacctgccggtacagagtgggagcagccgcatcctgaagctgatgaaccgcaagtacgaccgcgagtggtatatggaccgcgtggcagccatccgccgcatcatccccgattgtggcttatctacggatatattctccggtttccatagtgagacggaggaggaccaccagctttccctctcgctgatggaggagtgcggatacgattccgcctttatgttcaagtacagcgaacgccccggtacgcatgcttccaagtacctgccggacgatgtgcccgaggaggtgaagattcgccgtctgaatgaaatcatcgccttacaaaaccgtctctctgccgaggcgaatgcccgttgcgtgggcaagacgtacgaggtgctggtggaaggtgtttccaaacgtagtcgtgaccagttgttcggccgtacggaacaaaaccgtgtggtggtgtttgaccgtggcacgcaccgtgtgggcgattttgtgatggtgaaggttaccgaatccagttcggctacgctgaaaggagaagaggtagccggctgacgggatagaaaagtctcgatgacatcagtatgatgacaccggtatatagaataaaagcacgagccgtgaggctcgtgcttttcatattataaactttaaattttattctgccatggccagaatattcgctacgtagtcggtcttgttgtagcttaccagggtcaattcggactttggcgcgtcctgattgtagagtttgtaagctaccggcatgttttcatcgttcaattcatacacacttttcttcatgtctttgtcataagccttgtgagactcgttccaacgtgcgtaggacatggtgatttcatcattgccatattggtatgtcatcttaaagtaaggtgtccattcgtcttttgtaccgtcccacttggaggcttccttgcaggtcaggcgtttctggtcgtcataagagtattcataacggatgtgccggtaaagttgtgcaccgtcttgcttaaagatggtcttggcaactactaattcgtttttcacttcttcattggtgatgaagttgttttcctgagctttcacttctgtattcataacgcttacgatagtcattgctacgaatgcgactgccttgaataaatttgtagttttcataatctttatttttaattgttgttacttactctgtttcttttagacgttgttcccgattaaaaagttgcattccaactaatctttttctcaaacgccttcgcctaattatagtcaattcccatgccaaagatttaagttgttgataatcaatgaatagatgctttcgaaaactgttcattatcggacagttgtccgcttaatatcgaacagttggtcattcgttccgccagctggccggagcaagcgtttgttttcttaaatctccttaatggaaaccctataaatcactttttatttgttattttgcaccaaatttaggtatggtgtggtctgtttcattcgggctgcacttccttattggcagaacgttcgatgaataaactcactataaaagcttgtccgttatgtggtggaacgcatttggagcgtgccctgacatgtgtagaccattatgcctcgggcgaaatgttccacttatgccgctgccgggattgcggtttccttttcacgcaagactttcccgtggaggctgaaatcggtcgttactacgaaactcctgattacatttcacataccgatacccgcaagggggcgatgaactccgtgtaccactgggtgcgcaactatatgctgggacgcaaggcacgtcttgtggtccgtgaagcacaccgcaaggagggccgtctgctggatttgggtacggggaccggttactttgccgatgccatgcagcgtcgcggctggcaggtggaagctgtggaaaagagtgcgcaggcgcgtgcctttgccaaagaacacttcaatctggatgtgaaaccccatacggcattgaaagattttgcaccgggcagtttcgacgtcatcaccctatggcatgtcatggaacatctggaaccccttaacgaaacgtgggaaaccctgcactccctgctgactgaaaagggggtgctgattgtagctgtgcccaactgctcttccttcgatgcaaagaaatacggggcttactgggctgcctacgatgtgccccgccatttgtggcacttcacaccgggcaccatccagcaattcggttccaagcatggcttcatcatggcagagcggcatcccatgccgttcgatgccttctacgtctccatgctgacagaaaagcacatgaggcactcgtgtactttcctgcggggaatggtgaccggtacactggcctggttcagcgcgttggtgaagaaggaacgcagcagttccatgatttacgtgttcaggaagaaagggtgagaaaagggattagggattaatgattaatagcgactgatttacataacttgtagcttgtaactcgtaacttataattgatataatgaaaggaaagaataactcggtatcctattttgacatgcagttcattacgtccagcatcagtacgacgctggtgttactgctgttggggctggttgtattctttgtgctcgcggctcataatctttccgtgtacgtcaaggagaacatcagtttctccgtgcttgtcagtgacgacatgaaggagagcgacatcctgaagcttcagaagaggctggacaaggaggcttttgtgaagcagacggaatacatttccaagaagcaggcactccgcgagcagactgaggcgatgggtacggacccgcaagagttcctcggctacaatcctttcactgcctccatcgaaatcaagctgcattccgactatgccaattcggacagcatcgccaaaatagagaaactgattaaaaagaataccaatatccaggaagtgctctatcagaaagacttgatagatgccgtgaacgataatataaggaatatcagcttgatgctgctggggctggctgtgatactgacgtttatctcctttgcgctgataaacaacaccatccgtctggctatatattccaagcgtttccttatccacaccatgaagctggtgggagcaagctgggcattcatccgtcgtccgtttctgcggcgcaatttctggataggtgtgctggccgctttcatagccgacagcattctgtggggagccgcctattggctggtgtcctacgaaccggagttggtcaaggtgattacgcccgaggtgatggtgctggtgtcgggtgccgtgctggtgttcggtgtacttattacgtggctgtgcgctttgctttccatcaacaaatatctgaggatgaaggcaagcacactgtattatatttaacgccttgaagtgcatagagagaaagtactgttatcgcagcctccaaatagtaaattgtaaatagtaaaatagtaaatgtatagatgagtaaagagaaattcgcttttgataagaccaattttatcctgcttggcatcggaatggcggtggttatcattggttttcttctgatgaccggccccgtgtctaccccgacgacctttgagccggacatttttagtgtgagacgcatcaaggtggctccggtagtttgcctgctggggtttgtgttcatgatatatgccgtgctgcgcaagcctaaaagctgttgtgcagaggagtaaactttcagacgcggattacacagatgacgcagattggaatattagaaatccgtgtcatctgcgttatctgcgtctgaaaaataatcagaaagaaagtagtaacagagcttccggacagcccctccggcaactcaagaacttaaaaacttaaacaaattggaatggtttgaagcgcttatccttgggcttattcaaggactgaccgaatatctgccggtgagcagtagcggacacctcgccataggttcggcattgttcggtattgagggagaggagaatcttgcttttacgatagtggtacatgtggctacggtgttcagtacgctggtgatactctggaaagagattgactggattttcaagggactgttcaagtggcagatgaacgaggagacacgttacgtcatcaatatactggtatccatgatacctatcggcattgtgggggtatttttcaaggacgaagtagaggccattttcggttcgggactggtcgttgtgggctgctgcctgctgctgacagctctgctgctgtctttctcctattattataagccgaagcagaaggagaacatcagcatgaaggatgcctttatcatcggtctggcacaagcatgcgcggtgcttccggggctttcccgttcgggcagtaccattgcaaccggtctgttgctgggcgacaacaaggcgaagctggcacagttctctttcctgatggtgatgcctcccatcctgggcgaggcactgctggatggaatgaagatgatgaaaggtgaggcggttgcaggggatattccgacgctttcgctggtggtaggtttcctggctgcttttgtttcgggctgcctggcctgcaagtggatgataaatattgtgaagaagggcaagctgatttattttgccatctattgcgcgatagccggtgtcataacgctcatattaagctaaagtcccctccttgtgtgggggaaagactgattactccggaaatcaataagagaaaaatattaagttgtaccattttatccccctccctaccggggaggggttaggggagaggccaatgaattttaaagaaggagaagtcctctatttcaataaaccgctgggatggacatcgttcaaggttgtgggacatgcgcgttaccacatctgccggcggataaaggagaagaagttgaaagtaggccatgccggtaccctcgacccgcttgctacgggggtgatgatagtctgtacgggcaaggccacgaaacggattgaggaattccagtatcacacgaaggagtacgttgccaccatccggttgggtgccaccactccctcttacgacctggaacatgagatagatgctacctatcccacggagcacatcacccgcggactggtggaggagacgctgaagaagttcatcggcgagatacagcaagtgcctcccgccttctcggcatgtatggtgaacgggaaacgtgcctacgaccttgcccgcaagggagaggaggtagagctgaaacccaagttgctcgtcatcgacgagatagagctgctggacgacgggctggatattgccgaaccgtggataaaggtacgcgtagtatgcagcaaaggaacctatatccgcgccctggcacgtgacatcggcgaagccctgcagagcggcgctcacctcaccgccctggagcgtacccgcgtaggcgacgtccggctggcagactgcctcaatcccctcgatttcaaagagtggatagaggcgcaggagatagatatttagttataagttatgggttataagttatttgctatgaagtgtagcatactgccggataactcataccctcttatgactaaaacagactgatataaataataaataactcataacttataactaattatgaaactgtcgcaattcaaattcaagcttcccgaagagaagatagctttgcaccccacgaagtacagagacgagtcacgtctgttggtgttgcaccgtaagacgggtgagattgagcacaagatgttcaaggatgttctggactattttgatgacaaagatgtgtttatcttcaacgacaccaaggttttccctgcccgcttgtacggtaacaaggaaaagaccggtgcgcgtattgaagtgttcttgttgcgtgagttgaacgaagagctccggttgtgggatgtactggtggatcctgcccgtaaaatacgtatcggcaataagctctacttcggtgacgacgactctatggtggctgaggttatcgacaacaccacttcgcgtgggcgtacgcttcgtttcctttacgacggtccgcacgatgagttcaagaaggcgctctatgcgctgggcgaaacgccgctgccccacagtatcatcaaccgtcccgtagagccggacgatgccgaacgtttccagtctatttttgcacgcaacgaaggagctgttacggcgcctaccgccagcctgcacttcagccgcgagctgatgaagcgtatggaaatcaagggtattgactttgcctacatcaccctgcatgccggcttgggtaacttccgcgacattgatgtggaagacctcaccaagcacaagacagactccgagcagatgattgtgaacgaggaagccgtacggattgtgaaccatgccaaagacctgaaccgccaagtctgtgccgtaggtaccaccgtgatgcgtgccatcgagagcaccgtcagcaccgacggacatttgaaggaatacgagggttggaccaacaagttcatcttcccgccgtacgactttaccgtggccaatgccatgatatccaacttccacatgccgctcagtaccctgctgatgattgttgccgctttcggcggttacgagcaggtgatggaggcatacaatgtggcattgaaggaagagtaccgctttggtacgtatggagatgcgatgctgattacagaccggtaattatggttgtttatttcagtcttggtaccaatctcggcgataaggagcagaacctccgcatggccgtccaaaagataagaaagcagataggggaagtgatttccctatctgctttttatgctactgccccgtggggcttttcttccgataatacttttctgaatgccgcactctgcgtagacactgctttggcacctttggaggtgttgcaaacgacgcaggaaatcgagcgggagatggggcgtacgcataagtctgtcaatgcagtgtatagcgaccgtgtgatagacatcgacctgttgctctgttttgccgatgacggtactcccgttttgctggatactcccgaactgaaacttcctcatccgctgatgcaggaacgccgtttcgtgatggagccgttggcggagattgcttcaggcgtggtgcatccggtattgggaaagacaatcggggaattgttgcaaaatcagtgttaatctctgctatctgtagcgcagatacaagatttcttttttatctttgcctccggaaagcgaagataggctgcacctcagcataaaaaatgaacaagttcattttgttctgcgttcggtttgcactatctttgcccccgaaaaacgatatgtggagagatttgagtagcttgcaaccacagaaaaaaatgctaaaacacatccttttctgacggcacgtttgtgtgccggatgcatctactccacacacctccttccgccattcgttgaattatcaattatcaactatcaactatcaattctcaactgaaatgggatatttattcacatccgaatcggtgtctgaaggacaccccgacaaagtggccgatcaaatatcggacgctgtgcttgacaaactgttggcctacgaccccagttcgaaagtagcttgcgaaactctggttactaccggtcaggtagtgctggctggagaagtgaaaaccaaagcgtacgttgacatgcctctcatcgcacgcgaagtaatcaagaaaatcggctataccaaaggcgagtatatgttcgagagcaattcgtgcggcgtgctgagcgccatccacgagcagagccccgacatcaaccgcggcgtggagcgacaggaccccatggaacaaggtgccggagaccaggggatgatgttcggctacgccaccaacgaaacggagaattacatgccgctttcactggaccttgcacaccgcatcctgcaagtgctggcagatgtccgtcgcgaaggcaaggtgatgacctacctccgtcccgacgccaagagccaggtgaccatcgaatatgatgacaacggcacacccgtacgcatcgataccatcgtagtttccacccagcacgacgacttcgtacagcctgccgacgacagcgatgccgcccagctgaaggccgacgaggaaatgctcgcccaaatccgccgggatgtaatcgagattctgatgccgcgtgtcattgcttccatccatcatgaaaaggtgctggcactgttcaacgaccgtatcacataccacgtcaaccccacgggcaagttcgtaatcggtggtcctcacggtgacaccgggctgacgggacgcaagattatcgtagatacctacggcggcaagggtgcccatggcggcggcgctttctccggaaaggacccctctaaggtagaccgcagcgcagcttatgcagcccgccacattgccaagaatctggtagctgccggcgttgccgacgaaatgctggtgcaggtaagttacgccatcggtgtggcacgccccatcaatattttcgtagatacttatggccgcagccacgtcaatatgagcgacggtgagattgcccgtaagattgacgagctgttcgaccttcgccccaaggcaatagaagaccgcctgaaactgcgcaaccccatctatcaggagactgccgcctacggacacatgggccgcgagccgcagaccatcgtcaagcatttcaagagccgctacgaaggcaacaaggacattgaagtggaactcttcacctgggagaagctggattatgtggacaaggtgaaagccgcattcggtttataatcagcatagctttacggctatttatatagaaggctgcccttctgcagataccgatgtttcggaggatgcagaagaggcagcctttgttgttttggtcttgctcttcaaatggattttttcaccggcagtacaaacacgaaccttgccccctccttgtactccttgtccagcagcactttccctttcagccgttcggcgatgaggcggcagatattgagtcccagaccggtgccttgcccgaagttgtcggccttttcaaagcgttcgaagatggtttccgagtattccgggggaatgccggtaccggtatcggtgacggagaaggtgacgtatccgggatgctctgtgagggagcagtgcaggcggatttcgccttgtgtggtgtgtttctctgcattggtaaggaagttgatgagtatctggcacacacgttgcccgtcggtgctcagttcgtagcagtcgtccacttcggaggtgtagtagagcttcacgccttcgggcttgcggtgttcaacggtggttatggcttcccggcagagcttgttgcaactgtgcggcgctatcttcatggtgtatctgttgctttccaactcggctgcgctgaggatgtcccccaccagtgtaaggaggaggtcggaattgtgctgtatgagatggcagaaatcctgcctttcctcttgggaaaggttcgcgtcgggggaagtgatgagttgtgagaagcccacgatagagttgagcggtgtccgtatttcgtgactcatgttctgcaggaagatgctctttgccttgttggctgcttcggcttggtcgcgcgcttcggaaagttcctcgttcttgtggcatagttcgaggttgactttacgtttgcggtggaggtagagcatcaggaaaagcagggataacagcaaaaagccggtgacaatgctgaaaagagtgatgcggtagcgcgaggtggcctgtatgttttccattttcagacgttcggcgcctatctgggtgttcagttcggcgatgtccgacagttgcaggagattgttcgtcgaatccaactgctggtggtattttttcagatatttgatggcattgggatagtctttggcgcattcgtaaatgtaggcatgttgttgcaagcctttctcggacaattggtcagcgtgggcatgggcctgctcatactgtttgtccagtatgttcttgctgatgtgggctatcagtagggaaacgctggcagagagcttgcaacggtccgccatttgtacggcttctttatagcagtcgttgaattcatctatacgtccctgccggaatagtaccaggcatttctctatcatggcttgggctatgttccgttctgttttggcgctcttcaaggctttttcgcaatagtccagtgcggtggcgtaatctttttgggtgttacggtaatattcggcaaggcttgagtatagttggctgggatcttggtcgggcatattcttcagcatatagtccaaggcttcctgatagtattgggcggagaggtcgaagtttccgcgtgatttgtagatatggcccatggttcggatacagctgaagataccgtaagggtatctgtcggcaaaagcttgctttttcattttttccgctttctgcaaggcgagcaatgagcgttgttggttcaggaagtagatgatttcgctgctccaagcgtgataataatattgcagatagttattggcacgtgaaatctctttcaggtcagtggatgccttttctattttgctatcatctttttgggatatatagaactgcagggggatgatgtatgccaggcattgtgcttttttgtcaccgagcttcagagcctgttgatacaaagtgtcggccaccagcaacccctcctgctggcgtgcctgcttggaagcccgctggtagatggggtagagtgcatcgtctatcttgtagggattgttctgtgctgcggaaggtaggaacacccatactgaaagcactagaaaacataaccttgaaagaatgcactccctctttgttctattggatggaataagcatgtttttttccggatacttattattatgcctatggcatcgcaaaaataagataaaagaataaattacaagctttttttgtataatttctctgtttgcttgttaaatagtccttgccaggagctttcttacgaaatttccggtgataatgccgccctctacatcatcatattcttccttatcgagaacttcacgatggccattgcattgactgccgccagcggcaggtccatggggtcgtggtggttgttgtagctcaccagacggatgcagtccggccgttccgagtggttgacgtatttcactgccaggtattcgtcgccgccccgttcgaaggagacgagatacatttcaccgtagatgacgtcggtgaagtcgcggatggacttaaagcctacgatgtcaccggacttgaggatgggatacatcgagtcgcccgagacgtagacggcaccgtcgcacacagggatattgggaattacaatccgccccaaggcgtactgcgggcggtcagccagcagtgtcttcaggttggcggcggcagagatgtcatagagggtcacgctacggtcgtccatagggtcggctgttttcggtgtgtgaagtatttccacttcaccttgtaccaagtcattgtcacagaattttgaatgatgtgcaggcgagccctttcccgtcagcagccagttgtagtccacgtcgtccaggctgcccagcagcagggggaagtcgatgctgttgcgggcgttccagttgctcagtgtggagcgtgatatacccagaaaggcggcaagttcgctgtctgtcttgaattctttcgccagtttggcacgttttatgatgtctgccgcacaaaataccgggtctttgtcattcgccatattcttcagtttttacgtgtaaattattcagaaactattatctcctcatttatactgtcttacgtcttatttaagaatttaattcccgatttgtttgttttgtaaatgaaaacagcattatctttgttgggacaaaaatacatatcatgttttataaatgcaaataaaagggagggatttatggaaaatacacatctggtcttttatccggaagcatccgaatttagcaaaaatacttacgaatttgaaaaaatgggcatccgccttgccggatgtatagatgaggtgcgttggaagtatagatgcaacgcgctggatgtatagatagaatacgctggatatatacttccagcaaacagcccctacaagcatctttggcaggggcgtgccgaaaaaatattattgtactaattcttaacaaaaaatggttatggaacagattattgaaaaaaatgttcgtttctgtggatgttgccacagagaactgcccgttgattctttttatgtagacaagcgtacgcttgcccccgacaattattgcaaggaatgccgtagggcgatgagcaacgcccgctaccgtcgctcacttccagcaagcaatcccctccgttatccggtcatcactgaaatttcggactgtacccttcgtatgtatcttattctgaatgctttgaaggtagtgcgcgaaagcgtgctccgcaagcggaaacgcctatgcgaagcaggtgatatagaatgatacaagccgctctctccccctaatcactaacccctaatcatcaaaccatgtccagaatcaaaaaacggggacttgactatttccccttgaacacagacttcatgcacgaccgtctggtgcgccgcatcatgaaacgtgagggtgacggctcctttgccattctgctgggcgccctctcctgcatttatgccgacgaaggctattacgtgtgtgccgacgagcttttctacgaagacctttccgcctgcctctatgaaaagacggctgccgacgtgaagcgcattcttgccctggctgtggagtacggcattttcaatgccgcccttttcggcaaatacgccatcttgacttctgctgagatacagcggcagtatctgttcagtaccaagcgccggaaatcttccgccatagacacacgttattgtctggtggatgattctcagagcgatgacgaggccgcgccgactgccgccgggagagtgccgtctgccaatggaagcgtgccgtccgctgccgaaagtgcagcatttaagcccgaaaatgcgacatcgggtacatatagcacagcagagcatagcacatcacaacacagcaaagaaaatcccctcctccatagttcccccggaaccgggggcactgagggcgcggatgtgccatccgcggagggggaatatcttcggaaaatagagcaactgcaaccgccgcaggatggcacggaccgcaacctggacgggttgcttttcaatctgaagcagttccatattcctccgcaagagcagtatgccattatcctcaaaagtaatttcggtgctatcggccaccctttgtggaagggcttctatgccttgcgcgagagtcatggcaagatacggcaaccggggcgatacctgctgagcctgtgctgtaagtaaagttttcgatttgtgaataaattcatgaagaaaaacggtttttttaatttgcacacttttccggatagcgttatctttgcaatgtggttaagcttaatacacaaaaataaaacaatgctgtttcatttgaaaaaaacgaatccttgaatttcaagacaaactattaatttttaaaacaaaactactatgccagtaatttacaaatcatttcagtcggttcttgccaacaaagagggcaagaagcttttctatccccgcgtggtgctgacggggaatgtggacaccgagcaggtggccaaggagattgcggagttgtcttccctctctacgggtgactcgaagaatgtcatcgacaacctggtgaccgtgatgactcgccacctgcagtcttccgagagcgtgacgctggacggtctgggtactttccgccttacgatgaagtccaccatgaacggtgtggaagaccctctgaaggtgtcggctacccagtccacactacgagtgcgttttctgcccacctccaagcgtaatctggaccatacggtgtctacccgttcgctggtgaccggggtgaagtgcgtgcgcttcgaccttcaggacacggcaggttcgggcggcaacgacggcggtggcagtgatggcggcagcgacggagaccagggaaataatccgctgggataaggggatttacgattagacgatttacgatttacgattgaaattcgtactgctgaataatcgtacctatgcaggcatttgtgatacgaagagtaatctcaattgtaaatcgtcaaatcgtaaatcactactaactaccaactactaactactcactacttattcatgcgaaaaatcaactacatcgtggtgcattgcagcgccacgcgggagggccatgtgctcactcccgaggctttagagtccgagcaccgccgtcgcggcttccgcacgacgggctaccactactatatccggagagacggtaccgtgctcggaacccgttccctggaactgcccggtgcgcattgccgcggtcacaacaagtattcgataggtatctgctacgaaggcgggctggatgcccggggaaatccgaaggatacccgtacgccggagcagcgttcggccctgcacctgctggtgtaccagctgctacaacagttccggaacgcccgtgtatgcggccaccgcgacctcagtcccgatttggacggtgacgggaaggtggagccgtgggagtgggtgaagcagtgtccgtgcttcgaggtaagtaaagaattttagaacaatcatctttaaaacatggaattatgaaaataagcaaagaaacctggaaagatatcttgaaaattgtgggtaccatcattgccaccatagccagtgtgctgggcgtgcaggcgatgccactgtaaaaacagtattacaaaactaaaaaagtgtgccggaagccgaaatacctacttcaggcgcacttatttaagaaatatataaatttcattgaatatgaaaaatagaataaaagtattgttagctcttcttatgttatgtggtacaacgcagtcggtacgtgcacaggacggtggagatatgaataatcatcttctgcggataaatgattatgtacctgctattcccgaagcggcaggtatgcaattgtatggaaacattcctgtaagtgaatacacaggaacgcctgatatctctataccgctatatacccttaaatgtgggcgtatagaactacccattacgttgtcttatcatgcgagcggagtcaaggtggctcaagaagctacgtgggtaggtcttggttggaatcttttggcaggagggtgcgtcaaccttaatgctgtgggcaaggtagacgcgacctccggtacatttgctacttgggctgaatgggagaaaataaaatatcactggaaagtacagagtgctgatacgttgaactaccgttcgggtaccgaggaactgatgaatttgtggggaaatttaatgttcgaccccaatacgagtaatacgaccaatggaattattaatgaaggccttatagggcaaggtgaaagagatatatttgaagttgcattgcccggaggaagatcattcaaatacttcttgcaccccaaaaatcagactcctgtcattatcggttccaggatgaattgcaaagtgtggcatagtgctgaaaaagtgatcattacagatgaagcaggcacatcttatgccttcaggccttatgcatttgtaacttccaatgctcccttgacttatatgctgacaagtatgacggatgtgacgggacataatatcactctaacctatgttaccgccagttgctattcggtgcctgttatgtcggagtattataccgtaggtactcctccggacaatgactatataaaacgggactttactgccggcatttcacagacttgctatttaagcaagatagaaaccgatacggaagaagtgattttcgagatgggaagtcgtgaagaccgctatccgggaactaccggaaaactgacaaacatgaaaataaagagtaagttggacgggaaggatgtgtatttttaccagttcaattatgattacttcatttgtcccgaacaatcagtcggcggtaattacttgtcatcggacgattatgggtcgtcgtctaccatacccaccagcgtacttcgtaaacgtctgaaactgctttctgtacttcgaaaaaatggcacttcgcagggtgaaaagcatacattcacttataatgaagctgtgaacttgccttataagacttcttttgccatagactattggggatattacaatggacagcagaatacttccacgcttacaaaccgtgttcatacattgattccctccctggaaggtttgacgaatgttcctttatccggttctaccgctgtcagaaattgtagccgggagtatattacggccaatatgctgaagaaaatcacatatcctacgggcggcagtgtggagtttgagtttgaacctcacacttttgtaggagacaatcgtttcatttctgcagaggatttgaataagtatgacgcacaagtcaaaggtgtcaatactgtcaacaacaacgacctgatagtgacgccttccgctactttcactctgcccaccacgcaggtagtgacggtggatgctcaagtcaattttcccgattatgaagtcaatcaagtcatcggctccggaaccactttgcggaaactcggtgccggaggaagtgtcattaaatcgtacaaagtgacttcacaaaataccagtgggcatgtgtatcatgtcaacgagtcgttcacattggaagcgggagattatgtcctgacaagtacattgagttctgcagttaccaatcaaggttattctacccgcaatgccagttctgctactttgacctatagaggcggtggaactgcagtaaacaaagacacattgcagaaagttggcggaggagtgagaatcaagaccattactaaaaagaataatacaggtgaagtgttggaacgtaccggttacttgtatgaaagcgagaatcacaagacctctggcattctgatgttctcagtcaagtcctatgatgattttaatgtccggcgcggaagctataccacaactcctgaaggagtgatacgcccttctaccagttaccacactttccgccgtttttatgctcaggcgcaaactccaccagcttctgcgcccaatgccaatcctgtaggttacagccgtgtcgtcaagcagcgcgattttctggatgcggggagagaggaactcgtattcagtaacatagccggccaggattatgatgctaccttggcttatatgcctgccaactataatgggcgactactgaaaaagagcatctatgatgccggtaatatcttggtatgggaagacacctatgaatatgagattgcaaacaagtggcaagaattgaccaacatccgtgtaagggacaactatgtgggtccggttaattgctattccggcagtatcacctataatgaaaacatcggaggacagacggtgagctttagaaatccattggcttatcacggacgttttgagataactttatatccgcatcttacctatgatatacggttaaaacgggaagtttcgacggaatatgcccatggtgtaccggtgacgcaggaaaaactgtatacctacaacagtcgtaaccagatagctacttgccgcacaagtaccagccgttcgggctatgtaatggaaagctatgcttatgcagcggatgtttcttcctacaaagatgaattcaaggctaataacgtgcttgatgctgtacagaactaccaacgaacatcgggaggagcgacgctgtatctgaataatacgtacggggacgtcttttctaaattcaccttgcagtccagtgaagaatatagtagtttgtatcctgagaaaagaactgtttcttataggtatgatagtaaatggaatccggtggaagttactactcccgacaacatgtctgtggtctatttgtggggctataaatattctttgccgattgcccgtctcaaaggtatcacttatgcggaagtagtgtctcggctcggaacaacaggtttggatgctttgtgttctgccggttcacccaatacgacggccctctatgcactgaaaacgtccttcccggaatgcgaggtcacaacctggcttcacaatccttcttatgggctgaaggagataagaaaagcaactggttttaaggatttctatctctataatgctttgggtggtttatctgatgtgcaggatcataaccaaaatcctattgcctcgtacttctatcagtggtctcctgacggcacttcgcagaattacgttcgcactcatgctatgactgcagcagcaggtagcaagtatatggcaagttatgattattatgacggtttggggcgtctcttccagaaggtacaaaagggaattactcccaccggaagtaatttgatatcgttacaagaatatgatggcgcaggacgtcgttcggagagttggctcccaattgtttcctcctctgtttatatgtctccttcggctatcaaaagtgcggctccgggcaactattcaagtgattcccgtccctacagcaagcctgtttacagtgtttccccattagaccgcattctgaagcgatactctccgggagcggcatgggcatcaaaacctgtaactatggattatctggctaattcttccgatgtgaattgcattaactattcggtaagttcgtctggggcacttgtcaacaacggtacttatgcagccggacagttgcgcgtggtgaaacgtattgacgaagaccaacatgtttcttatactttcacagacaaacaaggccatatattgctggaacgccagatgcagggtagcgagcagcatgatacttattatgtgtataacgatttggataacctttgcttcgtattacaaccgatgtatcagagtgtgtcaaacctggatcaatatgctttccagtacaaatatgacaaccgtaaccgttgtaattggaaaaagcttccaggtgcttctgccgtgagctatgtgtacgatgaggcagacaatatgatcttttcccaggatggcaagcagtatgcctctaagcagtggagtttctatctgtatgataagttccatcgtctggcagtgcagggcgtttgttccaatacgaatacggctgcagtttcgaatgttattgtatcatgtacacgggtgaatagcaacagcggtttgggtaacagtggatatacatcaagctttgccttggtgtcgcccgaagtccatagagtaaactattatgacgactatgccttccgtagtctgaccggtttcgataatgccggctttcctgcggcaacaatcgatgccaaaggatatgtcaccggtagtgtgattactgttcttggcagcagtacaaaactttattcggctaattattatgactttgagggacgcatcacaaaaacggttcaaggcaatttgctggagggttatgatacgacgaacactgtttatacttttaccggcaagccgaacactgtgacacatacacatactgccagcggaaagaccacgcgcacggaagtatatacctatacctacgaccatgcggacagaataagcaaagtgcggcatagtcttggcggcacttcaatcactctgtacgatgccacttatgacaacttcggccgtttgctgaccaagcagtatcacggtacgagcaccaacaagctgacttatgcctacaacctgcgcagctggctgacgggcatcagcggtacatgcttcacacagaacctgtactacaacacgggtgtgggtactgcgaagtacaacggcagcatcagcagcatgacttggaagtccgggaacgaaagtacagtccgtggttacaaattcacttacgacggtcttgacagagtactgaacgctacctatggagagacagcaagtatcagcacgaatgcgaaccgcttctcggagaacgttacgggttatgacaagaacggtaacatcaagagtttgcaacgttacggccagactggtgccagtgcctacggcctgatagacaacctgacttttaccttgaacggcaatcagttgagccgtgtggacgatgccgtgatggcttctgcttacggtggaggcttcgagttcaaggacggcgtgaagcaggtcggagagtacacctacgatgcgaacggcaatttaaccaaagatttgaacaagggaatcaccgatattcaatataattgtttaaatttgccaagtgcagtaacgttcagcgacggaagtacgattacctatgtttatgcagccgacggcacaaagctaagaacggttcataagataggtggcgctaccaccacaacggactattgcgggaatgtggtctatgaaaacggagcccagaagcttctgattaccgaagagggctatattactttgagcgacaacaagtattactattacttgaaggaccatcaggggaacaaccgtgtagtcataaaccagagcggagcggtagaggagacaaaccattactatctgtttggaggagtattcgcttcatcaacaagcactcagccttacaagtacaatagcaaggaatatgacacgaagaaaggcttgaactggtatgattacggggcacggcattatgatgcagtgttgggacggtttatgacggtggatccgttggcagagaagtattattcagaaagtttgtatacttattgttatagtaatcctataaattgtatagaccctaacgggaaggatggtatttatattgccttccctgattataaaatatcaactcctattggtaaaattgggaatttaggtcatgctggagtattattgattgataataaaacaggagtgactaaatattatgaatatggcagatatgacaaagagggtaaaggagttgtcagaacattcgctgttccaaatgtaaaaataggacaagataaaaagcctacattggaatcattgaataaaactttatcaataatatctgaacaagcgggacatgccggaagaatagaaggagcatatattgaaagtgataagtttaaagaaatgaaaaactatgcagaatcaaaaatagcggagaatgctaattcaaagaggaaagagtattcattaaggaataataattgtggaacttttgcggctgatgttttgaaacaagacccatctgtaaaagataaggcaccagtaattatagatccaaggcccaatagtatagttaaagagtatcaagataattttaagtcactaaattatgatcctaaaaagagacaagttaaaattgaatagatatggaaagtcaaagtatatcattaggagatttattttcagttgaattatttgtaggatcaataacgtttgttttaggaacggttttgttcttcttattattattattgaatttgaggcttaatcttaaaacgacattattatattgttgcctgcaattgatacttgttgtctctctttctactattttctttatattttggcgttttaattttgatataatgatagggtttctatatttaccaggtgtattatctgaggtttttattatgctcttattctattttatattaaaaataaaaaacaaataattgaataatatttttataacaattctattacag

SEQ ID NO: 4421 - DNA, 11899 bp, Unknown
  gut microbiota DNA sequence
atatttaattatttcttctatctcttgttctgtaatgtccgctgtcagcgagaagcggatacgtgatgtcccttcgggcaccgtgggcgggcgtaccggcagtgcataaaagccatgcctctgcagcaactctgcgcacagcacggtgtcggcactggggccgataatcagtgggacgatatggcttgcgctggggcatccgtaccccttggcttgtaatgcttcgcgcagtgtccggctgattcttgccagatgctcgcggtggtcctgcattctggcaagtttccgtacgataaacagtgtccaggcaatacttgtcggaggcaatgccgtggtgaagatgagggttcgcatccggttgacgagatactcgcgtatcgtccggcagcaggcgatgtatgcgccggcagacgccgctgccttgccgaaggtgcccacgaggaaatctatatcccggatgcatccggtttcttcggcgcagcccagaccgcgcggtccccttacgccgaatgcatgggcttcgtccacatagagcagtacgttggagtatctttttttcaaacgcaccaatgccgtgaggtcggcttggtcaccgtccatgctgaagatgctttctgtgacgataatcaattgccggaatgttgcatggtgttgttccagcaggcgttccagttgtaccaggtcgttgtggcggaagcggatgcagcgtgcggtggataggcggatgccgtcgatgatgctggcatgcaccagcttgtctgccagtatcagggtttgtgtatcgctcacggcgggtagaatccccatattggcatgatagccgctattgagcaccagtgctgtctctgtgccgaaaagtgtggcgagttccgtctccagctcttcgtaaatcccgaagttccccgtcagcaggcgggaggaggaggaagtcggcaggaaggtgtccggtgtcagtgcctgcaggaattcttccttcagctggcggtcggcagccaggcccaggtagtcgttggacgaaaggttcagcatatgccggccatcggctacaaccgtgcgtccctcgtgtgtcagttgcggcaggcggcgcaggttgctgtgttctttcaatgtttgcagctcttgctgcatatagttagttacgttcataaattcttgatataataatttcccctttatcctctcaattcatttcctgtataattttcatcaaccctcccgtcagcttcctcagctgttccggctctataatgaacggaggcatcaggtataccaatcttccgaacgggcgtacccagattccctcctcaacgaagcgtttttgcatccacgccatgtctacgggttcttttgtctcaatcaccccgatggatcccagcacacgtacatccgtcacttgcggcaatcggcgtgctggttcaagctcttcctgcagttgccggctgatgcgagtcaccttgccttgccagtcgtattcgggcgaggtcagcagcttcaccgaagcgcacgctacggcgcatgccagtgggtttcccataaaggtgggtccgtgcataaacacctccggtgtatggttggagatggtatccgccacttcattcgtcgtcagtacggcagacagcgtcatgtatccgcccgttatggcctttcctatgcacatgatgtccggttctacacccgcgtgctcccaggcaaagagttttcccgtccgtccgaagcccgtggctatctcatcgaatatcagcagcaggccatgttccttgcatatctgtgccgcttcgcgcaggtactgggggtggtagaaccacatgccgccagcgccctgcaccacaggttcgaggataagcgctgccagttcctcgtgatgctcctctaccagtttccgcagttccaccgtatcccgttcatcccattcgccatggaagcgtgagcgcggctgcggcacgaaatagcgcaccggcaatgatgccccgaacagcgaatgcatgcccgtcaccgggtcgcagacagacatggcattccatgtatccccgtgatagcccgaacggatagtcacaaaattgttcttcttcgcctttcccttgccataccagtactgcacggccattttcaaggctacctctactgccaccgagcccgagtcggcatagaatatcttctgcatggacggcgggacaagcggtagcagcaactggcccagttcaatggcagggtcgtgtgtcagccctccgaacatcacatgcgacatcttgcccagctgtttctctgccgcccggttcagtgtagggtggttgtacccgtggacggcgcaccaccacgacgacattccctctacgagtgtttctccgctttccagggtgatggtggcgccttcggcatgcttcaccttgtacaccggtagcgggttggtggtggaggtataggggtgccataggtgctctctgtcgaactgcgagccgcagaaccggtatccggcatcttctatcagtaccttgtcttctgacactttcgagccgagcgttgtcagcaggtcgcccacgatggcggagttgatgccgatgtgtagcgcttgctttacggcctccttgctcagttgcgagcgtcctccggcaaagcggaggaaagctgtcgggttgatgaagcggaagagggcgatggtggtcagtatttcctcctcgctgagtggtgcctgccgttccagcggtgtgccggggatggggctcaggaggttgatggggatggactgtacttccagctcgcgtagtgtgaaggcgaattcgatgcgttgctccatgctctcgcccatgccgatgatgccgccgctgcagatgtccatgcctacattgcgggcggcttgcagggtgcgcagcttctcttcctgcgtgtgcgtgctgcacagttggggaaagtaggagggggctgtctccaggttgcagtgatagcgggtgatgcctgcgtcgtgcagtgcccgcatttcgtcttcgttgagcagtcccagtgatgcgcacaactggatggacgagtgccggcgcatgtgccgggcggcttcgcacagtttctccatgtttctggaggagggcttccgtccactggtcaccagcgagaaacgtgccacgccctgggcttcattatgcagggcatgccgcaggcattcttctttgtccaccaggtcgtacacgtctgcctgggttttgtagtgcgacgactgtgcacaccacttgcagttttccgggcatcgtccggacttggcattaatgatggagcacatgtcgaactcctccgaggctcgggcccgggttatctcgtgggcagcttcgtatagcgcttccttgtcgggttgcacagccagccattcggcttcttccttactgatgtggctgccgcgcagcacttgttcctttaatttctgtagggtcatatctttcttgggttatgttcatggataaagacagaggtacggattgccggggcggtgcagctcgtcattctgctgcatggcttccggtaatccgtacctcttgttctcttttgtttcaggctatatgtgtcttgtccgcccgtattcccgcaggggcggatgacttgtgtttcaaaaagaatgtgccggttcgttcccagctccgtgaggatacttgtcaggacgctgctgctacccagcggaatgccggtgtcggtttcccttccttccgtttctcctttccaggtactctcttccccgcatccggcatgtccggcggttcccgcagtcttctgtttggacagagagctgtctgccacgcttttgcgcaggcaaccgatggtgacacaccgtcctatgctggcaaatgcagcgtaggcttttctgctccagcggcggaagcggatggtaggtgcggcgggtgatgtattcctcatgtttttttcagcctgatgcggttttgtttccttttagcggatgcaaatgtagaaaaaataatttcataacggtaatggtcatgcatgaaaaagccgcgcaaatgcaactattgcgcggctcttctttaagcaatgtcgtaggatttcactctttggacgactggtagtagagataccagtcattattggtggcaccattggactctacccatttggcgaaatcgggatactccaggtcgatgcgtacggtttcctttgccggagtgaaccggatggggccttccgtgccggttgtggccggcagcatgatggcgaatggatatttgccgtccttgttgatgtagtaggcatcgtcttcggctccgatttgctctgcgttggctttaccggtcgctttcttcttgggcagatgcacttctgtccggttgtcggctccggctgtatactgggcaatgatgaacgggttcaagtcgctctccagattcttcttaggcaatgtgttgtctgcaaatgtacgggttacggtaaattcgttgccctgcacagactttgcatcggggaataggatgacagaagaggtctctgtttcatcgactgctccggcaggcagttctatgctgcctcgctggctggccacatattgcacggcaaatgcgttggagtatgtggcggcaccactttgctgtacgggtacaaaggtgtcttccaccttcagcacataattgttgctgttgaatgaaatggcccgtttgtgttcgataatcacgtcgttcaagtcatagtcaccgccattgggccagatgtcttcgtaggcatacgtgcggtaggttgtttcggagctcgtcaccgtaggctcttccgggtctatgaccggacggtccgggtcttgaatggcttcattggggttggcatcgatacagaacagtatgtcttcgtagctggtatcatcgccatcttctactccgtagactaccgtgccgttgctggtggagagggagataaagcgagcttgttggcctgcatatatcttgttccattctttattggaatatatataatttatagagtagtcgatacctttattgggggtatatccattggggatgatgaaatatcctatggtatatcctgccgggaatttggtggagacattaccgttttcgtcctgatacagaagttgtatttttgtattcttctgtatgggagcgtcatatcgggaatatttgttaccacttccagaccatccggtatacgggtcgtctcctgcaatggatgcattgggaatgataatgaatttgtctaccttgtcagggctgttgggaatttcattggtcttgtagtaataatagccgatggaagtcaggtaaccggcacgttcggtcaggaaggtcagatacagttctgcatcggtaatcgttacgtgttgtccctggttgttgatatatgcttgggcaatggtggtgttcacatgctttgtatcgctcaccaaagctctgttgtccagattgctgggtttgctgtcataacctttccacagtgtgtgttgtaactgctttaaagttccgtcattgaaatttcccgtagttacaatgtcattattatcaataatctcaccgtgagattgtccccatccaacgatggagtatacccgttccttcctatcctttaggtcgatagtcaggttggattttgcacgtgtcatggcagttgagcgggtgttggcattattttcggtcatatctaccaccactttgccattttccacatctgcttccacatacatgggggctccccaactttgtgagatgatatataccttttctgtcgctttgggcagttctacgttgccggtgaagcgtccgtctgcatctgcaaagattttaaaaaccgcttcgccgttgatggagtagaggttgtttgtctgataggtgatggggtcttctgtaaacacctctattaatgcgcctcctgcgatttttccataattcacgtcaaaagctacctgggctgttgttgcaaagtcaaagtattcgctctccggctttagttctgtttttccacgttcgggattgtataggtctttttcggtacatcccgtgaatatgctgcaggcaattgctgaaatgagggttgcagcactaactttcgtcataagtctaactttcatatttttattgttgtagattgcttgcttgtttgtcttatgaacgctgtctatatcacaaccgccacctacttcacagacgagttgtagatactacattttctcgagcgcttttttcatgttgcaaatataaacatagtatttataatctacaacttttggggtttaaaaacacttttggtgggttaaaaagttgtataaagtgaattgatactaattggatgaatcgaatggtgcgggcataaaaaaaggctatctatcccagacagccaatcttttgttaaccttaaatctaatactatgaaaaacacattgcaaaggtacgtgttttctgataatctccaaatttgcagtagataatatcatgttttataacaagacttaatggtcattaagaactttatctgcaatattcatcgtacatttgctcctgatatatcatccgtttgccctttatgcattatgcattcggtgcagacggatgatgtgttttcgtgaacttatatacagacaaacaactataaaacagacgtttataatgaaatcaatccagaacaaaggaataaacctcaccgcagaagacctcaaaaaccgaatcgctgacagaaaagaacgatataccaagcagcaggcacgacgcgagaaattggaacaaaccatggagaacactcgcaatgacatcgagcaactggagtatacccttgcacagatggaacgtgccgccaagcgctcccgcaatgctgccgtacagccttcccgttttgtcccccgcgagcgtatcgctagcttctttgcccgtgtttcccgttttttcgaccaccttcagcaccgcttgcaccgtagcttgaactatacttggttctgccttgtgctatgctcccgatatacttttcagagccgcctgaaaagcgtggaacgctgctgtcttacaccggccacggtgctggggtacttcaagagggagagggagatgtaaccagtgacttcgctcttatggtagaagcagccttagggattagtgcggaactcctcgttaataggcaggcgagatataatatggctgtctctcttaaaaaaaatcgctgaccgataagttgcatgaaatacacaaaatgtgtgctttactattatagtatgaaagtgttgcttttatcaataagacagtgagggtgtgtcatcaaccgttttgacacattcatttttcttgagcaagttttcttattgccactcgaactttcccagttttccctcccattctaactttgcaacatgttttattaataaatatatgcaaaatgataaaagaacaaagttttgaatggctgctcgagggatgccatcgcattgcagatgtggcagtggcctattacccaaactacgcgtatgcctgctcggccgtaaaggccctgcgccgttccattgcggaacacgcttgcctgctgaaggatctgacggaccagggctataccgccaggactgcccacctcacccccgtacagataggcatcctcctgagctactgggggatgcccgaccacgtgaaggatatgaccgtgaaaaatccgtatcttctggtctctaaaaaatatgcgaaatagagaatgtatttctaatacattctgattattttagtatattattatatagggtggtggaggatgaggtgaacccctctctcgccaccttatgtatttcattaatttttagccgattctaactgcttatttgtatccccctggctggtcccttacctttgtcgcattatcgaattaagaatagacaaaaatggaaaaagaaatgagacccatgacaacggagatgctgaagaaaggctatctcctcttccccaaagccttgtttgaggaacaaatgaatatgaaaaccggagagaaagccgccgatgccttcgaagcctttgtctttgtgctgacacacgtcaactacagcacggtgacctgcaacgtcaggggacaccttttcgactgtgtacgtggcgagtccgtactttccctggcccgctggatggagatattggggtggccccgcaaccgtacgcgctacttcttcaacaagatgttcgacgccggcatcgtggagcgggtggccaacccctacgtgatgcacatccgtatccccgattatgatttccttactggcaatgcccgtcctaaagcagccccgcggaagaagaaggcagcgccggtggctggggtgggagaggacttctgcatcttctgggaaaagtttcatgacatcaccgagcatcccaaagtaaacatcggccgggcccgtcgcgaatggaaaaaattgacggcaggcgagaaacagcgggcactggacaacatcgacgaatattacgaccatctgaacaaccaaaaatattgtaaacaagccgccacctatctggcggacaaatcttttgaaaatgaatatgatgactgaaactactttttcccacgacagtgacctcgaagaagctgtcatcggtgcctgcatgatagagcgcgctgccatgcctctggtggcggacaaacttcgtcccgagatgttctacgaggagaagaatctggaaatttttgccgccctgcaatcgatgtatcgcagcgtgaagtccatagataccatcacgctgaagaacgaactggcagcccgtggcaaactcgatgccgtgggcgggccttacgaactgttacgcatcagctcgaaggtcagctccagtgctcatctggagtatcatgcgctcatccttaggcaattgcacacgcggcgtatcatgcgtacgggattccagcaactgctggcgttcagtgccgacgagtcgatggatattgacgacatcctggtggaagcccatcgactgctggaggggctggaggacgagagcggcgtagccgaccaccttcgctccatagaccggctgatggacgacacgctggccgaggtggagcagcgtatggagcacggatgcaacggcattacgggtatccctacgggttttgacgctctggaccacgttacggcgggctggcagcgcggcgacttgaacatccttgctgcccgtccgtcggtggggaagacggcctttgccctccacctagcccgtgccgctgccatggcggggcgtcatgtggtggtcttcagcctcgaaatgcaaggcgagcgcctgggagaccgctggctgcttgcagctacggagggggtagacccgcaacacctgcgtagcggtcagctcacacccggcgaggtgaggcaggtgcatgaggcgtctgccgagttgtcgcggttgcccatactgatagacgaccatccgatgacgagcatggaccgcgtgcgttcttccgcccgcctgctgaagagcaagaatcgctgtgacatggtgattgtggactatctgcaactatgtgacatgaggagtgaccagaaaaaccgcaaccgcgagcaggaagtggcgcaggcaagccgcaaggcaaagctgctggccaaggagctggatatccccgtactgctgctgagtcagctgaaccgggcgagcgacggtagcatagaccatcgccccaccctgagcaacctgcgcgagagcggcgccatagagcaggatgcggatatggtaatgctgctttgccgccctgccctctacggcaagaccgtcgataagaagagtacttatcccaccgatggcctgggtatcgtcatcatagccaagcaccgtaatggcaaaaccggtgaagtctatttccatcataaccaaagcatgacaaaactggtggactacataccaccattggagtggctgacgaggaatgcaaagtgatggatggaaatttatagaatacagagacacaaagacacggagatttttcttattgcttgaaaaactctgtgtctccgtgttttttgtagtaaaaaaaatggcaaaacacttgacttccgcttcttaatgttgtatctttgtaatgtgcttaagaaaaggaataatcattgattcgggcgccctatcccttcccttacccacttctctcttataactcatttttcttaacttaaaccttaactttttaaatttatggatgtaattgtagagcgcttccagcgccgtaaaatcgtgagcaacccggcttcgcccatgttgtactatctccgtcagaaacccaagacctgcggcaccgtggacatcgatgtccttgccgcctccattcagaaaaactgtgccatgacgaagggcgacgtgaagcacgtcatcgaagccctggtggaggagattcaaggcaaccttgccaatggcgacaaggtgaagctgaaccagctgggcactttccacatgacgttccgctgtcccggcatggaggcctcggacaaatgtacggtgcgcaatatctcgaaggtgaatatccgctttatccccgacaaggagctgaagctggtgaacggcagtaccgccgtgacccgcagcccggcgaatgtgggctttgtgctcgacaagcccgaggagggcggctccggcggcggcaatcaaggcggtggttccggaggcggctccggcgacgacggcgaccagggcgaaaatccgctgggataaagaaggaatgattaagggttagtgattaatggttaatgaacacaagcaaatcgcttatcgctaatcaatccctaatgattaaccattaatcattagcccttaatccttaatcactaatccttaaccattaattcttaactattaatccttaattttatgagtacaaaatcatctgtttgggataagattctgaaagtgataatcgctgtagcctccgcgcttattggtgccctgagcgcccatgccatgacagtgtagcaggtttccttcacttttaatttttaatttctaatttttaattctcatgagattcatcaatcttatcgtcgtccattgttccgccacccgctgcgaccgctgctatacggagcacgacttgacgacagaccacctgcgccggggcttctccggcgcaggctatcatttttatatccgcaagaacggtgacatcaagtccctccgtcccttggccctgcccggtgcccatgcccgcggttggaacgacaagagcatcggggtctgttacgaaggcggtcttgacgagtgtggtcgccctgccgatacacgcacccctttccaaaggcactccctgcgtgtgcttgtgttgctgttgctgaaggattatcccggttcccggctgtgcggtcaccgcgacctgagccccgacctgaaccataacggggagatagagccggaagagtgggtgaaacaatgtccctgctttgatgcggcgactatactgacagaaccgccaccacccaatccggcatgcttataaaatgtttttattctctttcttcgtgctcttcgcgcgcacgtatatatataatgtatagttattttctctctttttcctttcttcaaaattgttcatgcgaaatgcatttatgaatcagtaagttacaaaaaagtttcatttttattaaaaaaaatgatagatatgtttggcttgtattgttaaatcctatacctttgcacccgctttccaagagaaggaaagtggtaagattgaaatactgaaacagaagtgtggaaggtgacacagagaaataaaaagagataaaaatatttttcgaaaaacatttggaacttattaataattctccttatctttgcagtccgactcgcaaagaaaaagaacttttcttgttttgcttttcttatccttgtttaaaggatttgaaaatacaggaaagagaaaaatgaaaaaaaaacttccgaaaatatttggaagatatgctttaaagttcttacctttgcatccgctt

SEQ ID NO: 4422 - DNA, 65230 bp, Unknown
  gut microbiota DNA sequence
tttcgttttgaagtcataatagtaacacatttattagtttgtaaatgtgtctacctatatcaggataagacatgttcacccaccgtcaaaccctccccgaagtaatgaaaaggagggcgttcctttgcattttcaattaaattccatagctttgttctttgaaaacctatatataaaaccctacgaatatgaccaaatttgaaatagaagagaaaatagtctccatgctcaagaccgtattcgacccggaaataccggtaaatgtatacgacctgggactgatttacaaaatagacgtctccgaccagggagaagcctccatcgacatgacgctgactgcccccaactgtccggcagccgacttcatcatggaagatgtgcgccagaaggtggaatccatcgacggcgtaacctccgccaccatcaatctcgttttcgaacccgagtgggacaaggacatgatgagcgaagaagcgaaactggagctgggattcctttaaatcagttgaaagttcaaagttgaaaatggaaagttgaaaatgaagaatgtatatttcctctcggatgctcacctgggctcacgagccatcgaacacggacgaacccaagaacggaggctggtcaacttcttggacagcatcaagcacaaggcatcggccgtatacctgctgggagacatgttcgacttctggtacgaattccgtaccgtagtgcccaaaggatacacccgctttctgggcaagctgtccgaactgaccgacctgggagtagaagtccactttttcacgggaaaccatgacctttggtgcggcgactatctgaccaaggagtgcggcgtcatgatacaccgcgaaccgctgaccaccgaaatcttcggaaaagagttctaccttgcccacggtgacgggctaggcgacccggacaagaagttcaagatgctgcgcgccatgttccgcagccgtaccctacagacgctgttctctgccctgcacccccgctggagcatggagctgggactgaactgggccaagcacagccgcttgaaacgcatagacgggaaagaacccgcatacatgggagaaaacaacgaatacctggtgctctacaccaaggaatacctgaaaagccatcccaacatcaactacttcatctacggtcaccgccacatcgaactcgacctgatgctgagcagtaccgcccgcatcctcatcctcggcgactggataaactacttctcgtacgccgtctttgacggcgagaacctcttccttgagaattttgtggagggagagacgaagctataacccgcatttccaaactgttaaccatcataccattaccacccatgaaacctttaagactgaaaaacatgattgccggatgcctgctcgcagcaggagcattgccggtatggggacaatccggcgccccgacacttgtcatccgcattgacgatctcggtgccctgcattccgtcaacgaagcctgcatccagacctaccgctcggggattgcccgcagcgtggaagtgatgcccgtagcagcctggtatccagaagccatcaagatgctgaaagaaaatccgggactggacgtcggcctgcacctcgtcatcaccagcgagtgggagaacgtgaagtggcgtccgctgacccactgccccagcctgacggacgagaacggctatttctacccgatgatgttccctaaccccgcctatccgggacagtccatcatggagcagaaatgggacatcaaggagatagagcaggagttccgcgcgcagatagagacgacgctgaaaagcattccgcaactcagccatctgtccggacacatgctctccaccggtttcagcaaggaagtgaacgagctggtgcaacggctcgccaaagaatacaacctgccgtccatcgaccgcatggactcctccaaggactaccggtttacctacatcgggtacgacggccccaaaagaaccgccgaagaaaaggaggccagcttcatcaaagcattggagaagttgcaaccgggccagcgctaccttttcttagaccacccggcactggacaacgatgaaatgaaaaccgtcttccacatcggatatgaggacgtggcgctggaccgccagggagtgaccgacctgctgacaagcccccgcatccggaaagccattgaagacaaaggcataaagctgatttccatcaaccaactgaccaagggcctgccccgcgccgccgctactccgaagctggacaaggccatgaacagatatctggatgccgtaaagaaagccggacaagacctgcacagtatcatgattgtgcaacacggcaatgtcattgccgaagaatggatgggcgaagggaaagaggatgagcctcacatcctaaactccgtcagcaagacattcaccgccaccgccgtgggacttgccgcctccgaaggcaggctgaagctgacggacaaggtcatctccttcttccccgacaagcttccggcaaccgtcagcgaaaatctggcagccatgaccgtacgcgacctgctgaccatgaactgcgggcacgacaccgaccccaccggaacggtacgcaaaaaggcagacgccgattgggtgcaggagttccttgccttccccgtggagcacaagcccggtaccttctacacctacaacagcctgggaacctacatgctctcagccatcgtacagaaagtgacgggcgagaaagtggcggattatctctatccccgtctgttccgcccgcttggcatcgtcaacgcccggtggcaggaaagcccgcaaggcatcaataccggaggctgggggttgtacctcaaaacggaagaccttgccaagatgggacaactgttcctgcagaaaggaaactggaacggacagcagattctgcccgaaaaatgggtaaaggaggcatctgcctgccaagtgccctcactgcccgccggcatgaaaccggagatgctgaagaaagcgaagatgagcgccaagacaagcgactggctgcagggctacggctaccagatgtggcgctgccgccacaacgcctaccgtgccgatggtgccaacggacaatacatactggtgttgccggacaaggatgccgtcattgccgtcaccgccaacatccccgacatgcaggcagagctgaatctaatatggaagtacctgctgcccgcgctataaaacgtttattcttataaatgattacaaaaaagtgaaggtcaccggaactttttcccggcatggttgtagtaacatcataacattaaaaacattagcgtcatggatgatatgatttacagaaacgacccgattgccgaagagaacatagacccgcacggacgtccggcaacggatgaattcgaggaatggagcgaagaggtctccgaacggacagataccggatacaaggaccagaaaataaaatctgccaaggaacgggagaaacgtatccgggagatggatgaaattataaagaaggaccttaaggaataaattgacagccaccacagattacacggattctcacagattagtctcttatacttgatatcagagcttccaatctgtgagaatccgtgtaatctgtagtgactttctattatttgtatccaccagccttggctatgcgtttcgggatttccgtgttgtccatcttacccacgaacagcttggagcctgcacctactgcgaataccggcacatatccggctgtatggccaccgctggtccagcctaccatggcaatctggctcattaccttcttggcggcaacggccaggggctcagtcttggcataaagactttcctcaaacactacatgcttgttcacgaatgattcttcgtaagcatcacgcagcatcttctcctgctcccagctcaccggcagttctttccagaaacccatcttttctgccaggaattccttcatttccggccagttgataaccttgcgcatcttgcgtaagtccgtgatggaacgtgaaaggatatcctgagactgcttctgcttggcaagggctttcagttgaagctcgtacttaccggtacccagacccagaccgccggtttcatggtctgcagttaccacaatcagcgtttctttgggatgcttcttatagaactcgtaagccaccttgatggcgttgtccatatccaccacttcctcaaagactgtggcggggtcgtttccgtggcaggcccagtcaatctttccaccttcaaccatcaggaagaaacccttgttactgcctttggtcaggaaagagatggcgctttcggtaatttcggccagcgtcaggtcgccttcctggcggtcgatggcatagggcaggcaagaaggctctgccccttctttctggataagaatcatcttgtccgcctggacagacttcgacttatattcgtcaaggcctcttgcaacggtataaccggcttcttcaaagatagggaagatgctcggagcctctttcttgtcggcagtggtagtcggtttcaagaaaccaccgcctgcatagaagtcgaaaccggctttcggcaggtcgagggctatctcgtaatacatgccacggtccggctgatgggcatagaatgcggcgggagtagcatggtctacactgacgctggtagttaccccaactttcttaccggactttttggctctctcggccacactctgaagcacactcttgttatcgtccataccaatggcgccgttgtaggtctttgcaccggtagccagggctgttccggcagcagaagagtcagtcaccgagttggtggcagaaaaggtagttgccatgctggcaaccgggaaagaagtgaacagcaaaggctttacaccgatgcgcccttcttgttcggccagatacatctccgtaccgttcacctggttcacacccattccatcaccgatgaaataaaacacgtacttcgcctgctgggcataggccatgccgctggtcagcagtacaaagaacaacacatacattaatcgtttcataagcagttcttatttaaagttattcggaaaattgcctttattgtttttaaccgagtaacaaagataaggattttaaaggattcggaaaacatttcgcccctacaaatacattacatatttgcaggggcgaaaccacatccggactccgggaagccggaaccgggaaatattacagcgatattacttcttcagaatatccatcgtgtccgaagcaatcatcagttcctcgtcagtgggaattaccaccaccttcacctgagaatcttcggtagagataaccatttcttcaccgcgtactttgttcttctcggcatccagctttatgcccatgaattccaggccttcacatgcaccccagcgggcacttgcctgattctcgccgacaccaccggtaaataccacgatatccacaccacccaaagcagcggcataggcaccgatatatttcttgatgcggtagaagtacatttcttcagccagaacagccttcggattgccggcagctacggcattttccaggtcgcgcatgtcactggattcaccgaagatacccagcacaccgctcttcttgttcagcaggttggagatgccgttggcatccagaccctctttctccatgatgaaggaaacggcaccggcatcaatatcaccactgcgggtacccatcatcagaccttccagcggggtcaagcccatgctggtgtctacacacttaccgtccttgatggcagtaatggaaccaccgttgccaatgtggcaagtgatgattttctttccttccggctctacacccaggaactcgcagacgcgctgcgatacgtagcggtgtgaggtcccgtggaaaccataacggcgtacgccgtacttttcataaagttcgtaaggcacggcatacagataggcatgcttcggcatggtctggtggaaagccgtatcgaacacaccaatctgcggaacattaggcagaatggcagatattgcatttacacccttcaggttagcaggattgtggagcggagccaggtcgttgcaggcagtgaaggcggcaagcacttccggcgtcagccgtacagactcgctgaacttttcgcctccatgcaccatacggtgacctacggcattgatttcgtccaaagacttgatggctccatattcagggcttgtcaaggtgttcaagataaattccacacctacggtatgctctggaatgtccttctcaagaactttcttctcgccactgggcaaggtgaacttcaggaaagagtccttcaaaccaattttttcgataccaccctgggcgataacttctttccggtccatatcaaacaatttgtatttgatggacgagctaccgcagttcaatactaagattttcatactatatatcagatttaaaagttattcagcattctttttggcagcaatggcctgattggcagtgatggcaatcatacgatacacatcctcgatggagcaaccgcgtgaaaggtcgttcaccggacgggcgataccttgtaggataggtcctacggcatcagcatgtcccagacgttgcaccagtttgtaggagatgttgcccacttcgaggctggggacaaccaatacgttagcatgtccggcgatagaagaacccggagccttgcttgcacctacttccggcactaaagctgcatcggcctgcaactcaccgtcgatggcaatatcgggagccatctccttggcaatcttcaatgcctcgaccactttatccaccacttcgtgcttggcagagcccttggtagagaagctcagcatggcaactttcgggtcgagaccggcaactgcctgggctgtacgtgccgtacatacggcaatctgtgccaattgttctgcatcgggcaccggagtcacagccacgtcacccatcaccaggataccgttctttccatattcaggagcatgtgtcagcagcagcatggcacccgaaacgcaagtgatgcccggggaagtcttgataatctgcaaagcagggcgaagtacattacccgtagtgttgcgtgcacctgccaactggccgtcagcgtcgccgttctttataatcaggcagcccagataaagcggatcgacaaccaacttgcgagcctcttcgatggtcatgcctttctttttgcggagctcgcaaagcagttgggcatattcttctttcttaggatggtcttccgggtcgataatggtagctttgtttatatttcccagcccccactctttggcacaagcctctatctcggcaggttttccaaggataatcaagtcggctactccgtcagtcaggatttgattggcagctttcagtgtacgctcttccgtaccctcgggaagaacaattcgttggcggtttgctttggcacgctcaacaatttcgttaattaatctttgcatgatattttaattgtctattaagaatcggcagtatgtgttattcacgccgcaaaagtacacaattttgcaatatctacattgcaaacatcggtctttttaccgttcagaccataattattataatatttaacattaggtattcccagcattcatgtgtacgcacacgtgcccctctgcaacaaacaattacccgtccggcaggaacaacccgcccgactctacaaacgacataaaaaaaatcaggatacaacgataacaagcaatacatagaatacctacctttgcagcgttttcaacgtataacaataggtattataataatatgattcgtcaatgcgccatccttttcggatgcttagctttgggtgaactgattgttttctttacgggtatcaagttaccttccagcatcatcggtatgctgttgctcaccctattcttgaaattgggttggattaaactgcactgggtgcagggtatgtccgacttcctggttgccaacctgggcttcttcttcgtaccgcccggtgtagctctcatgctttacttcgatgtcatcgcctccgagttctggccgatagtgaccgcttccataatcagcaccctgctggtgattgtagtcaccggatgggttcatcaactaacacgtaaaatcaaatgaactttttagaaaacgaatttttcctattggctgtcaccttcgggattttctttctggccaaactcctgcagaaaaagaccggcatcatgttgctgaaccccatcctgctgacaattgccatcctcattgtcttcctgaagatgacacatatcagttatgagacctacaatgaaggaggacatctgatagaattctggctgaaacccgctgttgtagccctgggagtccccctatacctccaattggaaacgattaagaaacagctgctccccatcatgctgtcacaacttgccggctgcattgtgggagttatctctgtcgtgctgatagctaaattgatgggggcttccgacgagattatctactccctggcgcccaagtcggtcactacgccgatagccatggaagtaaccaagtcgctgggcggcattccctcacttaccgccgccgtagtggtctgtgtaggcttgctgggaggaatactgggcttcaagaccatgaaactgacccacatcggcagtcctatggcacaaggcctttccttgggagccgccgcccacgcggtaggaacttccacagccatggacatcagccgcaaatacggcgcattcgccagcctcggcctgaccctgaacggtattttcactgcattgctgaccccaactattctgcgattattagggctactctaacaaaatcttcttatttttgttatctataatcataaccaactaaaaacaacgtatgatttcatttaaagatatcgaattacaagacaaagaactgattacttcctatacacagaacagtccgcgacggaattgtgacctctcattctccaacctatgcagctggcgttttctatacaatacaaagtttgccatcatggacggcttcctcctgctgaaattctgggcaaacgacgaactggtgtacatgatgccgataggtaacggagatttgacaaaagtactggacgcactggtcgaagacgcacaccgggaaggggaacctttctgcctgctaggaatatgttcgggcatgtgctcggaactggaagccttcatgcccggaaaattccagttcacagcagaccgggactatgccgattacctctatctgcgtacagacctcgccacgcttgccggaaagaaattccagtccaaacggaatcatgtcaacaaattcaaacgcacctataattacgaatatactcccatcactcccgaccgcatccaggaatgtctggacctggaagccgaatggtgtaaggccaacaattgcgaccagcatgaaggaacgggcaacgaacgtcgcgcactggtctacgccctccacaattttgaagaactgggattgaccggaggcatcctgcatgtagacggcaaaattgccgccttcactttcggaatgcccatcaaccaagataccttcggagtacatgtggaaaaggccgacaccagcatagacggagcgtacgcaatgattaactatgaatttgccaaccatatccccgaacaatatgtctacctcaaccgtgaagaggatttgggtattgaaggattgcgcaaggccaaactttcgtaccagcctgccattattctggaaaaatacgtggcatgcctgaaagatgaaccggtggaagctatcaaatggtgagagtaaggattagagattaaggattaaaaggataagggattgatgatacgggaaaaggtaaagaacttatggaagctctgtttcaatgatagcgaggaatttactgaactgtattttcggctccgctacaacaatgatatcaatattgccatccaaagcggcgaagaagtgattgccgccctacagatgttgccttatcctatgacgttcgaaggagaagatattcatacggcctatatatccggcgcctgcacacaccctgattaccgtaaccggggcgtaatgcacgagctgttatcacaagcctttgcacggatgctacacaataatgtcgccttatccaccctgataccggcagaaccgtggctgttcgactactatggccgtagcggttatgcccccgtattccgctatgccgaagagacctttatcgcttccggtacaccgacagccgatacgggccttactttggaaatgtctgccgaatatactgaaaaaagatatgaatatctcgaccggaaattgcgggagcgcccttgctgcatccagcatacggaagaggatttccaggttatcattgccgatttacaactgggacagggcttcgtttgcacattgagcaatggggaggaaatcacggctttggccattacctatccgatagggaaagccaactggcgcattggagaaatcgtgtcggatactcccgcaacaaaaactttactgcttcaacatatctgccaaagcctgaatctcccgtccatccgggttctcactcctcccgctaccggtgaaagccaacttctgggtatggcacgcatcatcaatgccaaaaccatgctgcaactctatgctacggcccatccggaactggaactcagcattcatctcaccgatgagcaggtcagtgccaataacggctactactacctgaacaatggtaaatatatgaatagtgccaagcgtctgccgggcagccacttggcacttacaatcggtgaactcaccgaaaaaatatttgcaacatcaagcccatatatgagcctgatgttgaactagcattataatccgctgaagtcgactccctcaaataccagcgaaggaatctgccatgaacggttcggttgagggtcattgcccacagcaaccaaggaattccataaagtaaccatgttacccgtcacattcatttcgttgacgggctgtgtcagcttgccgtcttcaataaggaaaccctctataccataagagaagtcaccggtactgctattgctgttaccgccattgaagcccgtaaccaagatgccttgtttaatatctgcaaccaatccgttcaggtccttatcgcccggtgtcagaattagacgtgaaggtgcactgatagtaggagctatatccatcttcttaccattgtaggtatcgatgaaataagttttcagcacgcctttgtcaaaaacagtgcggggttcggtagccacaccctcattatcgaaatagcgtgaaccgtttgcaccgatagcatgcggctcgtcacgcaacgtgaagaggtcggaagccactttcgtatccagcttatccatcaggaaggagttcttttgttgcaaagcactgccatacaatgcacttagcatcggactgagcaggtttcccacattcatagggtcaaccaccattgtatatttacccgactttgctttcttctgtcccagcttgcgcaatacgcgttccaatgccttggcaccgattcccgtcttcgtcaatttatcatagaacagagccgagtcgtaccagtaatcctgagggcgagcttcgccttctcccttaatggatacactggctgagacagagaaccaggtactcttcgactcaccttcaaatccgttgcttatcaaacgataggaagaaccctcgccatcactataagaagaatcaaccgaaatgatacgctcatccttgcccaatacctcctctgcagcagcacgtgcaatcgccactttatcatccgggttgacttcatagagtttcttgtcaaaaagctgcaagtcaggcttgcctcctttatagtagcgtgcagggtcggccagcatacgcgactcatccaccgccagatagcgggtagactctataccattcgtgataagagtttccaattctttcttatccagccgattggtggaaaaagagccgaaacgtccgtccacataaagattcaatcccaaaccattctccgtagactgctgcaaacggtccattttgccgtcacgcagttcaaaagaagaattagaatttgtatatagcaccagtttggctgcctggcaaccgttcttcaaggcatattccattgcccattgtgccaatttcttattgtcgtctgtaatcatgtctttaattgatagttgataattaactttctcctcctacagtcagcttgctgactagtgccgatggcataccgcaggtaacgggacaagactgaccgtctttaccacaggtccaagtaccgttgtcaatcttatcgttatttgccaccatcgtgatgtcagccaatgctttcggaccattaccgatgatatttatatccttgacgggctgcgtcaacttgccatcctcaatcaagtaacccgacttcacaaagaaggtaaagtctccggcaccgatttgcacctggccattggtaaactggtcacaatagatacctttcttcacggtggagataatgtccgcttccttcatattgccggcttccatataagtggcacgcatacgggggataggagtattacggaaagtatcgcgacgtccgtttccagtaggagccaccccataatgcttggcactgatgcggtcgtgcagataactggtcaggataccttccttcacgatataggttttctggccttccacaccctcatcgtcgaaattcacggctccacgattgaaagcgatggtaccgtcatccaccacgttgatatgctcatcgcacaccttctttcccaaaaggtcgcagaaaatggaagtacgtttacggttgaagtcagcctcaaaagcatgtcctatggcttcgtgcaacaagatacccgaaccgccagcccccatcacgacgggcatttcgccacctttgggtttcacagccttgaacaagatagcagtcttatccaccgcctcacgtgcaataatatccacgatgtcatccgtcatgaattcaaaacccttgcggtaagaacgaccggcataaccattctccatctttccattctcttccatgatgcagactgccataaaagaaaccatcggacggtagtcgtagtagctcacgccctcggaattacagaacagcacgtgcgatgtactgtcagaaagagaagcctgcaccttacgtacacgattgtccaaagagaaaatcttttcgttcagcttttctaaataaggtatttttgccttgacactcacgtcctcccaaggttcagtgacggcatagcggcttttggtaattgtcttttccgtcagtcctacagattttccggccttgcccgaagaggcgatacgggcagcagtacgtgcagcacgcagcatttcttccatagttaccccttccacataagcataccccgtctggtcgcctgccaatacgcgtacgcccataccgaagtcaatgttagctccacagttgtttactttgccgtccatcagaaccacactgttgttgaatgtgtgttcaaaataaaggtcggcataatcgccgcctttttccagagcggcagccatcactttcttcaagtcagcctccgtcacaccgaagtgaaccattgccgaagctacggcagactgattatctgctcctcccaaagctccgcgtactgacgcaggcatagccaacgagggtactgccagagaacctaacatcgccagacttcccgtccgtaagaaatttcgtctatccatccttttcagttattagttataagacattgttttttatatcatagttatatgacgtgaaaataggagattttgtcacacctcagctttcctttgttaacaaactttccaattcctctgcattcagacgcaggtagaattgtcctttgtaagccactgaaatgcctccggtctcctccgatacaatgatggcatgcgcatcagacacctgggaaatccccatggcagcacgatgcctcagccccagttccttaggaatgtccagattatgggaaacaggcaggatacatcccgccgccttgatacgtttcttactgataaccatcgctccatcgtgcaacggactgttcttaaagaaaatattctcaatcagacgttggtttatatcggcattgataatttcccccgtacgcaccacatcatccaaaggcagattatgttcaatgacaatcagggcaccaaccttctgcttccccatactgatacatgccattaccaccggcatgatgtcgtcatgttccaacttctctttcttattgccggtgaagaagcgtaccagcgcactggcatgctgatgcgagccgagtgtcagcaagaagcgtcgtatctcgtcctgaaacaaaatgataagcgccagcacgcccacactgaccagcttgtcgaagatggaaccgagcaatttcatttccagcacctgcgacaccaccagccatatcaggataaacaccaggatacccgtaaacacatttatagagccggaggctttcatcagcttatatgtatagtacagcaagaaagccactaacagaatatctataaaatcctttattccaaattcaaaaaacacgatattgaatgattaggggttagtgattagtgattatttcgcatggcttgcacaatccgtacggtttccacggcttctttcacgtcgtgtacgcggaggatgtcagcacctttcagcaaacaaatggtatcgagcaccgtagtaccattcagcgcctcctgaggagtaatgtccaacaagcggtatatcatcgatttacgtgaaacaccgaccagcaaaggcaactcgaaaatacggaactcttccagatgggacagcaattcatagttatgctccattgtctttccaaagccgaaaccggggtccagaatgatgtctttcacacctaagtcacgtaattgctgcaccttgcgcgcaaaatacaagaaaacctctttcagaagattgtcgtaatgaggatgctgctgcatactttgcggagtgccttgcatgtgcatcataatataaggtacgttcaatgccgcaacggtatggaacatatccgtatccatctcaccggccgcaatatcattgatgatggcaacaccatactcctccacacacattcttgccacatccgccctgaaagtgtctaccgacaccacagcatccggctgtatctcaaaaagtattttcaggcccatacgcaaccgttccatctcctccctggaggagacattgtcggcattgggacgggaagagtaagcgcctatgtcaataatggccgctccctccgaaactatctgtctcacccggcgtactatttccgcttctgtctgtgtacggctaccggcataaaaggaatcgggagtaacgttcagtatgcccatgacacgaggctgagagaggtcgagcagcgaaccgttgacatttatatatcgggcagttgtaatttccataagcagtctattctataatagtacctgcaaatgtaaacaaaaaagtggtttcaaaatacataaactcataaaactgataagttttttgcttgtacccgggaagggagaggattaaaactatatctttgcacgatggtttaccacagattacacagattcacacagattgatttaattataaagtcatggatataacagctatacatcagatattcctaacatgcaccagtgtcactactgacagccgtaactgcccccaaggctctttattcattgcgctgaaaggcgagtcgttcaacggaaatgcctttgccgcccgagcgctggaaagcggaagtgcttatgccatagtagatgaagaagcctatgcccccgcaggcgatacacgatacatcgtggtggaaaacagcttgaagaccttgcaacaacttgccaattaccaccgtcggcagatgcgtacacccatcatcggcattacgggtacaaacggaaagactactaccaaggaactgatgtccaccgtactttcgcaaactcacaacgtgctctataccttgggaaatttgaacaatcacatcggtgttcccctcaccttgcttcgcctgcgccctgaacacgaccttgccgtggtggaaatgggtgccagccacccgggagacatcaaggagctggtagagatagccgaacctgactacgggatcattaccaacgtaggaaaagcccatctggagggattcggctcttttgaaggaatcatcaagaccaaaggagagatgtacgactatctgcggacgcggaaagaagctaccatctttatccataacgacaacccctacttgaaaaagatagcctacggactccaccagattgcctacggcagtgaggacgggctgtacatcaacggacacgtcaccggcaattctccttacctcaccttcgagtggaaaacggacaacgaaagcaaatatcacgaagtacaaacccggcttatcggtgaatataacttccccaatgctctggcagctgtcaccatcggacatttttttggtgtggaaccggagaaaatagacaaggcactggccggatataccccgcaaaacaaccgttcacaactgaaaaaaacagcggacaacacactgattatcgatgcctataatgccaatcccacaagcatgatggcttccatcagcaacttccggaacatgcaggccgaaaacaaaatgctgatattgggagatatgcgggagttgggtaaagacagtgccgacgagcaccaaaagattgcagactatctggaagaatgcggattcaaggatgtagttcttgtaggggaattgtttgccgccacacgccacccttatcagagttatcccgatgtgaccgcactcatcgcagagctgcaaagggagaaaccttgtgggaaaactattctgataaaagggtcgaacggcatcaagctaagttccacagttgaatacttataatcctatttcatccttggccttaaaataaaatagccgaccattgatgcaagcaccgctcccgtggtattggccgcaaaatccagccagtctccgccacggtatgtcgtgcagtattcttgcagcaactccaccattccgctgaacaaaacgggacagacaaacgcccctgcccatgcatgccataaaggggcgttgtctctccggtgagcgcgaagaaactccagccacagcattcctgacatgccgaaatacatacagatatgcaccaccttgtctatattgggaatcttgcttatttctgtagaaggcggtttaaagaatgaaagataaatcaccgtcagaataataaaaagcgacaccggatatttcttaatataatatagcatataccaaattatcaacgaactgtgcgcaaaagtacagaacattttctatatttgcatgttttagctggtattaataacgaattgaaagaaaaatctacgttttatgacaaaaagtgacagagccaacttcggaagcaaattaggcgtcatacttgcctcggcaggctccgcagtcggtttaggcaatatctggcgtttcccgtttgagaccgggaatcacggaggtgcggcatttatccttgtatacctggtttgcgtgctcattctcggcatccccatcatgattgcagaattcctcatcggcaggcgctcgcgtgccaatacggcaagggcttatcagaaattggcacccggcacgcattggcgctgggtaggacgtatgggcgtactggccggattccttattctgggatattactccgttgtggcaggatggacgcttgagtttatcggcgaagcggctaccaacagttttgccgggaagtcggcagccgatttcatcgcatccttcaacagctttgtcagcaacccctggcgtccggtcatctggctggtgctgttcctgctggccacccatctcatcattgtcaaaggagtggaaaaaggtattgaaaaatcagccaaaatcatgatgccgatgctatttgtcctattgataatccttgccatctgctccatatccctgcccggagcaggagcaggcattgaattcctgttgaaaccggacttcagcaaagtggacggcaatgtgttccttggagccatgggccaggcatttttctccttgagcttggggatgggatgtctctgtacatacgcttcttacttccgcaatgatacgaacctgcccaaaacggcactcaacgtggcggctatcgacaccatggtagccattttggcaggattcatcatcttccctgccgccttctctgtaggcatcaaaccggatgcgggtcctagtctgctattcatcaccttacctaatgtctttcagcaagcgttcggcaatattccctggctggcggtactgctgtctctgatgttctatatcctactggcattggcagcacttacttccaccatttccctgcacgaagtggtaaccgcctatctacatgaagagttcaagttctcacgcagcaaggcagccagatacgtgacagcaggctgtattttcgtaggagtattctgctcactgtctctcggtatcggcaagagctataccgcattcggattaaacctattcgatttgttcgactttgtaacggccaagctaatgctaccgttaggcggtttcttcatttccatcttcataggctggtatctggacaagaaaatcgtatgggaagaagtcagcaacaatggcactctgaaagtatccgtctacaagctattgatattcatcctgaaatatattgctccgataggaattgcactgatttttatcaatgaactgggttttctgaaataggtcatcatgcagaacccctttaaagaattcctttatttctcccggggagaaaggcgcggaatactggttttgattaccggcattattctcgtctttctctccgggtatatttatatataccaaagagagaaccgccccctttccgatgaagcaatccggcggcaggccactgccatggcagaatacgaatcgttcatcgcatccatacaagaaaaggaacaaaaatgggacaacagacttaaaccttcctcccaaaaacaaccgacaaccgtctccttggcccgtttcaatcccaataccgccgactccgtcattttttgccgactgggactgcccggatggatggcgcggaacatactccgctaccgtagtaaaggagggaagttccataaagcagaagatttccggaaaatatatggaatgacagaaaaacaatatcagacactcttaccctatatccacatcactccgaaagacacagaaacaagaaccgtccagttgtacagctctcctgcaagcaatgacagcgccgttactttccgaattgcaccggaaaaatatccgtctgggacccttgtcgacctaaaccgcgccgacaccacagaactgaagaaaataccaggcatcggtagtggcattgcccgtctaatcatcggttatcggcaacgcttgggaggattctacaacatcacgcaattacaagaaatccatttggacaccacccaattgcagtcctggttttccatcgacacccgggccatccacctcatcaacctgaaccgtagtagcatagagaggctgcgtaaccatccttacatcaacttctaccaggcaaaggcctttgtagaataccggaagaagaaaggcgaccttcatagtctgaaaccttttgcactttacgaggaattctccgataccgatttggagaaaatcagtcactacgtttgctttgaataacagcatcatgcaacatttttcaatgtctgatgcaaccttttcaccagtcatttcgtctaacaagcagaaacaccctaaaaacaggaaggcctactgcaataaggattagaaccatcgtatcaatatgaaaaaattaatgattataaccatgctgctgggcagtatggcacagaatgcttttgctcaaaaaatagaaataaaaggaaccgtccgcgatgcttccgacaagagtatagagtatgtcaatgtggtattacagaccatcgactctacttttgtcgccggtgtgaccacaagtccagaaggagaattcatcttcaagaacacggctgccggagattacagacttgttctttccagcatcgggtataataccggatacatcaccctcaatggagtaaagcgccataccgaccttggaccaatcgtattagacagtgcttctatcgcactggaaggagtgactatcaccggctccagccaaatcagccgtgccgaccgtaaactggttttcccatccgaaagacaaatgaaaacttccacaaacggagtgaatctgttgcaggaactgatgctgccacgtattctggtcaaccccatgaacaatgagattggattgtccggcggtggagaactgcaattacgcatcaatggagtcaaagccgaaatagacgagataaaagccattcgccctgccgacattatacgtatagagtaccatgacaatccgggactgcgctacggtaatgccgaagtcgttttggactacatagtgcgccgtcccgaaacgggcggaaacttcggtgccgacatttcccaaggattgaacacgatgtggggaaactataatctgtacggcaaagtaaaccataaaaaatcagaattcggcttctcctactacatgggaccgcgggattttaacggcatgtaccgcgacaatgaagaagaattccacctggcagacggcactacactcagacgcctggagaaaggagagcccagcaaggcaaccatgtgccagcacaacctaaacgtaaattatagtttgcaggcttctgagaattcccttttcagcgccaccttccgccttcgaggaaacaatcagccacactgggattataaaggaactctctataatgccaatgatgaaacggacgtggtagacatgaccgaccgtaccgaccagagctggacacgtccctcactggatttgtactaccaacagaatctgaaaaacaagcaaaccctggtattcaatgtagtaggcacctataatcgggaaaaatcgcagcggctctaccaagaaagcaccccggggaacatattgaccgatattgacaacaatatccgaggcaacaaatactccctgattgccgaggccatttatgagaagcaatattccaaggggaacgcattgagcttcggtctgagccatacacagtcctactctaacaatgaatacagaaacgggcattattatgaaaccaatatgcaccaagagaacacatacatattcggagaataccgtggaaagatagacaaactaaactaccggctgggagtggccatgactcgtttctactataatcagagcggcaaggacaaatctaccgagaactacagtttcaacccgagtatcgttctgcactatgccatgtcagacaactcctacctccgctggaagggaaacatctataacgcttctccttcattgggcgacctcagcgatgtggagcaagcagtggactcattccagatacgtcgtggcaacccgcatctgaaatcatatatgtgctatcatacggaactgacttacgaatggaaaaaaggcatcttttataccaatctatggggagcctatgactatcgtcccaatgccattatggacgagaagattcaagaaggcaacaaaatagtgcagacttgggacaatcagaaggattggcagaaactctccgggcgtgccatgctccgcgtaggacccatccgcgacattctgcaattttcttttacgggcggtgtcaaccattacatgagccatggcaatcactactcgcatacctacaccaactggttttgtgaggcagaagcctcattaaactacaaacagttctctctgttctggcagataaacaccaattggaacaatttctggggagaaaccctctcgggaggagaaaacatccagatgttagctgtatattacaagcataagaatcttcgggtaggagtcggtgcattcaatcctttcaccgacaactataaagtacaaagcgaaaactggaataaattcgcatcctacaagacaaataattatataaaagaaagctcccgcatgttcctggtgaacttttcctacaacttctcgttcggccgcagtttcaagacagcacagcggaaggtaaacaacagtgacaatgactcgggagtaatgggcacggggaaataggctcagaccattttattgatttccccgtcaatcagatgtatcgtccggtcggtgagctgcgccagtccttcatcatgggttacgataacaaacgtttgtccgaaacggttacgtaaatcaaaaaagagctggtgcagttcttccttattatgggtatccaagctgccggaaggttcatctgccagcaccactgctggatgattgatgagagcacgggccaccgccacacgctgcttctcacctcccgacaactcattcggcttgtgggaggcccgttcggcaagccccatgaattcaagaatttccgtagccgcctccttggcttcctgctgtcctcttccggcaatgaaggctggtatcattacattctccaaagccgtaaactccggcagcagttgatggaactggaacacaaagccgatatggcggttgcggaatgcggaaagttccttctccctcatacggttgacttgtgtaccgtcaataaccaccgaaccgccatccggcatatccaacgtacccatgatttgcagcaaggtagttttacccgctccactggggcctacaatgctgacaatctcccctttctctatctccaggtcaataccccgcaacacttgcaggttaccgaaactcttcgttatattctctaaatgaatcactaggctatttacaatttgacaatttactatttactatttgatagttttctttcaagtgctattactatagtcttttaattacatattcggccaaatagcagccaaaaactgcgggcatgtagctcactgttccacaggtggacttcttgttcatctcgtcgtccgtcagcaaaacggcattcggatcagcctgttcggtgctgaaaacaactggaagtttccgctttatgcccattttttgcagacgcttacgcacagccttgctcaacccgcaatgataggtatcccagatatcggcaaagcgcacttgcgaaatgtcactctttgctcctgcccccatgctggacactatcttgatatgccgcttcatgctttccgctatcaagtggcattttggagcaagcgtatcgatggcatccaccacaaagtcataagccgcatcatccagcagttccggtatgttctcatctttcaagaatacgggcaacactctcagttccagagccggattaatgtccctgaaacgtgatgccaatatctccgccttcttttgccccagggtagaatgcagagccggcaactgacggtttatattcgtaggctgcacggtatcggcatcgacaatcgtcatccgccccactccggcacggcatatcatctcggccgcataagcacctacaccacccagtcctacgacaagtacatgtgcccggcgcaggcgttccattttttcatctcctaataaaagttgcgttcgttgttgccaatcttccattttcaccacagattacacggatttacacagatttttgtcaattatcaattgtcaatcgtcaattcttcttgaaccatttatagaaccatttgcctaccttctcgtagtgctgcgactcgttgttgccacgcgggttggagaaggataccgcatcctgcggctcgcccagttggtcgggatagagtactatcaggctgttatttgcaaagtacttgctgatttgtgccggtagcttctcgaaggagctgtcataggagatggagccgcggcgggcgctgatgatgaccagcagatggtcgaaattcacttgtccggtcagtatcagcaggtctccccagtcgtccaggcgggaaaagtctgtcaatgtctgtccatatttggctttcaccagcccttgaagatgggcggtagtctcttcattggcataaaaatgcacccgacagcccaaagtactccccaaccggcagaaatgttccacccacttcaggaatcccgcctcatactcggctttcggaggtaccgccacaatcacccgcctaattgtgttaatgggcatcaggaacttggaaaccatcacctcgcgatgcaagcccttcagcagattctccgtcagcataccgaagaatgaatccacaatattgactttacggtgcagacctataatgacatccgttgccgcatattcttttgctgtatggataatgcccgaagcgatattcaagtcgtaacgcgtgatttgcctcaacggcacatctgccgaggccgttatcatggcagccttttccagatagcgtttcccgcgtagttcggcactttcagagctactatcatcgttgatgacattcagtgccaacagattatcccgttgcttcgggtcgcgtatcaccaaagaaagatttatcaagtcttcaatcgtatcggggttggctatcggaatcaatatcttctccgcttccacggagcggttttcttccagatgcgcctcctccatggcaatcttccgtgcggcacgctccgtaatgaacgagctcacaatgcaagttacaagaatcagcaggacggtaccattcaaaacatcatcgttcagcaagcgttccccattgggcagaatgatgttgtaccccaccaacacagccgccagcgttgccgctgcttgtgcattgctcaatccgtacatcagctcccgttcaatccctcccatcttatatattttctgcgtcagccagcaggcaatccatttacctgccaatgccaccacaatcattacagccgctactttcagagcatcgccatgaccgaaaatcacatgcacatcaatcagcatacccacgcctatcaggaaatagggaataaacaaggcgttgcccacaaactccagatggttcatcagcggagagacatgcggaatcagccggttcaataccaaacctgcaaggaaagcacccaggataccttccatccccacaaactccatcaatccggctccgagaaaaaccatggcaagcacgaatatgaactgcatcacgttgtcatcgtacctccggaagaaccaacgacctatgcgtggaaacagatatacaatcaaaatacccaggaagataacctttatgacaagccatacccaaaagaagccgtccgactcccccttgaacataccacccacaacggccagaaccaacaaagtgagtgtatccgtaaccgccgtcccccccactgcaatactcacactgcgatgccgcgacacaccgtaacgaatcacgatgggataggccaccagcgtatgtgacgcatacatacttgccagtaggacagaggtcagcaccccgtacttcaacaaagctatattcgttaccaagcctatgcctatgggcacaataaaagccaagagccccagaacaagcgctttgccccggttctgtttgaagtctcccatattcatttccagaccggcaaggaacataatgtaatacaagcctactttgccgaaaagctcaaaactgctatcacgcaccaagatattgaaaccatgctccccaatgacaagccccgccagtatcattccgataatgtgcggaatacgaagcttattcaacaatatgggagcaaacaatataatgaggagtacaaggaggaatatccatgtagggtcggtgatgggaagtttcaagctgaagtcaaaccaatccataggctataagttttaggttttgaatgcaaaataacgaaaaacttttcactttatgcggtgttatacagcattttgttataaatttgcgaccaattctatctttttagagatagtatttcacttttttataaacttaatttaaaacaaaagaaaaatgaaagtagctattgttggagcaagcggagccgtgggacaagagttcctgcgagtgctcgatgaaagaaatttcccgttggacgagttagtattgttcggttctaaacgcagtgccggaaccaaatataccttccgcggtaaacagatcgaggtgaaactcttgcaacacaatgatgactttaaaggggttgatatcgctttcacttccgcaggcgcaggcacctccaaagaatttgccgaaaccattaccaagtacggagcagtgatgattgacaattccagcgcttaccgtatgaacgacaatgtacctttggtagtgcccgaagtgaatgccgccgacgccaaagaacgtcctctcggtatcattgccaaccctaactgtacgactatccaaatggtagtggcactgaaagccatcgaacagctttcccatataaagaccgtacacgtttctacctatcaggctgccagtggtgcgggcgccgctgccatggatgagttgtacgagcagtaccgccaggtattggcaggcgaacccgtaaccgttgagaaattcgcttaccagctggcattcaacctcattccgcaaatcgacatattcaccgacaacggttataccaaagaggagatgaagatgttcaacgagacccgcaagattatgcactctgatgtaaaagtcagcgctacctgcgtacgtgttcccgctctccgctcccactccgaaagtatctgggtagagaccgagcgtcctatctccatcgaagaagcccgtgaagcatttgccaaaggcgacggactagtgttgatggacaacccggcagaaaaggaataccccatgccgttgttcctcgcgggcaaagacccggtttacgtaggtcgtatccgtaaggacctcagcaacgaaaacggattgacgttctggattgtgggcgaccagattaagaaaggcgctgcactgaatgccgtgcagattgcagaatacctgattaaggaaaaggcactgtaagttcgaggattaccacataaaattatttgagggtactgaaagtataaattattcatattttcagtaccctcaaaaatttctcactacttgagcaatctccgtctataatttcacaaggctcatcatgggagcggattcattatgtaaacggtcaagagctgtcactacataacgatattccgtttccccatctttataaggcaatctataaaagttgtcgcatacgatggatacaatatttaaaggatcatcaagatctattttttcattggaagtaaaacgataaaccacatattgcacagcgcgatccatttcactcttatacttcggctcatgccactgaagcatatattcaccgttcacccacaaagctgtgagtttgcgcacttttcccggtgcttggttatctataaaagtaaacacgggtggcaatgcaggatacttatgatactcccgtttcaaacgttcacgatacccagctgtatctgccagtaaagtaaaagccgaccattgacaactacctcctatctcgggaaaagaacgctgtaacatcatcttacaccccagctgactaaaggccggattattggggtcaacatttcgtactgaattttccaccgattgccctatgaacaaaggacgctcttctgcatgtctcgcccaccattctacgagttctttataatctgcccgcggatgccctatttcccagtaaagctgaggaatattataatccacccaaccctcacgaagccataaaagcacatcagcatacaaatcatcatagttttgaagactacccgtcctactaccgagtggatcagtagtagcattccgataaatggcaaacggagagataccaaacttcacccacggtttaatctcccgtatagttttatgtactttttcaatcagcaaatttacattattacgcctccaatctcctttatcggtaaaattctcaccataacgaataaagctctcattatctgggaaatcttgtcccttaatcggataaggataaaaataatcatccatgtggatagcatctatatcataacgcctcacaatatcacccacaaccctacatatatgctcgcgactttcaggcaacgctggatcaaaaaaaagttggtcaccgtaaacaacaaaccactctggatgccgattatagatgtgtgtagatgccaattcatcatccaacttattctttacccgataaggattaatccaggcatgaaactccatagccctccgatgacattcctcgatcataaagcgcataggatcccattccggttccggctttttcccttgctccccagtgaggaaacggctccatggctctaactccgaagaataaaatgtatccgcttccgggcgaacctgaaaaataacagcattcatgccaacctgccgcagagaatccaacataacaagcaaagtatcctgcaactgcctcgtaggcatatcacgaaaatgcccatgtactgtttgtatccatgctgccctaaattcacgcttaggatgtaaagatgaggaaagtgactgcgcttgtatggataaaacgaaaagacaaacgcccccaaataaaaggatcctttttaatcgcatttctgactatttttttataattagaacaaaagggtgtacctcaaatgaagacacaccctcgtttattcaacaattaaaataactttgtcaccaacctggattctgagtcaatacctgacctttattctcataaatagtcaactgtgcagccggtatggcacgcaaatagtagcgttccgaattcaattcaccagccttgaatatacgaagttccttttcacgaagataataaatataccctttttcagtatcctcattacccggattctccgggtcgaacagatagagcactctcttgccggaatcatcttttgaagatatttccggataatcggccatattgacataagcacccaggaaagacatggcaggataaccatttgcatcttctgagtttaagtattcaaacttggcccaacgacggaggtcttcaccacgacggccttccataatcaactcaatacgacgctcacgacggatttcccacaaaaccggattgacatcagggtcacgggcagggtcattgataacaactccattcacactcaagttgccgccattcagttgaactttcggcattgtcttggcttcagtatctccccacttcgtcagctgacggtcacggagttcattgatagacttgtcaaggtcactctgagtgaaagcgttaccacccacttgggcaatctcataacgcgcctctacatagttcagcaatacttccgcatagcggatgcacggcgcatcagccggacttaatctaccggtacaataatccagaccagccacccaccactcgtcgttcaagaactttttggtaggatatcccgttggtgatgtaccttcggtataatttgtccccatggcgctcatgatacgaagactgtcggcaactgtttgatacaaacgcgggtcacggtcttgaaatgacttctgaatactcgggtcttccttaccttgatacagcggagactgacctatcggcaaaccgtcactacaaagataagtgttgattacatcttgcgtcacaccaccctgagtctgatcttccggaccattgtaggacatcaaagcattacactgcaaaccgcttgtatattcacgataccagatgacttccggattgttagccaaatcgtccgtagtaaacaaagcattataggtattgcctattgaatagataccagagttcatcactacctctgcaccattaatggctccttgcagcaagttcttaatatcaccatccgccaccttctctgaagtaggacctacagtagtaccgtgatacttcagccatgtggcatgatacagcatttcgcgtgacatatacgcaccaaccacatatttgttgacttggcgcttcgtatcatccgtacgtacattatccaatgcatattgaaaatcctcttgtatcttctgcgctacatacaaataagaatcacggtctttataaagagccgggtctgccgggtctgtcaccttatcgtagtaaggaacaccgccataatactttgccagcgtactataggccattgcacggaaatagcgtgcaataccttcccagtgtctcttggcttcgtccgaaatattcattccgggaatcttctcaagcatgacattggctttataaataacactataattgcccgaccaagttcctgtctggctattccagtccgtagtggcagaagtggagaaataaatatatcctgaaccgtttgtatttgcattattcagattgataaaatcatccgtatagtcatctccagagaaataaccggcaaaaacagtatagtcggtaccatatcctgtaaagtaggaagaatagaagtcttgcgcataagtacgcaaagaagtttcagtctgccaataagtgtcattggtctgcttgtcctgcgggtctttattcaaaaaatcgtcgcaaccgcagagcgagcccattgccaacgcacaaacgatgtataataaatttttctttttcataactgcaattactattagattataaactaagctgaataccgaacgacactgtcttctggtatggatagctacggccaaagttacgctggtcactcttaccactggccgtacgtattcctatttccggatcgatagcaggtttcacaccgtcgatggtgaaaaggttttcaccagtgaaataaacacgcaaaccttgcactttgaatttactcaaccaaaccttaggaagagaatatcctacagtaaacgtcttcagacgcagataagccatattcagcaaatagcggtcattcacgctatagttacccgaagcagactgcttgtaatccatcggacggggatagaaagcatctgtgttttcgggagtccaataatcctcagcacctttgtagaagggttcaccggtagtaaagcctggtaatacctggttacctgccgcccaaagttttcttttggctaccccctggaagaacatgcttatatcaaagcctttccaagcagcatccagattcaaaccaaactgtaaacgcggcagggcgttacctataacactaaggtcacccttgtcatttgtattggtctgttttacgatttcaccgttgttgtcgaggtctttataaagcacatcaccgggagcaaattgataaccggcagggaatactttagtctggtcgggcaaaccggctttcaaagaaccgtcagcattaaagtcatcttccgtcaagaaacggtcgaactgcaagccccagatatctcccaaaaccataccttctttataagcactcttatcccaccagccggtagctccataagaaggaatctttgtattatacgtccacttggttacttcagtcttgtcatcggcaacagaagccgtcacgccaaagtgcagaccattcttgaaggtatggcgatagtcaatggcaagttcccatcctttggtctggatagtacccatattttcatatggagcgtcagcacccaatgtggcaggtaggttggcagtagtcaaaatatcactggtagtacggttataccaatcaaacgttactcccaaagcgtcattgaagaaacgggcatccaagccaaggtcaagtgtagtaaccttctcccaagtaagggttgaagacacaatagtcggtttttgtgttgactgtactttctttccatcgataatccaactgtctacagaagtggacagagtggagatataacggtcggtacctacatcctggttaccaatcataccccaagagccgcgaatcttcaacgtactcagataaggcttcagtgactgcatgaacggttcttcagaaatacggtaaccggcagacatggatgggaagaaaccgaaacgattcccagaggggaaacgggaggaaccgtcataacggccgttcagttccaacatatatcggtctttataagaataattaagacgtccgaagaagcctgctacagaccaccaagtatgcgaggagcttgtagtctggtcacctgtagccagattcaattccggttttgcggggtcgagcagacctttgcgttgcgcccagtaatattcatattcgctcttttcaaggctggaacctgccattgccttaaaatcatgatctccccagcgtttggcataagttgccacgaaattggctgtcagattctccgtgcgtccggtttcctgatatacataatcataagtagcagcagatagataactgccataagaatcacgtaatgcctcaacagacggacgggcagtgaagatttcataaccactggtcaagctcggtgtaccatacttcttatagcgattttccacgctgctataagcaacatctatatccagtgttaaatctttgataggcttgatagttgcaccacctgtcaaacgcagatactcacgttcttttgtggtaataggagcacttttctgttcggtcaaggcgttacggaactccttgccttcaaaagtaccgtaaggcatcatcggctgccaacgatacagatagtacatcgggtcgtaaagatcagtattatagttgaatggcttgtcgtagtcagaacgggtgaacatgacacctgtacggatagacacatatttgtttaattcagagttcaaagagatattggcattgtaacgcttatagttgtccgaattgactttcatcataccatcctggctcagatatcccaaagcgatattgtaattagtctttccgttgccaccgttgatagaaaggctatggttctgctgcggagcccagtccttgatgtattcatcataccagtcccaagtacggataaagaacataccgccatcgcggaactcaaagtcacgacccaattccatctcacgaccaaactggtcaccatagccatatttgtcccagtaatccttcattttctgcacatgtgtagcatccacacgcatattacccactacgttataaaatgcggtagaccccttagtctgattgattacaccttgcaagttaatatcagcctgctgccatcccggaagttgttcgggtgtcttggtcggcgtacgccatgcaaagttattggtatattttacagagagacgttcatgtttacttcttgattttgtggtaatcagcaatacgccaaatgcaccacgggcaccgtaaatagaagcagaagcggcgtctttcaatacagaaatactttcaatatcgtccggattcaccatagaaatatccgttacttccacattatctaccagaatcaacggtttggagtcaccattcggagaaccgatactaccacgaatcttgatagtaggcgcaccacctatctcaccggagttagtagtaatggtcaatcccggtaccgccccctgcaaggcacggcctatatccgtgataggacggctatcaattgttttgttcacatccacggaagccaccgcaccggtcaggttcacctttttctgtgcaccataacctactacgacaacttcatccaacaattccgtatcatctttcaaaacaaccttcattaccgaagttgccttgacttcttgagtagtatatcccacaaatgatacttgcagaatagcaccgggctttacatttaatttggaaactccatccaaatccgtaataccaccattggtcgtacctttctcaatgacattggcgccaataataggttcaccttttgtatctacaactgtgacagtcacagagatagattgcatctgttcttgtactccttgtgagtcgttggatgctgtttgggcagccatcacgttgccactgcctaaaaacagagcacagattgccaccgccgtaaagaacttaccattggcaagtcctcgttttttgcgatcttcattcataagtgattgatgattttgttaattaaaccagtttttcaaaattagggtaagggaatcatatagttcggattagtcagactatttccgaaggcttctttaatttctcataggcgttttctttatttaaaggttcacatttttatattatctctcttttttctatttatttaccaagtccagatggaacttagttatatattatacaaggttaaaatcttgttaattacttaactctattggttgttttaagagataaaaaactcgttattaacaaaggtgagaaatgattcattcatttcgtcctaacaaagatacattattatttaatatcaagaacattcctttgcatttatttaactttatatttatacatttgcaaaaaggaagttatacaccttattatataaagaatttaaggttcttctatatttaaagaatggaattcaatcaagccattcattggtgtttcttcaatgatttccagttcgatgccaaattcacgggcaacttcccgcaaaatggccgcgtagctgtaagccaatgaacccacaaaacgaataggataatttttgtagtcatattggcagacattacgagtaaagaaatttctcagattaccggtaatcagctcaaatacatagtcatcattggtataatcagccaaaaaataagatatagtagacaaaaagcgattggggaacgggcggttatacacagattccataacctcattcggacttatacggaacttctcaaagaaatccgccgttacatctttaggagccaaacctttcagtacatcagacaaaaacattttgcccaatacagcaccactaccctcatcccccagaatgtaacctcctgcccggacattctttacaacgattttcccatcataaaaacatgagtttgagccggttcccaaaatacaagcaatgccggcctcgcatttgaacaagccacgtgcagctgccagcaaatcactctctacctgaattggagttttgaattgtgctaccaatgaagctcccaatacatttttcttttcataagaagtacatccggcaccataataatagacttgttccaatttccttttgaaaaaatgctcgggtaatcctaaccgcacacttcggctaatctctcttctcgtttgaaagaaaggatttaagccctctgtgaaggctcgctgtatcagacgattatcttcaaccagcgcccattctgttctcgtagaaccactttctgcaattagtttcataggtagttagttttagaattgaatacaaatatatagctttttttaatctttccaaggctatttcaagaaaaaatcattttactggccatacatctcccttttgctcatatcctcaatcatccaacaaagtattcccacttttccaacgcaaccgcgttttagtcaaaacaagacgataacagactaacaataagatactatctgactgaattccaagttccatctgaacttagcaaacaaataggaaaacaagagataatataaagttatgaacctttaaaaagagaaaatgcctatggaaaaagaaacaatcctgcaagttgaatagtctcactattcggcccttattacccttaccctaaatttaagaagtatttaattaacaacaaatcatcaatcatttatgaatgaagatcacaaaaaacgaggactaacacatagcaaactcctcacagcagtggcaatcagctcactgttattaagtagcggcaacgtgatggctgcccaaacagcatccaacgactcacaaggagtacaagaacagatgcaatctatctctgtgactgtcacagttgtagatacaaaaggtgaacctattattggcgccaatgtcattgagaaagggactaccaacggcggaattaccgacctaaacggtaagtttacattgaccataacaccgggagcaacactaaaaatatcatttgtgggctatcagacacaagaagtgaaggcagccaaaacgatgagaataactctgaaagaagataccgagatgctggatgaagtagtagtagtaggctacggtgtacaaaagaaggctaacttgacaggagcagtttctacagtggacttaaacaagacaatggcaggtcgtccacaacaagatgtagccaaagcattgcaaggggctgttccgggactaagcattctcaccacaagtggtgccatcgacgagacagcctccatgcgtatacgtggtttggggacattgagtaatggagaagtcagcaatccactcattgtagtggacggcgttccgatggatgacatttctttcctcgatacgcaagacatcgaaaatatttccgtactgaaggacgcttccgcttcctccatttatggaacgcgcgccgctttcggtgtgattctaatcaataccaagagcgcaaagcctagcgaaaaggttaccatcaattacagcaacaattttgcatgggatcaagctacttacctgccggactatcccgatgtacccacacaattaaagatgggtatcgaagccagtatgaacggtggtgccggtatgcctgaattgttcggtatgtatttcgacaaattgttaccttacgccgaaaagtggcagcaacagaacggcggcaagaccggctaccgtcctatgaacctctaccaaagcgatagtaacgtgggtgactatatcgtattggacggcactcctttttattatgctgactgggatgtacaggacatctacttcaacaaagctgctccttccatgagccacaatgtttctatacaaggaacatctggtaagaccaattactacctatctttcggctacaacgaaaagcaaggacagatgaagattcacccggacgaactaaaaaagtacaatgcctcagtcaatgtcaccactaatgtttacgactggctacaggtgggtgcacgcatcaactatagtcgtaagaactataaacgcccggacacatgggccaacacctaccaatatttgtggcgttggggttcttatttcattccttcgggcacaatcgacggctatgacacacgcgtcatggccatgcagaagcaagctgccgatcgtgaagtgacaacagacctgacccgtatgaacaccttcttgaaagctgaaatcgttaaaggactgacccttaatgcagactttacatatgccattcagaatatgaacagcggttcgcaggacaactccgtttacggcatcaattggagcgggaaaccggtaccctcttacatcgtcactaaaggcaatagcggtatctggagagacttttccaaacagaacacatggacggccaacgcatacgtaaactataccaaaacatttgccaaaaaacacaacctgaatgtaatggcaggtgtcaacgcagaagaagaggaatacaaatatctgtatggtacccgcaatgtgatgtacgatcaagagggataccccgaactgaatatggctggcaaggatggacaagatttgagttggaatcatacatcccgcgcttctgccggttatttcggccgtatcaattatgactacaaaggcatttatttattggaactgaacggacgttacgacggttcttcccgtttcccccataccgaccagtgggccttcttcccttctgcatccatcggctaccgcttctccgaagaagcctacttcgccccactgaaacatattgtcagcaatggtaagttgcgtgcttcttttggcgaaatcggcaacgaggctgtgggcgactacatgttcgaacaattaataagccaacggttgaacaataaaagtaccggctatatctattggattgaaaacaataatgccaacgctaatctcctgaccatgtataacatgccggatttggtatcaagtactttgacctgggagcgtatccgcaccctcaatataggtcttgacctgggtctcttgaatgacgaactgactataggtttcgactggttccaacgtgagaatcgtgacatgctggcaccggcacaagtattgccgaacactctgggtgcttctgctccttatgaaaatgccggtaccttacgtacacgtggatgggagttgaacttgaactggcgccataccttcggcgacttcgacgtatatgccaacttcaacatcggtgactccaagactaaagtaacaaagtgggacaatgattccaaactgctcagcacctattacaccggtaaaacctacggtgacattttcggttttgaaaccgaccgttacttcgaggaaaaagacttcaccagccaaaatgcagacggctcatggaattatgcaaacggcattgcaagccaggcaggactggaatccggtaatttccattacggcccgggagacgtcaagttcaaggatttggacggcaatggcaagattgacggtggaaaaggcacagcagacgaccacggcgatttgaaagtcatcggaaactctatgccacgctacgaatacagcttccatttaggcggagcgtggaaaggtatcgaccttgacctctacttccaaggtgtaggcaaacgtgaggactggacgacttcttccctaaaccttcccgccatggtacatgccgacgtagccatctattcccaccaaacaagctataacaaagtgctttggaattcagactataccgccattaccggttatgaggtaaatcaaggcaaccgttatccacgtctttatcgtggtacaaataatagtggaggtaccgtatccggtatagctaacggctgcaacaactactatccccaatcccgctatttgacagacatgtcctatcttcgtctgaagaacgtaactgtgggatatacccttccgaaagagtggacacgcaaagcctacattgagaaagcacgtatctacttcagtggcagcaacctctttctgctccacaaagggaatgaccttccagtcgaccccgaaatcagtacaggcaatggacttacagctggtggatggggacgtatagctcctattacacgcacattctcatttggagtccaggtaacattataacaacctcaaaaacttaagaacaatgaagaaattatttatatatggggtcacagcgctggcgatgttaaccggttgcaacgatttgctggacaaatcccccttggataccttcacgaatactccggcatactggagcaacaccgataatttggataatcagtgcaatactttttataacaactttaccggctttggcaacggagccagtggaggatggttctacttcaaaacaataagcgatgaccaggtagatgcagaaagccataactggacttacactaacgtggtcgcatcttccacaaactggtcagcccctttcacagaaatccgacgcgccaactatatcattgccggtgtacagtcttcctctcttgatgaagcaacaaaggcccactatgaaggtcttgcacgcatgaaccgtgcgtgggaatactatcagttggtccgtatgtacggcgatgttcaatggatagacaaagttatcgacccagccgacaacgaagccctctacggaccacgcaccgaccgggatgaagtgatggaccatgtgctggcagacatcaattatgcgtgcgaacacattaccgcaaacagcaatcggcaacgtttcagcaccgacatggcatatgccatgaaagcagacatcaccttatatgaaggtacatactgcaaatatcgcactcaagcagagaatggcaaagccgctgatgagagccgcgccaacaaatacttgcaagaatgtgtatcagcctgcgaatatcttatggccaaaaactactctctaagtaacagttacaaagccaactataattctgtcagcctggcaagcaatccggaaatgattttctacaagccttatgcacaaagttcgttaaggcactccaccattgactacacaatcaatacaagtggtacgcacggcatttcaaaggacgcattcgacagtttccttttccttgatggaaaaccgttggcaacaacctcgaaaaacaaggacgatgcagccgtattggatgcagacaaaaattactctataagagaggttttggccgtacgcgacaagcgcctgtccgaaattcttgacccggtactttctttcagaggccacgcctacagccgtgccggtgtagcagccttcaccacatcgaccggttatggcatcgccaagtatgataaccccgaagaattgagtgttagcgaccgaaacaacatcggctaccaatacaccgactgcccgctctattggatttcagttatttatctgaactttgcagaagccaaagccgaaatgggttctctcacacaagacgatctcaacaactccataaacaagcttcaggctcgtgccggcctgccggctatgacaactactccagatgccgatcctgccaataatatgggagtaagcaatctgatttgggagatacgccgctgtcgccgttgcgaactgattatggataactggtaccgatattgggatttaatccgttggcaccagctcgacaaattggattcaaccaagtacccgaacaccatgttgggcgccaacgtaagcaatgtgcctgactgtgaagaagcgaccaagaacggatatatagatgcctccgatgcacaaatccgtacttatgaagccaaacattatttctacccgattccaactacacagttgaccctgaataaaaacatgaagcagaatccgggttggtaatcaactaaaaacagcatatcgcgctgtacctcgtttggatttaattaaagcgttcatacattccatgtatctaaatacaaatgtatggacgcttttgttattccctttaaaaggtgtatagaaacacgaatagcaccttctaaaaggaaccataaatcaatatcatatactttcccttcgttcataacatactaacaagaaacatatcatgaaaaagaagaacatatttttcgtactactaatctgcttcatcaatagtagttgcaacaaagaagaacaaacagacgagttacaagataaggatttctattctgatgtcacaacacgtgcttcctacataagcggtactattacgggcgaaatgaacccctatgttagtgatggttactacacttatgatttaagtattcctatacaaaaacaatctgtaggtataagaatttcagcagtcggtggagaagcacgattcaaaacaaactaccaagaacgattcgagagtacatgggtaacccaaattccagcaggaaaaaaccattttccaataaatgtattatggactaaagcaggtagtaattctaccctgatggtacgtcctgaaaaaagtacaatcgaacttaccgcagatctaagaaacatcaatgtcaaaatgaaacctatgccaatcaatgccccttcaacatttgaattgggagatacgataacactttggtgcaattattccataaacaaagatacgggcataaagtggacttacgataaaaatctattcgctgaagtctctcaaagtgcatctgtcacacaaagtagattccaaataaatttgaaatcaaagcaagccttcaagaacagcgatgtcggagtagaagtccatgatttctacataaattctatcggagcaaaagagtatttcatggctcggaaaagcaatatcagttttcccaatatgggtcctcaaatagatggctacagaaatattgaacaatataaagaatacatatattccatcaatgacagcaaggcacatacattttattggaccgggaagaatattaagatagtaagtggtcagaacagctctacggtaacaatcgtaccgacacaacccggtaacgcaagtgtcaaagtgagctacaaatataaaaatcaaaccgataattttaccaatgagctacctttgagtgtatctaagacatcaatgcaactgattggccctgacgtaatctgtgacaacgggacattcagtatcaagaattttcccacaaaagcaacagtggattggattgttggcaacgatttatattcgcaattaaatcaggcatcacctgctatcaccctgaataatttagggacacccggaggcagttccatttatacgaccttaaccgcaatagtacacacaaaggaatacactgttcagttttccaaaccaattactttcaatgtatcaggaatacaagaaaatgaccatgacattatatatggctatctgtcacaaagcggaggtgaatgcggattgaatcctattcctgaaggtgcgcatgattttcattggagtgttgactgcgattgggaggtagacatgcaaggatattatttcactactttcagcagtcggaacagtcatgaaattgaacgagtttgcgtaacggttgatttcataaatgcatgtggaaccagaacatacatatataactatttcgacatcggctcaacaaattcaggaacttattccacacctaaaaacagcctttctccaaaatagccccagacagctttcacgaaaaagcccccatccatttgctcgttacacaaaagaagcttatatttgcttacttaaaaacagacagctatcatggtacagcaagacatacgatggatacagcgttttgaatatacccacgaactggcctggaaagtgatgaaggactatgcagaatatcaggggtataccgacatccgcagctcccgtgatgccatacgcaaagcccttgaaatgggattgattgatgacaagcaatggacggagactatagaagcccgaaatctgacatcgcacaatcatgacaacgatgtagtctctgaagagaaaatgcaatccttgaatacaccatccttattcgattgagctatgtacggattgaccgacaatgaactggaaaagctatgcaatctcttccggaaacatgaagaaatagagcaggctgttttgtacggctcacgagccaaaggaaatttcaagcctttttccgacatagacatcacgctgatgggagacagacttacgtataatactttaagtagcctttccgatgaaatagacgacctgcttttgccttacagcgtagacctttccatctatggcaaattaaagaatgccgaccttttggaacatatacaccgtatgggaatacccatattcagccgcccatcaaactaaactaaatttcacacatccaccctcaccaccctcacctttcgcacgcatcgccctattcatcggcattcaagaggtgggtgagagcaaatttaaaaagtgagggcaaaatttgccctcaccacaagatttcttcgttcaaagttataagtcactcattcttaccgtaatatcctgaaatgggtacataaatcggttgcagcattgttccctcattcttcaactttccttcggtgcgcagccgacggatatgccgcatggcagtagtacgcatcatgccgcaaacgctttgaaagtcattccgtgtcataaaagggcgagtggcgaaatagttggtcagccgacggtctatctctttatccgtcagtttagccgaatgctcgtttgccttcaaagcctttgccttgatggtaccaatttcatttttcagtttttggtcggcacgaaatttcacacccgccatcttcaccttcgtcaacttacgcttggtagcagccactaccggttcgatcgtggtgagcgacacgcgaaagtagccgatgccgtcgagatgcacctgccttccttcggcaagttccctgcccatgacgtgcgacacagcatcaagcacagccgtcacatcggtttctgtcaatgagcaacgtgcctggatgtcccgccgcaattcatcggtagacctgctcccatttaggcggagacggggatgaaggattttatcttccggagatttgtcgtacgagtccggattctcgtaccaatcaaacaaaatagccatagttcaaactgcgttaaagggttacattatacgataaagcactgcacggaacacgtgcgaagtacgtacgcagtctgttgaagtaccaaggttatatcacagcccagcccgtgagcagaaccgttcactgtagtgagctgctccgttcactaatatgaacaagaaagaccactttagtggactgttcataaactctggtgtaaaagtagacaaaactatggggataagcaaagaaacgaacaccttttataaaagaaacatatagacattccaccccaaaaaagaagccaatcggaaaataatccttgaaaagcttgtatccacccctttcccggcgtatctttacaagaatattacatacacgataaagaatgaaaatcacactgatcagagaggaacgcgaaagcggaaaagaggccgtcagcacacaagaaacggacatgttgatggaaaagctgaaaaccgagaacaagaccggatacattacggagctgcgtagcatcatcccgcatttgaaagggaccaacgcccgatatgagcatatcgacagactgccgcgtctctatcccgccgtagaaatgacccgcaccaaagcaggagaacaccggataaagacttacaacgggctggtactactggaagtaaacaacctggccggggtggccgaagccgaactggtgaaacaacaagccgccctgctgccgcaaacctttgccgccttctgtggctccagcggacgaagcgccaaaatatgggtacgcttcaccctgcccgacggagggcttccaaagaatgaagacgatatcgccttattccacgcccacgcctaccgcctggcagtgaagtgctaccaaccccttctccctttccccatcaccctccgggctccttcactcctacaaagctgccggatgaccgtggacgaacagccctattatagccccactgccgtggccttctgcctggaacagccctgcgccctgccctcggaagacaactaccgccaacggaaacagcaggaaagcaatccgttgctgagaatgactcccggctacgaagtggcggacacatgcaacctgctcttcgaggctgccctcgaccgcgccttccgcgatttggacaactggcgacggggcgacgacctgcgcccgctgctgtcccgccttgccgaacattgcttcaaagccggcattcctgaagaagaagcggtgcgccagacactgatgcactactaccgggaggcagacgaaccccttgtacgcctgacgctgcataacctttacggggaattgaaaggcttcggcacccgcagcagcctgaacaaagaccaggaaactgctttccggctggaggagttcatgaaacgccgctacgaattccgctacaacaccgtgcttggcgacttggaataccggcagcgcgactccatccacttctacttccagcctgccgaccagcgcgtacgcagcagcatcgccatgaaggtactgaaagagggagtacgtgtgtgggaccgcgacatcacccgcttcctgtcttcggactacgtgccgctatacaaccccatcgaagaatatctctataacaccggacgctgggacggcaaagaccgcatccgcgcattggccgacctcgtgccctgccacaatccccactggagggaactgttctaccggtggtttcttggcatggtggcacattggcggggaatcgacaaacagcacggcaacaacacctcgcccctgctcgtaggtccgcaaggttaccgcaaaagtactttctgccgcatcctattgccaccggagctgcgtttcggctacaccgacagtatcgacttcaagagcaagcaggaagcggagcgcagccttggccgcttttttctgattaacatcgacgaattcgaccagataaacgccaatcagcaaggcttcttgaagcacctcctgcaaaaaccggttgccaacctgcgaaagccctacggtagcactattcaggaaatgcgccgctatgcctccttcatcgggaccagcaatctgaaagacctgctgaccgacccgtcgggaagccgccgtttcatttgcatcgaagtgaccggccctatccagacaaacgtcactatcaattatcgccagctctatgcccaagccatgcacgacatcatgaagggtgaacgctactggctggacgacactgacgaagcaatcgtaaaggagtacaaccgggaattcgagcgggtagacccattggaagaacttttcctttgccatttccgtggcgcggaggagagcgaagaaggcgaatggctcacagccatgcagattttcaacgacctgcaacagaaaacgagggataagttggccatcaaccggatagcagctttcgggcgcacgctccgcaagctggacatcctcaacaagaaatcgaaccggggaacactttatcatctggtaagaatagaagaatgagccggcactcccaccgattgtaccaaagtgagggcaaacttggccctcactctttttataaaaagtatttccgtacgcagttgatgcagttcaaccattattaataaggtgaacagttgactatttgcaaattatgattgataatactaaaaatacccaaataagtgtttttgatattaaaataaaacgtatctttgttgcaaacaacgtcctccttaataatactattatgaagaaactgctgcttttagcctttgtgctatgtagttctttactgtgccgggcacaagaagaacgaattattttaggtgatgaacagacttccgagtattttccaatcctaaaagataaacgaattgccatattctccaatcatacaggaatgataggagacaagcatctgttggatattctgctggaaaacaagttcaatgtagtagccattttctcccctgaacacggtttcagaggagatgccgacgcaggcgaacacgtgtccagctcggtagacaagaagaccggagtacctatcctctcgctgtacgacgggaaatccggaaaaccaagcgaagcatccatgcgcaagttcgatatccttgtggtagacatccaggatgtaggcctgagattctatacttattatgcctctatgtgccggctgatggacgcttgtgcagaatacaaccgcaaggtgctgatactggaccgccccaatccgaacggacactacgtggacggcccgatactggacatgaaatataaatccggtgtaggttggctgccgattcccgtggtgcacggcatgacgctgggcgaactgggcctgatggtaaacggcgaacgctggttgccggcgtcacgcacttgcgacctgaccgtcattccctgcaagaactatacgcaccagacactatacaagctgccgattcccccgtcccccaatctgccgaacatgaagtccatctatctgtacccctcgacctgctatttcgaggccactccggtcagtctgggaagaggaaccgacctccccttccaggtctacgggcatcccaacatgacgggctacagctacagcttcaccccgcgcagtgttcccggagccaagaatccgccccagctgggcaagctttgccacggcgtgaacctgagcaacatgagcgacgaggaaatctggaaacgcggtattgacttgagttacgtgatagacgcttaccggaatctgaacatggacgatcacttcttccgttccttcttcgaactgttgataggcaccgactacgtgcgcaaaatgataaaggaagggaagagcgccgaagaaatcaaggcaagatggaaagacgacgtagagaaattcaaggtacagcgcaagccctatctgctctacgaagaataaagggatgtacgatttgacgatttacgatttacgataaaaaaatgaacgtgaattggaagagaacgtcagagcgtacataggataatcaaagtcgtacatatcatcaaaagaagtaatttcaatcgtaaatcgtaaatcataaaatcgtaaatcataaaatcgtaaataacctcatgactccactatccgtaatcatcaccatagccgcctacttcgcgatactgttcacggtatcctatattgcaggaaggaaggcagacaacgccggcttctttgtaggtaaccgcaagtcatcctggtatgtcgtggcgttcgccatggtcggttccgccatttcaggtgtgacctatgtatctgtacccggcatggttgccgccagcagcttcggctatctgcaaatggtgttgggcttcattgccggacagctcatcatagcctatctgctggtaccgctattctacaaaatgaacctggtatccatctacgaatatctggagaaccgtttcggcatgtcttcctaccgcacgggtgcctggttcttcttcatctccaaaatgctcggtgccgctgtccgtctgttcctcgtatgcctgacgctgcaactgctggtattcgaacctttcggactgcctttcctgctgaacgtggccatcacggtggcactggtctggttgtacactttccagggtggcgtaaagtctcttatctggacagactctctgaagacattctgcttggtggtgtcggtcgtactctgcatctggtatatcgcttccgacctcaatctgtcatttaccggtatggtaagcaccattgccgacagtgacatgtcccgcatcttcttcttcgacgatgtgaacagcaagcagtacttcttcaagcagttcctcgccggtgccttcaccatgattgccatgaccgggctggatcaagacatgatgcagcgcaacctgagctgcaagaacttcaaggactcacagaagaacatgattaccagtgtcatttcgcagttcttcgtcatcctgcttttcctgatgctgggcgtgctgctctacatctttgccgccaaccagcagattgcggtggagaagagtgacgaactgttcccgctgattgccaccggcaactatttccctgccattgtgggcatactgttcatcatcggcctgatttcttctgcctattcagccgcaggctcggcactcaccgcgctgaccacttccttcaccgtagacattctgggaacgaaaggcaagtcggaagagacggttgtgaagatgcgcaagaaagtgcacatcggcatggcggttgttatgggaatcaccattttcgtattcaatcttctgaacaacaccagtgtcatcgatgctgtatatatcctggcaagctatacctacggtcctatcttgggtctgtttgctttcggcatcttcatgaaacaacaagtgcgtgacaagtacatcccgctggttgccatcgcctccccggttctctgcttcattctgcagaaaaattccgaagcctggttcggaggttatcaattcagctacgagttgctgattttcaatgcactgttcactttcatcggtctctgtctgttgattaggaaagataaaaagaacaattaacttaatacatcatctatgaacgtaagacgtcagtttttactaagtttgcttgccgcctccctcttcccccaatggggaggtgcgcaagaacttccgacggatgtccgccaggaaatcgggaaattcctggataccaccgcacggaaagaagtttccgtaggacgtatcagcatcgactcagtggccgtggaaggaaatacgctgcaactgtttgccaacatgaactgtgcctatattcctttccgcgaggacaatgtagccgaaatataccagggcgtaagtgccctgctaccggcggagtttaccaaatacaagctgcaaatccgtaccaacaagcgcagcatcgaagaactggttccccaagtcctgcgtagtaaaaaagacaaaaagacgaagacattcaatcccgtcgcttccaagcctttagttaccgacatttccgccccctacacccctaccaacggcttgcagaaccggcacatcgccctatggcaaagccacggctggtactacgagccgaaactcgaccgttgggaatggcagcgtgcacgtatcttccagaccgtggaagacctctacacccaaagctacgtattgcctttcctcgtgccgatgctggaaaatgccggtgccaacgtgctgcttccccgcgaacgcgattgccagacggcagaagtcatcgtagacaatgacggttgcctgaccggccgttccgtctatacagaaaattccggtgacaagctctggagccagggagcaggacaaggcttcgcccacctgcgcccccaatacatagactttgagaatcctttcaaggaaggcacttaccgcgctatagaaaccatcaagaaaggaaacgcaagcaccgccgaatggattcccgaaatcccttcgaccggacaatacgccgtatacgtctcttaccaaaccttgccaaacagcgcggacgatgccctttacaccgtctatcacaaaggcggcaccacgcagttcaaggtaaaccagcaaatgggaggcggcacctggatttacctcggcaccttcggcttcaatgccggtcggaacaatgaatgcaaagtcgttctgagcaacctttcctccaaagtaggaagaatcatcaccgccgacgccgtgaagattggcggcggtatggggaacatcgcccgccgcatctccaacgagggcgctacggaaaacctgaaaagctccgacacccgcaacctgcaaaacacccatacaggcaacatccaagaccgtgtaacctattctccattgtccactatcaattatcaactatctaactatccccgtttctgcgaagccgcccgctactggctgcaatgggcaggcataccggacagcgtatattcagaaagcaacggaaagaacgactataccgacgactacaaatgccgtggtatctgggtgaactacctttccggaggctctgccgtgaatccgacggagagagggctgaacatccccgtcaacatggccttcgccttccactccgatgcaggaactacactgaacgattccatcatcgggacactcggcatctactataccaacgcctacaatgagaagttcgctaacggagcatcacgctatctgagccacgacctgacagacttgattcagtccaacatcgtgcgtgacgtgcgtaccctctacgaacctcaatggacacgccgtggcaaatggaaccaatcttactatgaggcccgtgtaccccgcgtacctaccatgctgctcgaactgctttcccatcaaaactttgcagacatgcgctacggactggacccacgtttccgtttcaccgtaagccgcgccatctataaaggtatgttgcagttcctctgctcacaataccacatggattatgtagtgcaaccgctaccggtagaccacatggccctgcgcatgaccggtgaaaatgaagtggaactgacctggcgacccgtagcggatgcgttggaaccgactgccatagcagagaaatacattgtctatacccgcatcggcgacggagatttcgacaacggagtattggtggacggcaacagttaccgcaccacactccccgccggcatggtgtgcagctacaaggttaccgctgtcaacaagggcggtgaaagtttcccttccgaaattctttctgccggacgggcgttcaattccaaaggtaccgtattggtgataaacggattcgaccgtatcagtgcccctgccgactttacggcacccacccccgccgacaccctccttgccggatttctggatgagcaggaccacggggtcccctatatccgggacatcagctacattggcaagatgaaggaataccgccgttccattccctggatggacgacgatgcctccggtttcggcgacagctatgggaactacgaaactcaagtgattgcaggaaatacgttcgattatcctgccatacatggtgccgctatcctgaaagcgggatattcgtttgtatcggttagtaatgaaagtctctcccccgtaggaaagggagagaagaatactccagtggatatgagggagtataggtatgtggacttgatacttgggaagcaatgccagaccaagatgggacggggaggcgtaaaaccgttggagttcaagactttcagcaaaccgatgcaggaggctattgtggcttattgtaagcaaggtggaaatatctttgtttcgggcgcttttgtaggaacggatttatgggacaaccgccttgcaactgccgacgaagccgacaagaaatttgcgatggaagtactgaaatataagtggcgtgtgggacaagcggctacaatgggtaaggtgaaaagcgtagcttctccgttccccgccctttcaggaaactatacctatcacaatgagctgaatgccgattcgtatgtggtggaatcaccggacgccattgaaccggcaaccaaagatgcacacaccgtaatgcggtattctgaaaacaacctgagtgccggtgtggcctaccagggcgactacaagacttttgtattgggattcccttttgaatccatacgtactgattctgaaagagaggcactcatgaatgctgtgctgacattcttcaacgacaacaaataatatcaaccaatcatcatctatgaacagaagactgttaataattgtcctgatggcttgcctgctccccctggggatgcaggcacagcaagggacattccgttttgcccaactgacagacattcatctgaccccgaacaatccgaatcccactgaggacttgctgcgttccatagcacagattaatgccaccgacagtatcgactttgtcctggtgacgggcgacctgaccgaagaaggcgaccgtgccaccatggaaaaagtgaaatcgtgccttgacttgctgaaagtaccctaccacgtagcccttggcaaccatgaaacgaaatggagcgactccggctgcaccgctttcggagaaatctttggcggcgaacgcttcgagttcgagcacaagggattccttttcctcggtttcaactccggtccgctgatgcgtatggcctacgggcatgtagtgccgcaagacatccgttggatgacggaagaaatggagaaaaacggcaaagacaaaccggtgatacttgtcacccactatccgctaatggaaggtgatgtggacaactggtatgaggtgacggatgccgtccgcccctacaacgtgcgcttgtttatcggcggacactaccacagcaaccgggatttacgttatgacggcattccgggcgtactgatgcgcagcaacctgcgcgacaaagaagggaaacagggttatggcatctatgaagtaaccggggattccatccgggtatacacgcaacgtatcggcgagcccaagaagcagtggacagcattctcgctgactaagcagtattacgaccgcaacggaaaggcagagaaatatcccgacttctcggtcaacaaggaatatccgcaagtaaaggagcaatggatggtgcagacgggcgcaggcatttactgctcttccgccgtagaaaaagataaagtgttcgtaggagacgatatgggacggctgacagcctacaccctgaaaaacggcaaaaagctatggagctttgaatccggcaagcgcattgtcggtactccggccgtaagcgaaggtatcgttgtattcgggtctgctgaccgccacatctacggattgaacgccaaagacggcagcctgctctggacggtaaaagctgccgaaccggtactcggagccgtgaccatcgcagacggtaccgcctacatcggtgccagtgatgccactttccgcgccatagacatccatacgggaaaagtaatctgggcctacaccggcgtgaagggctacatcgaaaccaagccgttggtgacggaagacaaggtcatcttcggcgcatgggacaatacactgtatgccctgaacaagactgacggacgtgagttgtggaaatggacgggcggactgacctgcatgcacttctctcctgccgccgtatggccggtagctgccgacggtaaagtattcattaccgacccgcaacgcgccatgaccgctatagacatccatacgggcaataccgtgtggcgcaccttccagcccatggtgcgcgagaccatcggactttccgaagacggtgaacgtatctatagcaaaacgatgaacgacagcattgtttgctatgcagctcaaggagatactccgcgggagttgtgggcaaccaatgtaggtttcggttatgagcatgccccctccatgcaagtggaaaaagagggggtaatgtttggcagtaccaaagaaggacttatcttcgcactggaaggaaaaacaggcaaagtactgtggaaacataaaataggaaattcactcatcagtaccgtagttccgttgaacggccacgaagttctattcacggcaaccagcggggaagtgggacttctgagaattaaaaattgagaattaaaaattaaaagatatatcatgaataaaatcagttgctttcttccctacgcaggaaaagaacaagtagaaaaaacagtgaatagcctacaggcgacaggacttatagaagaaatccggttaatcacgaccgatgccactctggaatcgctcccggactgcgaaatattgtttgttgacatgccctacagcagtgcaactctcaaagctattgctaatgcagccaagggagaatacacattgctttataccaaagagactacgctcgaaatgggtatgtttgcactggaacgtatgatacacatccttgaagattcaagcgccggtatggtatatgccgaccactaccaaatagcagacggcaagcagagcaacgctccggtaatcgactaccaattcggttccttgagggatgacttcaactttggctccctgctccttttcaacaccgaaaaactaaaggaagccgccggacacatgaagtctgactacaacttcgccggactttacgacctgcgcttgaaattgagccaacattcagacttggtacatatcaacgaatacttatacagcgaggtggaaaacgatacccgcaagagcggcgaaaagattttcgactatgtagaccccaaaaaccgtgaccgccagattgagatggagcaggcatgtaccgaacatctgaaagaaatcgggggatatctggcaccggagttcaagaagattgagttctctgccggtaacttcgaatatgaggcctccgtcatcattccggtacgcaaccgtatccgtaccatccgtgacgccatcaaatctgtattgatgcagaagacagactttaaatataatcttatcatcatcgacaaccattccacagacggcactacggaggccatcgatgaattcaaggatgacgaacgcgtcatccatatcatccccgaacgtaccgacctcggcatcggcggttgctggaatatgggggtacaccaccccaagtgcggcaagtttgccgtgcagctggacagcgatgacgtatacaaagacgaaaatacactcgccatcatggtccgcgccttctacgagcagaactgcgccatggtagtaggcacctatatgatgacggacttcaacatgaacatgattgctccgggcatcatcgaccacaaggaatggactccggcaaacggacgcaacaacgccctccgcatcaacggtctgggtgccccgcgcgccttctataccccggtgctgcgcgaagtgaaagtacccaataccagctatggcgaagactatgcactgggactgaacttctcccgccagtaccagataggacgcgtgtacgacgtggtctacctctgccgccgctgggacgacaactccgatgcctcactggacatcgtgaaaatgaacggacacaacctctacaaagaccgcatccgtacctgggaacttcaggcacgcatagcgatgaacaaaaacaagtgatatgaatcaaacgatacaccatcttctgactggacaattggcatcctgggagacggcacgcaacaactatgccgccctctccggtgtgcgggtgaaagagctgaatgtaaacgggataccttataaggtacagttcaaccccgcacgcatcgtttcctctggtgccaaagtggatgccaagtccatcctggaacggaaatgctttctgtgcccggccaatttgccgccggtacagaaaggtatcccgttcggaggacactacaatattctggtgaatccgttccccatcttcccccgccacctgacagtaccggaactggcacatacccctcaacgcatagccacccgcttcaccgacatgctggagctggccgaggcgctgacggattacaccatcttctacaacggtcccaaatgtggtgcttccgcccccgaccatgctcatttccaggcaggaaacaaagggttcatgcctattgaaaaggactggcgcggacagactgccgggaaaatagccgattataggaaagcagcactgtggtatcttgacgacgctccccgtgccacacttgtgattgaatccacctccaaagaggacgcggcagacttgttcgacatcatttaccgttctctggacgtgaaacccgaagaagacgagccgatgatgaacgtactggtcctatacgaggccgaccgttgggtggtctttgtcttcccgcgcgagaagcaccgtcccacctgctacaccgccgagggagaagccaacctattgagcagtccggcgtccgttgacttgggaggtgtctttatcacccccgtagaaaaggatttcctaaaaatcactgcggaagatgtggcacagatattaagtgaagtatgcctctctgccacagacttccacaaggtacggaagcgtatcagggaaaaaatatgacttctgaaatccaagaactctaattttaaagaaataccattatgaaagagcccaaagtacaagtaggcattctgtttgaaccgcagatagaattcgttttgctgaatccgtatcgcatggacggaacggaagtcagcggaaagcaggtagtgacctacgacgaaggcaagattctctggaatggacgccggtatgacgaactgctgtttgaaccgcaacacgagcagaccgatgccttcgaactattggacgttaccatcggcatcaatttccattgggagcgcaaggaagaccagcgttttctgggtgctctcaaaatcatcgttgagaatggaaagctcaccggcatcaacgtcatccatgtagaagattatctgaccagcgtcatctcctccgagatgagtgccaccgcttctctggagctgctcaaggcacacgctgtcatctcccgaagctggctactggcacaaatacaaaagaataaggaaatcaccgaagcccaagctaactactcggcctttacgcagaccgacgaagagctgattcgctggtacgaccgagaagaccacacacgtttcgatgtatgtgccgacgaccattgtcaacgctaccagggcattacacgtgcctctaccgatattgtgaaacaagccatctccgctacccgcggccaggtactgacatctgatggtaagatttgcgacgcccgtttctccaaatgctgcggcggtgctttcgaggagttccaatactgctgggaagacatcaaatatccctatcttgcccaacaacgagacagcaaaacgcacgccacactgcccgatttgacgcaggaagtcgaagcggaccgctggattcgtacctcccccgaagcattctgcaacaccaccgacaagaaaatcctctcgcaggtactcaataactatgaccaggagactacggacttctatcgctggaaagtggaatatacccaagaagagctttcagccctcattctgaaacgttcaggcattgactacggacaaatcatcgaccttatccccatagcccgcggaaccagcggacgcctctggaaactgaagattgtgggaaccaagcgcacgctcaccatcggcaaggagctggaaattcgccgtacgctctctacttcacacctctacagctctgccttcgtggtggacaaggaggagttgtcctccgaaggcattcccggacgcttcatcctcaccggcgccggttgggggcatggtgtgggactttgccaaataggtgcagccgtgatgggcgagcaagggtataagtatgatgcaatactgctgcactactatataggtgccagcattgacaagctgtatgaataatcgaatagaacacaataaatcaatatcatgaaccatacaaaaaacatatcgccatgggcatgggtacccaccttgtactttgcacaaggcattccatattttatcgtaaacaacatctccgtgatgatgtttactaaaatgggcgtaccgaacggagaaatggccttgttcacaagcctgctctatctgccatggactatcaaacccttctggagcccgtttgtcgacatcatcaagaccaaaagatggtggaccctttccatgcagattctgatgtctgtggcattcatcctgctgacgctgtccattccacggccggacgaggcgactatggcggccggaacaacccccatcagcatgttcagcatcacgctaatgctgttcatcatcacggcttttgcctctgccacacacgacattgccgccgacggcttctacatgctggcactgaaacagagtgaccaggcagccttcgttggcatccgaagcacgttttaccggctcgcctctatcttcggacaaggcgtgctcgtagccattgccggcgccatcgaactgagaaccgaaaacattccgctgtcatggaccatcacgatgctggttacagccgttctgttcagcctggtgacgttctatcacctctttgcagtccccaaacccacctcagataagtcaacactggctgccgatgccgccactgcaggagccatattcagagaattcggacgaacattcgccacctatttcaccaaaccgggcgcattgctggccatcgtgttcatgttgctgtaccgcctgcctgaagcattcctcatcaaaatgtgtatgcctttcctggttgcctccaaagaatcgggaggtctggaactatcgacagcagaagtaggtatcgtatacggcaccatcggagtcatattcctcaccctgggcggtatcctcggaggattgttcgcatcacgcattggcttgaaaaaatccatctggtggatggcaggatgcatgactctgccatgcctgacgtttgtctatcttgccattgcccagcccgacaatctgtttgccatctccaccgccatcgccatcgagcaattcggctacggcttcggtttcacggcctacatgctctacatgatgtacttctccgaaggtgaattcaaaacatcccactatgccatctgtaccgcattcatggcactaagcatgatgataccaggtatgtttgcgggatatatccaggaggctatcggatatacggacttcttctggttggtaatgatatgctgtttcgccacggttgttgtcaccatttttgcagacagaaggatagacccggaatatggaaaaaaatgattaatggttaatgattaatgttttgtgagtaatatttagtgattggttatgaagaggactattattatatccttgctctgcctcctttgcggaggtgcgatgcaagcacagaagatcagaataaagaccggtatcgaggtactgaaagaacagaatttccgatgcctggaaggtaagcgtgtaggattgattaccaacccgacgggggtggacaaccggatgaggtccaccattgacatcctgcacgaggcgcccaacgtgaaccttgtggcactctacggccccgaacacggtgtgcgcggcgatgtgcacgcaggcgaccatgtgacggacatcaaagacgcgactaccggactgcccgtctattcgctttacggaaagacccgcaaggccacgccggacatgctgaaagatgtggatgtattagtgtatgatatccaagacatcggttgccgttcctttacctacatcagcaccatgggactggccatggaagccgctgccgaaaacggcaaggaattcattgtgctggaccggcccaatcccgtaggcggattgaagattgaaggcaacttggttgaagatgattgcatttcttttgtaagccagtttaaaattccgtacctttacgccctcacttgcggtgagctggcactgatgctcaatggcgagaagatgttgaaggatggggaacaatgtaatctccacatagtgaagatgaaaggctggaaacgcaagatggattatacccaaaccggactgcaatgggttccctcctctccacacattccacatcctcattctgcattcttctaccccgtcagcggcattctgggtgaactaggatatatgtctatcggcgtggggtataccattccgttccagatgtttgccgcaccatggatggaagcggaaaagctggccggaaacctgaaccgtctgaacgtaccgggggtcatcttcagaccgatgtacctgaagccgttctatagcgtaggcaaaggcgagttgctgcaaggtgtgcaagtgcacatcatggatttcggcaaagcaccgttgagcgacctgcaattcctggtcatgcaggaagtcgccgccctctatcctgaccgtgccgtgtttgaccatgccgacaagggacgtttcaacatgttcgacaaagtaagcggttcgcggcagatacgcgagcgcttctcgaaacggaaccgttgggaggacatacgcgactactggtataaagatgccgaagacttccgtaagctgtcgaaaaagtattatttatataaataaatttacagataaataaggaagggaaaagagcctgatacggagactatttcagtcgtatacagaaccacattcagtcgtatacttaaatatattcagtatacgactgaatgtaccccctcgtaagacacgtttacagagcactttgaagcgaagtgatgcaataaaaaaaagtgaacatgaaagagcatagttacatggctttcctgcaggaagcaaaacaattcattccgcaggaaaggatttacaccgacgaacttcgccggctggcttggggtacggatgccggtttttaccgactgattccccagattgtaatccgttcgaaagacgaagatgaagtttcacaactgttgaaactggcgagccgccacgggctgcccgtcaccttccgagcggcagggaccagtttgtcgggtcaagccattagcgactccatcctcatcgtagccggcaagaattgggaaaaatacagcatatccgccgactacgaacagataaccctccaaccaggcatcatcggacaacgtgtgaacgaactgttggctccctacggccgtaagtttgcaccggatcccgcctcggtgaaaagcgccatggtaggcggtattgtcatgaacaatgcttccggcatgaactgcggtacgcacgccaatagcgacaaggtgcttatttccgcccgtattatcctgatggatggtaccctgctggataccggaaatcccgtcagccgcgcctccttcgaagtgagtcaccgtgacttcattcgccgcatctgcgaactgcgcgatgaaatacgtaccaacgaaaaactggccgaacgcatccgttacaaatattccatcaaaaatgtaaccgggctcaatctgttgcccttcgtccgtttcgacgacccattcgaaatcattgcccacctcatggtaggttccgaaggtacactggcgttcctttcggaagtgacgatgaagactgaatatgattatccctacaaggccagcgctatgctctacttcaagaccatcaaagaagcgagccgcgctgtggtagccatgaagaagctggtcgacgaaaccggcgaatggacagtaaaaggggctgaaatgctagactataagagcctttcttccgtcaacgaccccgtattcctaaaatacaaaggcgaagttgcctcctctgccctccccggcgtggagcccggcgacgaaaccgggttgacagcagtgctgaccgaaaccaaagcccgtaccccggaagaactgcaacagaacatatctgccattgaagcttgcctgcaagccttcaccacctatattccggtacgcttcaccgaccgtccggaggaatattccaaatactgggccatccgttccggcatcttcccctctgtgggaggtacgcgccagccgggaaccacttgcctcatcgaagacatcgccttccacattgaagaccttccggaggcaacggcagaactgcaacagctcatagcccgccacggatataatgacgcctgcatctacggccatgctctcgaaggcaactaccacttcatcatcaaccagtccttcagtacccaagcggaagtgaaacgctacgaagacttgatgaatgacatcaagaccttggtagtagataaatatgacggttccctgaaagccgagcatggcacgggccggaatatggctccctttgtctgccatgaatggggagatgacgcctacaaagccatgaaagccgtcaaagagctgtttgacccacaaggattgctaaaccccggtgtcattttcaatgatgacccgcaatgccatatcaagaacttcaagccgctgcctttattagtgatgagtgacaagagacaagctacgtcactcgtagctgacaaatgcatcgagtgcggtttctgcgaagtcaactgtctctcctgcggctttaccctttcctcgcgccagcgtatcgtgttgcagcgcgaaatatcccggctgaaacaaagcggcgaggacccgacacgccttgcactgctcgaaaaacaataccgctatcccggcaaccagacttgtgccggagacggcctctgctccatgtcgtgcccgatgggtatcaatacgggcgaccttacccatataatccgccaggaagcattacccaaaggcagtctgggatacaaagccggagactttgtcgccaatcatttcgctggtgtcaagagtgcactgcgtcccgtattgtccttagccaacttcggacattcactattagggacaaaggcgatgagcggcattaccaaggggctgcacaatgcattaggcatacctctatggacgccggctatgccgaaaagttatcagttacaagctacggagttacaagctacaagcactatgcagcataatagcgcagcacttgtagctcgtagctctgtaactcgtaactacaaagtcgtctacttccccagctgcatcaaccagactatgggtctggcaaagaagtctcccgtagagcagccattggtaaataaaatggtgtccttgttgcaaaaagccggttacgaaatcatcttcccgaaagatatggacaagctttgctgtggcaccatttgggaaagtaaagggatgctggacattgccgatcgcaagacagccgaactggaggccgcactttgggaagccagcgaacaaggcaaataccccgtcctctgtgaccaaagcccttgtctgcaccgcatgcgcgaatgtatcaagaagatgaaactgtatgaacctgcagaattcatctatacattcttacgtgagaagctgattttcacacctattaaccgccccgtagcaatccacatcacctgctccatgcggaaaatgggactggcagataccattatagcccttgcacgcctttgctccaataaagtcatcgtgccggaagaagtaggttgctgcggttttgccggagaccggggattcacctatcctgagctgaactcgtacgccctacgcaaactccgcccgcaaatagaagcgtccggagtgaatataggctactctaacagccgtacttgtgaaatcggattgacaacaaactcaggtatcccctatgtatccattgcctatctggtagacgaatgtacaaaggcagctgataattaggattgataattaacttaacacacaaatattacaatgaacagtacaaaagtaagtaaacgcatccttgcactcgacattctccgtggtgtcaccatcgcaggtatgattatggtaaacaaccccggttcgtggggacatatctatgcccccttgcggcatgcagagtggaatggtctgacccccaccgacctcgtctttcccttcttcatgtttatcatgggaatttccacatacatttccctgaagaaatacaacttcgagttcagccacgccgccggcatgaagatactgaaacgcaccatcgtcattttccttataggcatggctatcggctggttctcgcgtttctgctattactgggcctccgctccggacgacctcagtttcggagagaagctatgggcttccgtctggacattcgaccgtatccgtattctgggtgtcatgcaacggctggccctttgctacggagcagcctccatcattgcactaaccatgaagcataaacatataccttatctgatagccggcctattgacaggctacttcatactgttgatgtgcggcaacggtttcgcctataatgaaacaaacattctttccgtggtagaccgtgccatcctgacccctgcacacatgtacaaggataacggcatagatcccgaaggtttgttaagcaccattcctgccattgcacatgtgttgctgggcttctgtgtagggcggctgatgctggatggcaacaagtcggaagaccgtgcctcatttctcaattcgcagcttatcacactgttgctggtaggtgttatccttactttctccggtttcctgctaagctacggttgccccatcaacaagaaaatatggtctcctacctacgtactcgtcacttgcggactggcatccagttttctggcattgcttatctggattattgatgtgaaaggctataagaagtggagcatgtttttcgaggcattcggtgtgaatccgctgttcatgtatgtattgggcggcgtacttagcatacttttcggtagtatcagtttcccgtggggaaacagcagcatcagcatacacggattcttatacaatatagtcctcatgcccgttttcggtgaaaccgccggttcccttgcctttgccctgctgtttatcgccattaactggtgtatcggctaccagttgtacaaacgaaaaatatatatcaaaatataaggattaggggttagtgattaaggattagtgattaatacgttgcctataattaagaaacagtatcac

SEQ ID NO: 4423 - DNA, 3297 bp, Unknown
  gut microbiota DNA sequence
tccttaatcactaacccctaatccctaatcattaaacattatttatatgattctaatagcagacagtggctctacaaagaccgattggtgtgttgtagagaatggagtacttctccaacagatattcacgaaagggacgaaccctttctttcagtcggaagaggaaatcagtaatgaaatagcaacagcgctattacctcagctgaagacaagtgagctggatgccgtatacttttatggtgcaggatgcggatttcccgacaagataagtatggtgcaccgtgccataaccaaacacctcagtgtgaaaaatgaagtggaagtcaataccgatatgctggctgccgcacgtggcctctgcggacatgactcaggcattgcctgcatcatggggaccggctccaactcatgttattatgacggaaaaagcattgtcaccaatgtatctcctctgggattcatcttgggagacgaaggcagcggagcctgcttgggcaaactgttggtaggcgatatcttgaaaaatcagatgacacccgagctgaaagagaaattcctcaaacagttcgacctgacacctgctgatatcatcgaccgtgtctaccgtaaacctttccccaaccgtttcctggcaagcttgtcaccatttcttgcacagaatctgggtgaaccttgtgtacgcgctctggtactgaacagctttaaggcattccttaaacgcaatgtcatgcaatatgaagactatcagcatcaaaaagtacatttcatcggttccgtagccttctattacaaggaagttctggcagaagctgccaaagaaatgggtatccaactgggtgcaatcatcaagagccccatggaaggactcatcaaatatcacaactgaaagtgacaaatcgtaaatagtaaatagtaaatcgtcaaatagtaaatagccttatgttcgtaaaaatctcagagcaaccatcgctctacaatgacttggaaaagaaatcagtccgtgaaattctggaagacatcaataccgaagaccagaaagtggcgcttgccgtacagagggcaatccctcaaatagaaaagttggtaacccagattgtgccccgcatgaaacaaggcggacgcatcttctacatgggtgcgggtaccagtggacgtctgggcgtactcgacgcttcggaaattccaccgactttcggtatgccccccacgctggttatcggcttgattgccggtggtgacactgcattgagaaatccggtagagaatgccgaagatgacattcaccgcggttgggaagagttgacggaacgcaatattacagataaggatacggtcatcggtattgctgcatccggtaccaccccctacgtgattggtgccatgcacgaggcacgcgaacacggcatactgaccggctgtatcaccagcaacccggactctccaatggcagcagaggcagatgtagccatcgaaatgattgtaggacctgaatatgtgacgggaagctcacgcatgaaatcgggaacaggacagaaaatgatactgaatatgattaccacttccgtcatgatacagttgggacgcgtgaaaggcaacaaaatggtgaatatgcaactcagtaacaaaaagcttgtggaccgtggtacccgtatgattgtagaggaactcggactggactatggcaaagccaaggcgctgctgttgatgcacggttcggtgaaaaaggcagtggatgcataccggatttagctattactcactcttaaattcctttattatgaaagcaatatatttttttctcttttctctttgtctgcaagctgccaccgcgcaacccttgcaacgcgtagcccctgaacaagtgggaatggactcacgcaagttgatgtatgctgacgaagcgattgaaacagccatctccaacaaggatattcccggtgccgtacttgctgtagtacgtaacggcaagatggcctatctgaaagcttacggcaacaagcgtatttatcccaatgtggagcctatgactgccaatactatctttgatatggcatcttgcagcaaatccatgtcgaccgccgtatgtacgatgatactggcagaacgcggcaagctccgtatgctggaccccgtcagcctctacataccccatttcaagaattgggaaagcgaagacggcaaagagaaaaaggtaatccgcattgccgatttgatgacacacacttccggtcttcctccctatgcaccggtagccgagctagaaaagcagtacggttctcccaatcccgatggtctcatagagtatatcgctacttgcaaacgcgacttcaagccacagacagatttccaatacagttgcctcaacttcatcaccctgcaacatatcatcgagacaataagcggccagagcctgcgtgactttgcccgtgaaaacatattcgatgtactcggcatggagcataccgactatctgccctgccaacgtgacaagaatggcaaatggataaatacagcggacgcaaactgggcaggtatcaccaaaggagactggcacaatgccatcgcgccaaccgaaaaacaacctgacgggcaagtcctctacggacaagtacacgacccgctggcacgtatcatgaacggaggcatcagcggcaacgccggagtattctcctgtgccgaagatattgccgtgctctgcgcaaccctgcagaacggaggcgaatggaacggccgccgcatcctgagcccgctgggcgtaaaagccatgcgtaccgtgccacgcgccactgccagcctgggacgcactctcggctgggactgcttcacagcatatgcctccaacaacggggacttgttcggcccgaacacctatagccataccggatatacgggtacttccatcgttatcgacccggacaatgacacttccgtcatactgcttatcaatgccgtgcatccggaagacgggcatagcgtggttcgtctgcgttcattggttgccaacgctgtagccgcttctatctgtcccgttccacacgcctatacagaccactattacaaacgcttcctacagtttatggatgagcctgccattacaagcaaagacatcgtcatgcttggcaacagcctgactgaaggcggcggtgactggtcggcacgcctcggcaagaagaacgtacgcaaccgcggcattatcggtgacgaagtgatgggtatctatgaccgtctgcaccagatactccccggacatcccgccaagctgttcctgcttatcggagtcaacgacatttcccacaa

SEQ ID NO: 4424 - DNA, 84886 bp, Unknown
  gut microbiota DNA sequence
gtgtaaaaccttaatagttaaggttgtctgcggagagagggggattcgaacccccgataccctttaggggtatacacgctttccaggcgtgcctcttcaaccactcgagcacctctccttgttcggggcgcaaaagtaagggaagtttttggaattaccaaatgttcgggcaaataatattaaaagtccgttcaagcaaccaatgccggaacggactttcaacactcaataaaacatacttatcattaccgtgatctgacttcccgtctcataaatatgacatacgaaagagcaaaacagatgacagtagctgcaatcagtccggtgagctgcggccacaccaccaaaagactctgtcccaatggcagcggactgggaatggccccctgaacctgctccatagtaagcggccccaaacttctgacggaaggcatcagcagcgttgtggtcgcctcattgaacagttcgctaggtgccagacgcatcagaccgagaataaatttctggtaactgactatctgataaggagatgccagctgcgaagggctcaatgccttggcaaccagattgacaatcatcgtatagaacacgctgaaaaacaaccataccgccaccgaagccaatgccgaggtggccgcctgacggaagcaaagcgaaaacagaatggccagattcagccagaatgccacatagaacacactgattatgagaaagaatacaatcctccaaaattcttctgctgtgggaggaatgcctatcgctatcaacccgcagcccattacgaggaatcccagtacaaacagcatgatacctatcacaatcaatgcagccacgaacttggcattgataatgcaatcacgatgaacaggctgtgacagcatacggctcaacgtccccttgttctgttccgaatttatagcatcgaatcccagcgcaatccccaacaacggccccagaaagttgataaactgcacaaaagaaggcaatgtgccatccgaggctgtgaacaacttcaagaaaaggaacgaaccgtccgggtcattgggcttgatggcggcacctatgttggtaagcgaggtatagagtgagcccatgcacgtaagcaaaatgattcccatcaagataatgaaccgccaacttttcacatggtcggatatttccttgttgacgactacccgaaaaggataattgactttattcatgcctttctcctccttcctccatataatggttataaatatcagataattcctgatgcttgtccttcaaatcagacatatcaatcaaggtgaccagcttcccactgttgaacagtcccacgcggtcgcaaactttctgcacctggtccaggtggtgggaagagaacaagacggtcagtccctccttccggctcaactgcctaatgagctcgatgaactcctgaacaccggcagggtctattcccgaagtaggttcatccaggattataatttccggatttttgataagcacgtctgccagccccaatcgctggcgcataccgcgcgaatatttcccggtcttctttttcatctgtccggcaagccccacatgctccatcagctccagcgccttgactttcgcttcggcatccgaaatgccattgagacgcgcagtatatataaggttttccggaccggtcatgtcatcataaaaccccacatcttcgggcagatagcctattttccgctttacctcgataggatgcctggtagagtcgataccgcaaatctccacagagccggaagtgggttccgtcagtcccagcatcatcaggatggtagttgacttgccggcgccgtttggccccaataatccgaaaatctcccctttacggatagtcaggcaaatgcggtctacggcagtgaagcgcccatactgcttggtcaagtctgtcaatgcaatcactcgctcgtccatgctcacctccttccatatttacggaacagatagcatacggcacctatggcaacgattattatcaaaacgcccacccatccccatatcatcggggttttcacggcaatgcggaattgggcgtctgtattcacttcaggagttttggccgtcatggtagccacataatctccgggcaatgcctttttggatgctttcatgatagctacgacattggccgtttcccccgccttcagcatatcaatcttcgaaggctcaaaagacacttcccagtccacgggcttattggcagaaagctggatatctttcaacaatgaagaaccggtattccggaccaccaactcgatacgcttcacatctcctgctgtgatttcggtactcaacaatcctctgggcgtggacaattccatctcgtaggaacccgtgacaacaacttccagctccaagtcggcagaagtcgtaccagtagccgcacgtaccggaatcttgtaattgccggcttccacattggcgggagggacaatctctatactcacattctggctgctgttcgcttccacctgggcagaagtggcctgcttatagttaggcttgaacacgacactccagcctctgggggcattggccatcagcgcatacagctgctggtcggccgtctggtttttcaaagtggcattgaaggtaaaggtggacttggaattgccctgcatattgggctggtcggtagtgaactcggtctggtaagttcctttctgggccacgatcacctccagcggcagtttggtttctccggcaaatactgtgaaatgataacttcctttatttacttttagaggaacttccactttcaaattgaacgttttcttttccttggacagtacagaaagctggctgagggtccagccgcctgacttgatttcatgcttccaactgcccggcaatccgctgaccgagagatttgcatttgtaaccccgtccgtgttgttaatcaaatcaatgctgtaatcaatggacgctccgggcgtcacggaaatttttgtgtaaggagtgtacagaattatgcttccagattcatcggcatgtacacgatttaagggaaaggctcccaacaaaataactaacaataaaatacaatttgttctcatagtcataaaaaagttcttatggttgtttaattatgaatattttccaaatttgtgtgttgcaaaaataaaagatagctatattagtagctgttaaaagaaacaaaagaatataattgcggacacgatataccctgcgatgacctgcttttcttatctttgcgattcctattgatacaaacgaataccataccgacatgagaatccctgaaatacgcttacagaaccagcaactgtccactccactcttcggccacccgaaagaactggtctcctggatgggcgccatgcaggcacaagactatacaatggtgaaatgggccgtaggtatgcggctgaagtcaccgggaattcaagccgtggaaaaagccctgcatcaaggggaaatactgagaacccacgtaatgcgtcccacatggcacctggtagcagcagaagacattcgttggatgctgaaactctctgcacaacgcatcaaatctgccaatgattcttatgcaaaaggacatggtctggaaatcacggaacagcaatatgacagaagctacaccatacttgggaatatcctcagcgggaagcgaagcctgacgaaacaagagattgcggaacattttgaacgttcgggactgcttgcagacaactaccacatgacccgctttatgtcgcgtgccgaagtcgaaggaattgtgtgcagcggagaatgccatggacggcaacacacctatgcccttctggacgaaagagttccacctacccccgaactgacgaaagaagaagcgctggcccgcctggctacagcctatttccgcagccatgcccctgctaccctgcaagacttctcctggtggtctggtttgcctttaacggaagcaaggcaagccatttctctgatagaaccggaactgatgtccgaacaatggaacagccagacatggtacatccatgactcctgccggacatctggaaaggcgaccggtaacctgcaccttcttccctcctacgatgaatacctgataggatacaaggaccggacggacgtcctacccaaagaggactattccaaagctttcaccaacaacggattgttctttccggtacttctctataaggggcatgtagtaggaaattggaacaaggcgtccaagaaaaaagaaatcttcccggagcattcgcttttccggaaagacatctgcctgaaagaggagttgctgaaccaggctaaagaaaagtacgtccggttcctaacacattaaaggcggtcatcgaagattttcattgaagaatctctctattttgccgaatggaattacctctatattgtcatacaagtctacatggtttgcaccgggaataatcagcagttccttattatcaccctgcaactttttaaaagcatcttcactgaaataacgtgaatgggccttctcaccgtgcagcatcaacactgcactacggatttcatcactatatgaaaggataggcatattgatgaacgaaagcggtgaagtcttgttccatccgtggttagagttgagtgaccgcttatgatagccgcgcggtgttttataataggcatggtagtccttcacaaattgtggagcatcggcaggcaacgggtctactacacctcctccaagagcaaatgtaccgtttctataatcctccgtacgctgagcattaagctggcgccgcaattcatgccgtgcatcggcattcatagaatcgaaataaccgttagcattgacccggctcatgtcgtacatggttgccgtaactgtagccttgatgcgagtatcgatagccgctgcattaagcgccatgcctccccatccacaaataccgagaatgccgatgcgctctgcatctacatcgtcacgggtggaaagataatcgaccgctgcactgaaatcttccgtattgatgtccggcgaagccacataacggggctggccgctactttctcccgtataggatggatcgaaaacaatcgtcaggaatccacgttctgccaatgtctgcgcatacaagcccgaagcttgttccttcacggcaccaaatgggccactgatggcaatggcaggcaatttacccgtcacattcttgggtacatacaaatcggcggcaagtgtaatgccgtaacggttgtggaaagttatctttttatggtctactttatcactctgtgggaatgtcttgtcccactcttgaatcagattcaaattctcttccataaatttattatcattattaggattattttctgttgcagacaaatgtcctgcagcacaaaggctaataaccatcgccgcacatatgttttttaccatgttcttcatctctacttctttaagtttcggttggaaattcatttcttaatccattgcttgacagtttcccggctcgctccattcagcagcctgccttttccccagtttatgccggggtaattcgtctgcaattccttttctgcattagaaatactgctgcttcccgaagtggcgaatggaataaccgttttacctgcaaaatcaccgctttctataaatgtattgacgattcttggagccaaattccaccaaataggaaaaccgatataaatggtatcatactccgcgagactccccaatttagaatacaatgcaggacgcgatttggaatccgacatctccacactgctgcgcgaagctttgtcgtgccagtccaaatcagcagccgtgtactttttcgcaggctgtatttcgtagagagtcccatcgacagtttcttccaccaacttggcagcccttgccgttgttcccgttgccgagaaataagctaccagtgtcttaccaccttttttctgtgcgttaacaataatagacaacagcataaccgccatcataaacaataccaatcttttcatacgatatattatttagttgaaacatataaatccaattgttatagcgatacaaaagtagcgggtattattattacataggtatccagattactgattatataacccaaattactgatagatgtccgagaagagaaataaaaaatcccgtaaaaccttgattttacgggatttgtcatactttgagtcctttttgtctttggagttctgcggagagacagggattcgaaccccgggtgcctcgcagcacaacggttttcaagaccgccgcaatcgaccactctgccacctctcctaaaacgtccttttcgggaagtgctttcctctttaaagcggtgcaaaggtacaaatcatttttaattctgcaaacttcctttctcttttttcatgaattaatagtacttttgcaccatgatatatccgcagaactttgaacagaaaataggtttcgaccaaatacgccaattgctgaaagaaaaatgcctcagtacacttggcgaagaacgggtgatggacatggcattctccgaccactttggagaggtggaggagcgtttggaccaagtcactgaatttgtacgcatactccaagaagaagacaacttcccggcacaatacttttttgatgtacgtccgtcactgaaacgcatacgcgtggaaggcatgtatctagatgaacaagagctctttgacctgcgccgttcactagaaaccatacgtgatattgtacgcttcctacagaaaagcgacgatgatgaggaagagggcacttccccctacccttgtctgaaaagactggcaggagacatcaccgttttcccacagctcatagcaaaaataaacggcatcctctctccttacggaaaaatcaaggacaatgcctctacagagttggcacgcatccgccgggaactggcaagtactatgggaagcatctcccgctcactgaacagtattctacgaaatgcccagtccgagggcgttgtggacaaagacgtaacacccaccatgcgtgacggccgtctggtcattcccgttgcaccggcactgaaacggaaaatacgcggtattgtacacgacgagtcggccagtggtaaaaccgtattcatcgagcctgccgaagtagtggaagccaacaatcgcatacgagaacttgaaggtgacgaacgcagagaaattatccgcatcctgacgggcttctccaaccagttgcgtccctccatccccgacgtactgctatcatacgagttccttgccgaaatagacttcatacgtgccaaagcattgtttgccgagcaaatatccggactgaaaccggctctcgaaaacaagcaactgctggactggacaatggcggtacacccactcttgcaactttctctcgccaaacatggcaaaaaagtcgtaccgcttgacatcgaactgaatgagaagcaacgtatcctcatcatctccggtccgaacgcaggcggcaagtccgtctgcttaaagacagtaggcttattacaatacatgctgcaatccggactactcatcccgatgcacgaacgcagtcatgccggaatattcagcagtatattcatcgacatcggtgacgagcagtccattgaagatgatttgagcacctactcctcccaccttacgaacatgaaaatcatgatgaaaagctgcaacgaacggagcctcatcctgattgatgaattcgggggcggaacagaaccccagataggaggtgccattgccgaagccgtattgaagcgtttcaaccagaaacagacgttcggtgtcatcaccacacactaccagaacctgaagcattttgccgaagaccacgaaggtgtagtgaatggcgccatgctctacgaccgccatctgatgcaggcactgttccaactacagataggcaatccgggcagttcgttcgctgtggagattgcccgcaagataggtctgccggaagatgtcatcgccgatgcctcggaaattgtgggcagcgaatacatcaacgccgataagtacctgcaggacattgtgcgcgacaaacgctattgggaaggcaaacgccagacaatacgccagcgtgaaaagcacatggaagagaccatcgagcgttatcagaccgaaatcgaagatttgcagaaatcccggaaggatattctgcgcaaagcgaaagaagaggtggatcaactgatgcaggaagccaatgcacgcatcgagaacaccatacgctccatcaaagaagcccaggcagaaaaagaaaagacacgccaggcccgccaggagttgacggacttccgcgaatcaatggaagcgcttgccaacaaggaactggaagaaaaaattgcccgcaagatggaaaagctgaaagaaaagcagaaccggaaaaaggaaaagaaagcaggcgatggaaaagagaacggaccgtctgcccaggctttggcagaacagcaggcgcggaaagaagcggaacgcctcgcggcaatcgtccccggctgcaacgtcagaataaagggacagacctctgtgggcgaggtaatggaagtgaacggcaagaatgcgattatcgcgttcggcagcatcaagactaccgtcaagctggacaggctggaacgcaccaacgcgcagcccaaacaagctgacgtgtccgccaaaagcactttcatcagcgtccagacccaagacagcatgtatgagaagaaactacatttcaagcaagacattgatgtccgtggcatgcgtggcgacgaagcgctgcaagccgtcacctatttcattgatgatgctatcctcgtcggcatgtcgcgtgtgcgtatccttcacggaacaggaacgggtatcctgcgcacgcttatccgccaatatctggaaaccgttcccggagtgcgccactttgccgacgaacatatacagttcggcggagcaggcattaccgtagtagacttgagttaatggataattgacagttgataattaaatcataaatctgaaatcataaatctgaaatatatgaaatcaatcaaagaactctaccgtatcggtaccggtccatccagtagccacactatggggccgcgcaaggcagctcagatattcctggaaaggcatcccgaagcagccgccttccaagtaaccctatacggaagcctcgccgctaccggcaaggggcacatgaccaatgttgccatcaccgagacactgcaacccgcagcaccggtagaaataatctgggagcccaaaatattcctgcccttccatcccaacggtatgaaattcgtctctttggacagcgaaggcaaggagaccgaccaatggaccgtattcagcgtcggcggcggtgccctggcagaagagaatgatggagcatcatccgtaaacaccccggatgtatacgaaatgaacagtatgaccgaaatactgcaatggtgtgaacgtaccggaaaaagttactgggagtacgtcaaggaatgcgaggaaagcgacatttgggattacctgcaggaggtatggaaaaccatgcaggctgccgtaaaacggggattggatagtgaaggagtcttgcccggccctctgaatctgcgccgaaaggcttctacctattatatacgtgccagtggctacaaggcttccctccagtcgcgcggactggtatttgcctatgccttggcagtaagtgaagaaaatgcgtcaggtggggtcattgtcactgcacctacctgcggttcgtgtggcattgtaccggcagtgctctatcatctgcaaaaaagccgggagttcagcgacacacgcatacttcgtgcccttgccacagctggactgataggaaacatcgtgaagaccaacgcttccatttcgggagcggaagccggatgccaggcagaggtaggtgtagcatgttccatggcatcagccgcagccaaccaattgtttggaggcagtccggcacaaatagaatatgccgccgaaatgggattggagcatcatttgggtatgacctgcgacccagtttgcggactggtacaaatcccgtgcatcgaacgtaatgcctacgccgccgcacgcgccttggatgccaacctttactcctccttcaccgacggcatgcaccgcgtgtcattcgacaaagtggtggaagtcatgaaagaaaccggaaacgacctgccctccctctacaaagaaaccagcgaaggaggactggcgaaggattataagccgatgtagttaaggataagggattaaggattaagggattaagttttcaatatgattgcacaacactaatgtccttaatcccttatccttaactcttctctaatcaagttttaccggccaatgcgtatcatccctattaccgctcacatcttttgtctgtagcaagccgccttcttccgaatagaacaattgatactctgcatttcccttttcaacttcaatgacaaactgcataggcactaccggatactccaaaagaacaatctcctctatcttccaaccggcatactcactggcgctgaaagaggtctgtactgttcccggaagattattccaaagcaattcggtttccgtcagttgccattccgcctgattattgaaccatacatccttttcctgcccatccactttacaatctgcaacgaaatagccccctttctgttcccattccacatggattgcggaagggtatttggacttcaatgcttgtgacattgcttcgggcactttgacatcatccttgtcgtcatcatcactgcatgcaccaagtgccaaggcggcgatgaacatcatcgccaacatttgaatcttcattctcatcatttctctataaagtttaggttaatagttactggagaatcaatcgtccatgctgacgaactttccctttttgttgaacttcaaagagtagtcattacccaattcaatttccacaccggtacgtccgcgttcgattttagtaataatctctctcgggaagttagccttcacatactcctttaccggaaccggaatcaatgcttcgggaacagcggacttcttgcaatccacttccaaccaatttcctttcttgtcgaagtctatttccgtacagtctgtcaacagcacttcatattttttagtctgcaatatttcactttcaatcttgatgtgtgaaatgtgcggtttcgagaaatactggttgataaaattgcgtgccgtcagcggaagctgcttggtatcctgagtgatgacatcaccggcaaaggcaaactgaacagctacaagagccaacacaagaatagacaatactttcttcataatcgttattttttaatgttactaataaatttcatattattcacactgcaaataacggtagagaattaggaaagatttgggaataaccgcagttaacagtaaattttactttctttaaccagacggaaggtatgcataccgtcctgccattcatacgtgagcttcaatgaagacgacaacgcaatggaacgcgctatggcaagccccagtccggtggagtccttcttgccatccatgccatgatagaaacgccggaacaacttctctccatccaaaggggcatcccccgtattcctgatgaccagagaagcgggagtagtaaacacctgcaactctcccccttccctattgtgcagcaacgagttcttcaccagattggaaaccagtatttgcgccagcgaatggttgcaacggatgataaaaggctgctcctcccgttttcgtatcagtctcacctgcttatgttcatagatatccatcaggtcgggcaagagttcatccaatatctcatccaccgaaacatcttccatctcggtatactgcccgttctctatacgggaaagcaacagcagggacttgttcagttttacggcacgccccagcgtggcatatatctcgtccagctgctccatttgctgttccgtcatcccttcactctcagccagcagttccacttttcccctcacgatggcaagcggtgtctgcaactcatgcgaggcattctcgatgaactgcttctgctcctcgtatgccttgtagctgcggttgcccatatccaatgcagcatcgctcagctggcggaactcccgtatcttcgtcgggttgtccaatggaggcacctccttgccgggctgaatgcagtgcagccagtcaagcaacctatgtaacggacggaacactcccttcagcaccaactggatgccgatggaagtacagatgagaaacagcaggaacagcgctcccagataccaaagcatagcctccaccatgtcatcccgctccaaaatggaaatcatcagtttcaactcataatattgcccgtcgggcatacggaaagcggtacacatgacacgtaccggttcgtcttcatcctccagttcgatataaaccgtagcatcatagaacacttgtctgtaatgccgcccttcctcttcggatataggagtgaacttatagaaagacatcaacgagccttccgtttcgagtatcgaggggtcgtgaagcgcactctccatcaatatctcaccgtaattctccaacgtatcgtccgtctcatccaccacctcgtcaatgattgcgtaatagaacagcacaccccacactgccatcaacagaaacagcagcaatgcaagtttgcggtaggtgtagctcagcagcttcatcgttcggagagtttgtagccgaatccatagacagcctttaattctatggtagcctcagcttgtttcaatttcttacgcagattcttcacttgcgagtagataaaatccaacgaatccgcctggtctatattgtctccccacaccgactcggcaaggctcattttattgatgacccggccggggttgactacaaaataataaagcaggtcgaactccttgcggttcagctgcaagggttttccgtttatctctacctgccgtttgtcggggtagagcaaaaggtttccaagggtgacggtcacatctcccttcgcctgccgccgacgtatcaatgacttgacacgtgcattgagttctgccagatggaaaggctttgtaaggtaatcgtcggctcccagttccagcccgtccaccttgtcgtccagcgagtctttggccgagataataagcacactgtcactgcggtgcagccgtttcagctcacgcagcaagtccagaccgctcccgccaggcaacatgatatccagcaaaatgcagtcgtaatcgtagtcattgattttatccaatgccgaaaaatagtcggcagcggtctctacaacaaacttttctttcaagagcgaagtgcggatggtttcccgcaaatcttgctcatcttctacaatcaggattttcataccggcaaagatggtctacaaaactggaaacaatctggaaaactatccactaatcaatgctgtctgtctgatagtcctccatcagttcttcttttgccatggagattttcccgtcagccgtaatggtcagtctgatgggaacataaaggtcggattgcggatagcagacgctggccgcgtatatgattccttgcggagtggtcttgtcatagaccagcccctcaagaatagagtacttcatgaacttggcatccaccaacgaagcaaaattatctttggtgaacactttatccaccacctgcttcccgccgcacgtgatgcgcaaggtgatacggttatccacaaatttctccccctgctcgtttttcactatcggcagagattcatccggccggcgcactacagaagactgatactcttttcccttatacgtaaaggatgtttttacatcggacacctgcatgcgctgtgggccggcaatttctgtactatcctgcatcaatacctgcgtaccgtctttcttattcttgtcttgcgacgaacaagcagtgaagaaaatgaccgatgcacacactaaaatatagactatattcttcatcgttctgttttttagtagttgaccggacaaaaatagtacaaattgaatgcaatagaaaatttattttcttttagattccatttttgcttttctatcctgcactttcttgctgtatgcagcatattgttcttccgtcataatcttccggagttgtgaatcataagcaatacgggcagtcttcatctcttcacgcttcttttccatctccgcttttttctgcgcgcgttgctcatccgtcaattgatggcgcttaccatctctcttatgatgcttgtgtgctttggcacgatgcatcggcatatctcccattttctcaaccaatgccagatttgcctccagcagttgttgtttctgcgtatcgttcaaggagtactctttcaccatccgttccgtcatgcgctcggcacggactttcggttcgggcattttatcactgtggcgggcatgttgtgccattgccatgccacccatcaggaaggcggccatccatatcagaactattcttttcatcatttttctctttttttaattaataccttatgttagttatacctattgtgttgcaacgtatctatgacaaaaacaaaagcgggaagtttaaccgcaacttcccgctttaacataataaatgaggttgaaaagaatattaaggttcgtccagatactgtacgataagactcacctgcttcggcatgaatgtccgtgtccttacattgtacccggtatgcgccaaggcttcatacagttcatgattccgttttatccaccgcgtcagggtgcggatggcgcaacgtgcagtagcattggggcaatagaggcatgccaaatctttctttttataagtcgtgatacgaaagccattttctgtttccatagcagtttgtctgatttttaaatgattgatgtaaagatacgatattcaaaaggcgaagtcaagtatttcaaggagaatatgaacctttttctgagaaagttcatattctccttatttacagaatgtttatcctaacggattttctccctggtcgccatcggaaccgccgccatccggatttggtttggagctacccccgccagaaacggtgccgttgcccgaccaatccatcttctctacgctggcgcgggtcagcatgtccctaaagtagaagcccggggtgaagataatcttgcggcgataaatcgtgcttgccgtcacgtcttccagtttgtcctggctcttagcgttgatgccgggacgaaaacagccgaactcacccagctgtaccgaaaatcccttgttgatatccatattcaaggtgtcgatcaatccgtccagcaccaacttcaccacaccgcgaggcgccatgcctatcttggaaacctcgtcgcataaatccttaaaacctaccacacccaaagttttcatctgcgccacgtacttttccgtttttgtctcgtcaaaaccgaatactctcttttttacttcataattcaaagccatagttttttaattttaaattgattaataaaagtcggtcttgttcgctcgtcagtctgcaaaacctgtttctttgtgaccacgatgcaaagatacaacgggcagaaaacggggtggtgctttaacggaggtttaaggaggttttcgtaggataaaaaaggatattggagaaaaagaaaggaactgatagacaatgactaagaaattttattccttaatcatacattgtttttatcctttacggcatctttaattgacagcgtaaaaaagttcaagttcttttctctctgaatttgcgcttgcaaactccaaactcttttttcccaaaaatggatagtggtagtttcgtgagccgacaggacatagggcaatgcaccttccacatgaaatacattgaccttcatctgtctttatggggttctccgacgcaatggcacgtgtcgggcactcttcctgaataggacggcacgcctacgaccaacaattcatcgcgtcccaatctcaaaccgggggattaaaacattactcgtaatgtcatgttggatattatcggcgtgcagctgcttgacgataccctgcacgatggctttggtagtaaatgtagcactgaaaaaaacagaatggactttatgtatctccataaatcttaatttatccgattaaatttctaataaccgtaaatttattggtatccgttcaaggtcaggcagaagaagtcactgtcatcatacggataatcgtattcgatggggagttcttctttctctattttcttgaatccggctttctcataaaacagatgtgctctgtccgtattcttgggggtgtcgagaatgatttacctccagctttttcaatatgcggaataacagccctttatccatattgagctcacgggatatgtcctttgcatttcgattcggatgcaaatacacatcttgaattttacctctttctggcatacaccacactcggccccatcccatgcctcatcagcaccccttcttctataaacctattcaaatcgacaaccgcctgcttataactacgtcctgccagccgtgcatactgagagcgattgatgcagggatactgctgcaaatactcatccagcaactgccagcgctgctccacgcccaacgcctcatcggcagacgaagcaggcgccgatgccgattgcggacaacgctccaactgcatcttacctttcaaatccttatagaactccctgcccagacggaaattcaacccgcgcaaagcgatggaggcagcacgaagctctttcttgtccgtcgcctggcgggtacaactcaaagagggggtgaagtaacccagttcgcccagctccaccgtccagccattggcaaggcagtcgcgcaactcgtccataaagcctgccatcgctccttccagcaggctgcggctgaggccggtgaaaagatgtacacgctcgataaattccttgcggtcgatggtgcccttggggacaaagcgggcataaagggattgttgctcgccggtctggcggacgtcgggtttctcgaaaaggtcgtaatacgcactcatatatattctgtttttaaatggtcctgcaattccgtcatttcttcttccacggcattaaggagaagaaatgctattctttaatcattccaccatggagaaaatatcattccaccacggaagaaaaatcgttccaccatggtggaacgattttttccacacgatggaacgatttaatagtagcatacaaatatactaatcgaaaggaggaaaaacaagaaaattcccataaaaaacatatctttacgctggaaatgaaacatataaaaaatacacaccaaactcactttagagtcatgaagaaaatatatcccaaaaaatggttggaactgcatccgtacaagcagacaaacagcgttgaccagtactacgtcggcattgcaaacgaaatccacaaaagactttactcttcaacgatagccgacgccttcgaagaagaggaaaacatacgctatacaagcctctgcctcgccgcatggtttgaggacgtcatctcccagaccggcatctggcaggcattcactgccgagtgccggaagcgatacggagcctatctgcccttctaccccatcaaaggcgattattttccggatgaaatcaatctggaggacatacgctttctgctttggcaccatatacaatatctgtgccggggaataagcgccatcaaccccgagaatcccggaatagagcagactgcacaagagatatacggactgcttgcagaggaatacgaaaccgctcccgaaaatgaaaggatgcaggaatttctataccactctgccatgggagaagaagacttcttccactaccgggagatactggattggtttcactaccaatgctacttcaacatcgaaaatgtcgcccaatgccgggacgaagctgaacggttgctggatgatgaaaagattactcccgaaatggcagagaccctcatatatgccacacgcacctcactgacgttcaaaggccgccgcaacctgctgtcgctgacctcaccggaatggctggctctcatcggaaaagcccatcccgaacatcagctttggggcaaggtgaaggtacggaaaaacagttgctatctgctggagaaagaagatgacaggtatctgtacgtcaaagatttgtgcagtgaggacgaaggcgaattcaagataaccaagaagtccttgaacctttcggccatccgtagccgagaggtagggaaaagcacccttatctgcgaactgatttattttggcaacgcatggtggcagtgcggcatgcttctcgagaacaagtacaaccagaaaatggcggaatatgtggacgacttgacgaaacagaaagaaaagacgaatgaaaaggctgcattccctgatttcataaaagcatccggcgggaaatcttttgtattctgccaatcgcaagaggagatttctgattttctgctgaacaagatggactacaatttgaaagaaggcctggacataccacgcataaatacggaaaacggagccatgctgatggccaacccgcacaccggcctacatatccaattcaagctgtgcgaatgcatcaaatctccggacaaccccaattataataaggaggaagcagagaaaaacgccattatgttcatcgtcaacccagacattatcccctaccaattgagttgcatcctgcaagacgaaggcatgcttccggatgcttatctgaacagtttgcaaagaaaagaatacgggcaagagttcatacgcaagaatgcacacttcctgactgattatttccattatcggtgtcgggagaaagactttgattagttgaaaatggggggtgaataccacttttgacacatttccaactaccaattatcatagtgctttccagaacttctggaaatccttataccgtccgtagcacactaactggtcgccggcttgtatctggtcattttccggcagttcgttcagtacattgtgttccacatacgagacgcccaggcaattcttcaaagtctcggcacgtttcaaggcgagcatcttcaggccaaactccttatcgagattcaattcattggcataatagccaatgaacttgtccggaacggtgaacttgactacataataatccggtgccacgcggaaggtctccatatcggcaccgaattccagcaactgtaccagtccgcgtgcggcatcctcctcgggagtaagaatgcgttccagctcaaaggcctcgagcacggaacggtggacagcgtcaatggcgcgggcatagatatgctgcaccttcttctgcttcagcaaagccactacacggatggatgcaccgaaattctcgccgatggcaacaatcaccacatccacactgttcagcggcaatacggacaaggcctgctcgtccgtagcgtcgatgacaaaggctgtggcaatcttttccttcagactatccacccggccgacgctcacgtccgcacctatcacttcgtgccccagtgcagaaagctcttctgccagcacgtgaccataattccctaaaccgataataatatacttcatcttatttaattgattataatctgaccactcggatactgatacttcgtatgcttcttctgcttgatgatgccaagcatcagcgtaattagtcccacacgccccacaaacatcagcagtgccaccagcagcttgctgtcgtctcccaaccgcggggtaaggttcaaactggaccccaccgtgctcaatgccgacacacactcgaaggtaatggccaaaagcgacgtacccggctccagaatgctgatgatgaaaataaacagcaacaagacgccgaacgacatcaccaccgtggcattggaacgacggatagaatcgtgtgacagctcacggccaaacacctctacccgttccgtgccgcgcaacacagccaccagattcagcaccactaccgcaaaggcatttaccttgataccgcctgccgtagactgtgaaccgcctcccacccacatcagaaacagatatataagcaatgtctgtacccccaagcctgccaagtccacactggtaaagcctgccgtacggggacacgtggcattgaaaaacgcctgcgtccacttgtctgccaccgacatgccggcgaaggaggcattccactcaaagacagcaatgcccaccgtgcccagtaccagtagcaggaaggtgactatcagtacaatctttgtattcaggttgtacagatggtaaaaacgcttgccgtcccaatgccacgtacgcagaaagtgccacagacgacgcagatggtaaagaataatatccttgaaattcaccagtatggggaaaccgataccccccaaaataatcagcagagatatatagatgaagaacggattgtgccccgtcatcaccaacggattacccagatttccgggcaacgtggagaatcccgcattgcagaaagcggaaatggcatgaaaagcggaaaaggccagctcttcctgaaggtccatccccatcgtcccgtggatgtctccccagatagcaagcatccctattccttcaatcaccagcgtaaaggccagaatatagaccagggtggagagcaaggaattcaaggaattggaactcaccatgtcgcgcaccaccaactgattgtacaacgaggtattacccatgaagaacatggcaaagaagctcgtcagtgtcatcactcccagaccgcctatctgaatcagcagaatgattaccacaaaaccggtcggggtaaaagtggacgccacatcgacagacgtcagccccgtgacgcacaccgcactggtggatatgaacagcgagtcgacccacgatatgccgttcatcgtgcagcgcggcaacatcaacagccccgtgcctatcattatgattatcaggaaacttgcagccagaataagcgaagggttcgtacgccgccccaacaaccgtaccagcccgttggaaaggctgaaaaaggaaaacaccagcagcaggacaagatgataggccttgccatgcagaaattcccagaactgcaagatggcgccctcctcctccggacgatggaaaatgaccggaataagggtcagatagagcagaatggtcagtatccaggtgagcttactgaacgtgcgccgggtatccttgtattccagcaaaatgcgaagggtgacatctaccagaaaaacaatccacaccccatggtacaagcgttggagctgatgcgcctcgacctctgaaatcgtaaagccatgctcatagaccacgccgacaatcagcaggatggaggccaaataagtgatggaagtcattactcccactgtcatccgtacgtaagggtgaatccatttattttgatacaaaaggaatttatgataaatcttcataaatgcatcgattaatgaaacgcggcaaacttagacaaatataccttgatatacaaaaaacaaaaggaaaaagaaattggttcaaaaataatagctacatttgggcattgaattattaataattttaaccactatgagcaacaaaaagaaaagattcattctcccggaagaggaaatcccacagtactggtataacatacaagccgatatggtgaacaagcccatgccaccgcttcaccccggcaccaagcaaccgctgaaagcagaagacttgtatcctatctttgccgaggaactctgccgccaggaactgaatcagaccgacacgtggattgaaatccccgaagaggtccgcgaaatgtacaaatactaccgcagcactccgctggtgcgcgcttatggattggagaaagcgctcggcacaccggcacatatctacttcaagaacgagagcgtcagcccgatgggctcgcacaagctgaactccgccatcccgcaggcatactattgcaagcaggagggagtgactaacgtgaccaccgaaaccggtgccggacaatggggagcttccctggcatatgccgcccgcctcttcggactggaagccgctgtctatcaggtaaaaatcagttacgagcaaaagccctaccgccgcagcatcatgcagacattcggtgcgcaggttaccccgtctccctccatgtctacccgcgccggaaaagatatactgaccgcccatcccaactatcagggctcgctgggaacagccatttccgaagccatagagctggcacagaccactcccaactgcaaatataccctcggctccgtattgagccacgtggccctgcaccagaccgtcatcggactggaagccgaaaagcagatggaaatggcgggtgaatatcccgacaccgtcatcgcctgcttcggaggaggttccaactttggcggtatcgccttccccttcatgcgccacaacatcctcgaaggaaagaaaacacgctttgtcgccgccgaacctgcttcatgtccgaagctgacacgcggcaaattccaatacgacttcggagacgaggccggatacactccgttgctgcccatgtttacactgggacacaactttgcccctgccaatatccatgccggcggcctacgctatcacggtgcaggtgtcatcgtatcacaactgctgaaagacggttatatggaagcggtggacatcaagcagctcgaatcattcgacgccggttgtctgtttgcgcaagcagagggcatcatccccgcccccgagtcctgccatgccattgccgccaccatccgcgaagcaaacaaatgcaaggaaacgggtgaagagaaggtgattctgttcaacctttccggtcacggacttatcgacatggcatcctacgacaagtatttgtccggcgatttagtgaattacgagctgacggatgccgacatccagaagaatctggacgagataggcaatctggcttaatagatattcgccatactgacaagcggttcatagagtttctctatgtcctgcgagtccatctcaatctgtacctggtcccccggaatcaaacgagttcctgcggggaccagattttttccatcccgatgtacattgataatgacgcaacgctccggcagggacagttcgtccaccagtttcccgtccagataagaatccgtcataatctccactgaaagcgtatagcgtttctcttctttaaaatcgggagcatgaatcatatcttcatagagggagacgttggaaggcttcatttgcagaagttccgtaaaatagtaggtcaacccaccaacaaccaccgaagggtaaaagacctcaaaatgccccgtaatctccgtaatcagcacaatggccgtgagcggtgtacggaccacggccaccagaaaagccgacatggaaacaagcatgatataactgacattctcttgcccgatgacaccgtacctcactcctaccagaccgacaatctgccccaacaaccctcccgtaaccagcgtcggaatgaaactgccgcccggcaatccggaagagacagagaaaactgaaaagacaaaatgcaacaacatgacggccgtcacccacataatctgcgtactgccgttctgtgcctgggccagcagaaactgctccccgcctccggtcagattgacctgcatcagcgaaatgatgtaggccaccagcaccagatagaacatcttgacatacgccggagaattgactttggcatacacatgcctgaaagcattcatggtggaggagtagaacttcccgcatacggagacaatcaccgccaatatcaagaaatacttcatctggacaaagaaggcgaaaaccggttccgttacttctatcagatggtaaggattcacgggaaagaccatgcttgccacggctcctgccacaacacccgccagcaaggtagtgatggccgtcttaggggcatcgaagcgttcaatggattctattacaatgagcgaggaagccagtggcgctgcaaaagccgcagcgagccccgctcccgccccggctgccagcaactgtttctgttcgcctttcaggatatgggtccagcgagataccaggctacccacataagagcctatctgcacggaaggcccttcgcgtcccaaagacagccccgccgagaaggacagaatgccccctacaaacttggataccatctcgatgaaaggatgccggtaagtgatgcgcccgttaatcacgccgcgtgtctgcggaatacctcccccaccgataagcggcattttccccacgagccacatgacgaagacgagaatgccccaagaaaacagaaagagtggaatgtgccagtaccaggccggatgcgaagcgaagaaaccactgcggaggtggaacagataatagagaagatagtgatagggtacagcgaccagtcccgtcagcaaaccgacgaacatgctgacgaaatacagccgggcatccaccagcttcaacttccagatgtgccagccgcgtactgttttccagttcttgaccctcgtccaaagacgttctgccttatcccatagttccataacaaaacaactcccgttaacttgcgctttacaacaacaagcaacgggagttgttttatacagaaacattatttaccaaaatctgttctttgcaggattatactcaaatcccacgagcttcaattttcgtacaatgtcctctttctctacgttcatatcctcgcagagcgcgtccagcgaaggatagaaatcacgcagtttcatgttgatgaagctgtacagcatcaccgggtcctcaggtaatctcatagttacaatctttaaatttaaactaataccggggacaaaattacaataaaaaaacaaaatagagataattttagtgtggaatatacaacctacccgccgcaaacgattgagggccatgtttacggagcttccgtctgctctatcttcagggagaccttctcgataatcttgccaagctcctcttccagcggaatcacattaaagtcgccccagaaatcggcatcatacttgaagtcggtttcagagaagacggtatgcaccggcagccgttccgcacgcgggaagcgcgtcacgttctccccgtcaatccggcaggtcaccatctcgaaccaggtatacagagtgggattactgaagagcatgcgttttctcttcatcttgaagtaaaggtcgccacggatgtggtggacataataggtaccgttccagggtttgtatgagacggtatagacaagtttctccgttgtcagcctgattttcggagcctggcgtatcacgaaaagccgtgtggcggccttcacataccggggatgaatctcgaagcgggcacgcagcaaggcgctgttctccgagtctatatagagttctccgcagaacaaaggctcctttaccccacgtttctgctcaaaatagacgacgttggcagtacggtcgtccaccgatacgatgtcgcccgaagtataggtataaagttcctcgccggattccagcaagaggaagtctggaagattcttcatgatgtccaactgcagacatgcctccaccccggagctgattttggcaagcacactgtccgtctgctcccggttatctatcttgctcatcttgagcagtttcacctggtctttctgtccgggttccatcgtcggtgatttgtagaccttgaaaacggcctccgtcaggctctggaacttgttcttcagttgtacaccttcccggtagaaggtggtcagatagaccggagaagtggagcagttcctatcccggtgctctatcatctcgcgaagcagctttttaggctccaccaagcggataagcacttcttgcaaggaaatgactttcggctcaaggctcaggacattgctgcgtccttccaaagcagaggcttccaccgtttgccccacataacccagatgggagaaggagagcatgcagcgcctcaacgagtcgggcaggttgagccggaattcaccgttctggttggtaatgttacccagtgaggttccttgtgcgatgaccgacgcactgacgacgggctctcccgtctccttgtccagcaggattccggcaatggtggaatatgccggtcggggcggcaggggtaccgtttcttccatactcttcctttctgccgcccgtgttatcaatatatggttgcctaataccttcaattcgaggttccggctgccggttatcctatgaatggcctgcctcacggaacactcctgcttcctgaccctcaccactgagtcgttatggatgaccttactatcatagataaacagatagccggactgctccgagactttccccaacagcgcataaaccgttcccttcattccaggcagccggacgatgcggtccagcacatcgcctccgtccgctcttgcactgcctgccaggaagaaaatgaagagtggcaaatggagaatgaagcatttcattgaattcattgttccgacaatatcagtctattgccctgacgtgtacacttcaagtcgaacgtccagcatatcagctcggccacagactccggggagttattcgaaaattcgaccgtcagccgccgtttgcccagggttggcgacgcggcttctatctgccagccggcagactccttattgatggcacgcagcacatcctccaggcactcgtccttgaaacggatgttgctggtgtagcggtcaaagagctccggattctccgtctcgctgacgagcagactgcccccctgcaagataaccgtttctcccgcctctacaaagaccgtctgttcctcttgtttcagcagcaccttcaccttcccgcgcttcacggacaagctgaaggggaccccttcattgctcctgacattgaaagccgtgcccagtacctccacacgcacccttgccgtctcaatcgtaaaagcctgctcgggtttctttgccacatcaaagaaggcttcgccctgcaggttcacttcccgcttgtcttccgcaaaatgttcaggatacttcagcgtgctttcctgcgccagatataccaccgaaccgtcttcaagggtcttgaccagtgtgggcttctcccggttctcctccgtcagcaagctacgactgtccccaccttgttccggtacggcccaccatgcggcaaaacatacgattccggcaatcacggctgccgaaacgctcccccacttgaggtaaagcctgcggtgcgttgccgaagcgtgttccgcatctgccggcagcaggcagtccgtttcgaagcgggcataaagccgtacccatgcctcgtcggtccttgtcttctttttatctacttccatcattgtgtccggatataattatcaatttcatttcgtaaggttcggagtaccttggtcatttccgcttccaccgtcttgacggacaacgaaagcgacaaggcaatctctgcatatttcttcccctccatgcggtgcatcctgaaaatctgctgccggcgccggggctgcttgtcgagcgtatgccggatgagagtccgtagttcctcgtactccaaatgcgcgtgggggtcggacgaatagcccggcccggactccgtacggacagatgcccgatagcgctccttgacctcctgatgctcacaaaactgcacggcttcatttctcacagaacggtagagatagcttttcacggactggaatacttgtaaccgctcccggttcttccacagcacgtagaacagctcctccacaatttcctcggcagacgccgtatcacccgtgatgcccgcagcataccagcaaagaggggaataataccggcggaagattccttcgaacgcctttatatcgccctcctttattctggccagtatcatcagttcgtccagcatacacggtgttttttctcggttgctccaaatataaggaaaactatcagataatcaattggattgtttccgcaatttattgactgcattctccagggattccgtaggttctatgatattgtagttcctccagaagtcttcgttccaatactcatccaccaggtcgtagaatacctgcttccgtttgaaggtgttcttgttggagatgccggagagagggctttccgtcctgtcggtcaccaccatttcggagaaagcggtgtagctggaggagaacagtctttttttccagtcgcatttaaagcggatgacattccgtatatagttcaggtaagtcttggtcccctgctgcttgtaggtcaccagataggcgacttcctgcgggcggaaccgcaagccgacgggcttcttatgcagaatggcctccactgccttcacccggtttgccatgtccaggccaaactcggcacgtgtaaaggagagccgttcgtagtctatatacagtttcccgatgaacaaggcatacatcaggctgacccgcggacggaagctgactacatactgcatgcggttatccagattgacggggtcctccatacggaattcataatagtccagattgtccgtgctcaacagcgcatcgccattcttcacaatgtccagataaagggacaaattggggcctcccaccactttcacagccagcgtgtcactctgcttttggctcagcaggcggcggcctttcagcagctgcaccttgtcgcggtccacatcgcgggagttataatccgtcttatagacatccatcactgcctcggacacgctgatatagcggcggcgcttctgcacggtttcccgatagaaggcggtcagcatgttgtcattgccagaatagtttactggaattttcttgatggcctcttccactatgacgcggggattattgccatagaccacaatctcgctcaaaagattgggagccggtatcatccagatggtcagcccgcccgttttttcaagttcttccagagagaggtgtgtagtgagatagccgatatgggagacttccagtccacggaaagcttccgcttccgctactttcaaggagaatgtgccgtcggcattggtcaccgttccgatattgttgccgacaacagagacgttcacgttttcgagtttcttcctgctgtccttattcttgaccgtaccggtgatgacgagctcgttcactgccgcgtcctgcgccatcaacggggtgatacccgaagataagaatgcaaacaaacacccaagtgtaaatcctacaaagtttttcataaggcatgtttttaaggggtttctattaataagagcggtgagaaagataaaaccctatggaatggagagaaaaacaccaaaaaagtagtacgttgataatcagagagaaattttgccaagacattgccataggtttggcaaaactttgccatgcctatggcaaaagtttgccaacgcggtggcaaagtcttgccaatagtaaggcaaaaccttgtcaaactgttggcaatagcttagttgaattgttggggcttccgctggctcagaataacgtagatgatgaccggcgcaccgataatgggcgtgacggcattcaaggggataatacccgcttcgccgggcaagacgcaaatcaagttgcaaagcagtgccactgcaccgccactcaggatggtgaccggcaatagggaattgtgattggctgtccccaatatcatgcgggccacatgcggcacggccaggccgataaaggcgaccggaccacagaaggcggtggtgacagccgtcaagagcccggtgataatcaaaagccagttgcgcacacggcggatatttacacctagattttcggcatagcgctctcccagcaacaaggcgttcaggggctttatcaacaataatgagccgaacagtcccacaatggtgaccagcgcaaaggccggcatctgctgtagggaaactccaccgaagttgcccagcccccatatcatataggactgcaccccctctgccgtagcaaagaagttcagcagggcaatggccgaagaagcgatgtagcctatcatgatacccgttatcagcagcatgacattgctctttatcagcgtggaaaagaaaaggataagtgccataatcagcatggctccgataaatgcgccaagcagtacggagaagaagccggacagactgaacacccctgccgtgatgctgccgccaaacagcagcatgacgaaggccactcccagacttgccccggcgttgatgcccagaatggatggtcctgccagcggattcttgaaagccgtctgcaacatcagtccgcagacagccaatgcgccaccgcaaagcagcgccgtcagcgcttggggcaaacgggattcccaaaggatgaagctccagcttgccttctccccctctccaccgagcaggatacggaaaacatcggcaggcggaatcgaaaccgaccccaccagcagattgcccgcaaaaagcaataagattactactcccagcccgataccatatttccagcctttactcatagttacattatttagcacacagagacacggaggcacagagttttctattactttcacaaaagttccgtatctctgtgttcatcactccttcagtctgcaaaaatagcgcaagcctcccaaatctcctatttcgggatgcagaatctgtattaggtcggataacaaataatcgggacggaacggagtctcctcgtagaaaggaactttcgccgtattacaaccatagacattccgggtcttgaaagccttaaaaccggtgtagccgatataatccgcctccaaatcagcgtaggtcatatcgcggtcacggttgtacttcaccaaccagacgtcggcatcgcccgccttgtcgaaaacggtctcgaaagccagaggaacagagccgctgtgggtatcgtcggcaaaggcgtaacgcccgcaagcatcctgaaaaagccttcctatggtgctacgccctcccggtacgtaccatgccgagccacttttcaactcactgacaacggagaacgaggtggatgaaagttgcgcacgcatcttgaggcgttggtaacaactgtccacttcagcaaaaaggctgtcggcttgtggcgcaaccccgaagagcagtccgtagaaacgcatccactcggcacgtcccaaagcggaggtttccatgtagtcggcacattcgatgatgggaatatccagtttctcgatacggccataaccgccactgttctcgaacggagacagaaggatggcatcgggatgcaggtcgatgatgcgctccatatcgggattcataccgtcgccacaatcggcgatggcaccccggcggcaggcttcgtgcacggcgggtagtttgatgtacttcaagtcacagacaccgccgatgctaccaaacacacccagattatccatcagtccgcagtggacggaagagtagatgactgatttggagagtggggtacgtaccacagtacctgccggaagatgtgccgggagttcgcggtctttcgggaccagtatataggtatgtagcgtgtgcaacgtatcccaaggattgcgcaaggtggcaagggtatagccgggataggacattaaggtaagattctctgcataacgtaagggaatggtgtcaccgttggccaaagcagaggcagtcttgctccttcccccacaggaggaaagaaacaagactgcgaacagacagataagtaaactatttcttttcattgatattaattgaagaagatagcagaattaggattcatacctcctgcatcgaactgctctataaaggtaccgtctttcttgaaacgataaatggtgccgttcgtggtatattcagaagtaccaatatagaaatcaccgttattatcatttacttccaacatataaatcgtagaagttttcaacttttccggtatatccttcaagaaagaagcttcatccatctttccagtctttatattataagtaaaaaaagaagcggtaggattggtgtaatttgaataagtcaaatagagaatatcatcagtagcacacatacgggtggcactgcctaattccgtcaccttattgttggcagcagggtctatcatctgtaatgaatagccaatatcaacataattaccccatgaaatcaaaaaaaccttatcatcctcttcaaccaaagcattggggttcaaacctaccgtcaacgtctctttcaacttgaaagtacgcaaatctatcacctttacgtcattgtgataagtgctccaatcagcagtacagctattcgccacataaagcatatcctcgcagattgccacaccttccagattgtcgccaagtccggtcaatttatccactacctccaacgttttcgcattgattttagctacagctcctccgtagaaggaagcatagatatatccatcttcagcatcgatataacgaatgcctgcactgaggtcgttgtcgtctacaaacgaaacacgtttcaactccacacccgcagcattcagcttagtcagataattggaaccacttacagctatatatatttcatcttcatactcaatcatactctgaccaaggtcacccaacttggcgttgttttgagtctggtaaatatcactgatgaaatccgcatccttattgggtgcataaaaggcaagtcttgcgttattagctccccaaccaccctcgttcagaatatagacacgcgcctgcggcagtgtcaccttcgacccgccgtcatccagagaatcgtcatcgtcgtcactacaagatgccaaagaggcacccaaagcaagcatgcagagcataccgaataataaacttcttactttcataattacagttgttattgtttataattagtttttgttgttcataaatagattattcaaaacttgaaagtacccgtcaaccgccacgaacggcccggcataggataatattttatcacgtcatactgttcatcggtcagatttataatctcggcctgcaacagaagccggcaaccgcccaaagcaaactcatgagagaggctcatcgtatgctccagatagccctcaatctcattctccggaatgttctgcgacaaatagtaacgctttcccactcctaccgccgagtagcccacattcacccacggcgtttctacaatggcggacgcgtttccgctatgaagaggagtataaggcaattggtccttatagttcttcgcgtcggaatcggtcaggtcaatggccttttgccatgtatatccgcccgacataatcagtcttattttctccgtcaatggaacggttgccgccaaaatggcatccacacctgcggcatgcaccttgccgtagttcgccatcttccacgcataggtggtgggaaaagccacaatcttatccgtcacatcattatagtaaccgtcgagcgtaacggagatatagtcgaacacagacaatccggatttgctccatgtgataccgacattatattcgtctgccttctcgggtcgcagattacggttgcccagccggtagtaatagaggtcgttgaaagtgggcagacggaacgtactcttatacatcaaccggaaatacagcgactcgtcctgccaaggctgcatactgactgataaagagggggcaaagcgatggaagtcatcggggaccgtacctttctcggcatgctccgaagtggcagtatgcaccagcgaagccgtggccgtgagccatccttgccggtagcgtgcattgaaggcactgatggaagtatatcttgtagggaaaggacattccggcaaactgttgcgcaacttgtttatcaccccatcctgcgccaacgaaagggtcaaagcttccaaaggacggtagagaacggtcacggaaatataatattcgtcttgccggtgattttcccgataatatccgtcggcatattccttgccctcatccttatattggttccagccatgattatactttgcctgtgcctgcaaactccaccggggcgaaaaatgcttcctataacgtgcctgcacaaaagtattctcatcccaaagcgtttcatcggaaaggggattatagagcgtaaccgcccctggaagtccccggcgggaatagaagtagtaacccttcacatccagttcgctgtcatccttgaaagtatgataaaaggtagcttcgccctgccaggaatagatgccggagttgttacgtttctcttccgtcacgtatttcccattgaccagcgtgaaagggtaattaccgtccgccctcatataaccggcatctaccgccacgcgtgtacggcagcccagtttctgccaccagcgcagcgaggggctgaccatgccgaacgaccctccgcgcacccgtgcctgaaaagcggcattgcgcccgtcatcaaaatgaggtttttccgtctctatgcccagcacaccggccgacgcatacaagcgggcggactgtaacaagtcctccgactgcccgatggcgagcgaaagcatggaaacattgtccagcgaaaaacgcccgatatctatctgccctgcctgacaattgctcaccgccaccccgtcataactgacagctgtatgggctgctcccatattgcgtatggaaaccgttttcagtcctccaatgcctccatagtcctttacattggctccggcaaaacggcgtacagcatctgccatattctgtattcccagctggctgatatcctgccgtgacattgtctgtatgggtacggcagaagtcactttattgggcgacctgcgtgctgtcactgtcactttctctatctgatgcactttccccgtaatcgtatctccccccacctcctgggcagagagccggagtatacttgcacccaatgaaacagcacagaccagtaataccttagtccttcctgacatagaataaatgaagattatcttaaaccatttgcgcactgcccactttcctcgaatggacaatttttcgactttgttttgcaggtcttctgactcgttcccggtacatcgccttcccgttctttccgaagaacagtggcacaagtatgatacaccgagcatggaactcacagcagcgggactgttcgggactttcacccgattcccttttcatccgcttctccggatagagaacgcggaacaaaacgtgggcaaagataggataaataaaagaagtttcagtaaacaataaaacgaatattaccgttttaacagtcatttttttaactttgtaacataataaccccaaaatcgagttgccatgaaatataagttattggttcttgatgtagatggaacgctactcaatgatgaaagagaaattagtaaaaggacattagctgctctgctaaaggttcagcaaatgggagtgcgcatagttttggcatccggtaggccgacttatggactgatgccactggccaaaaccctcgaactcggcaattatggagggtttgttctctcctataatggttgccagataataaaagcacagaacggagaaatattgtttgaacgacgcatcaatccggaaatgctgccttatctggaaaagaaagcccgcaagaacggctttgccatcttcacctaccacgatgataccctcattacggatagtccggacaatgaatatataaagaatgaagccctgctaaacaatttgaagataatcagggaagatgaattctctactgccatagacttcgcgccttgcaagtgcatgctggtgagtgataaggaaaaagctctgatagggctggaacaacattgggaaaaacgcctggcaggtactctggatgctttccgttccgagccttactttttagaggtggtgccctgcggagtcaataaagcgaatacgttaggcgccctattagagcatttgggagtaacacgggaagaagtcattgccgttggagatggcgtatgcgatgtgaccatgctccaattggccggcatgggggtagctatgggacattcacaagattctgtaaaggtctgtgcagactatgtgactgcatcgaatgaagaagatggagtggccctggccgtagaaaaactaatattggcagaagtgcgtgcagcagaggtgcctcttgatttactgaacgaacgggcacgacacgcattgatgggaaacttgggcattcaatacacatacgcttcggatgagcgcgtagaagcaaccatgccggtcgactaccgtacccgccaacccttcggcattctgcatggcggtgccacccttgccttggcagaaaccgttgccgggctcggctccatgattatctgcgaacctgatgagattgtcgtgggaatgcaagtcagcggaaatcatatttcttctgcacacgaaggagataccgtaagggcagtggcaaccatcgttcataaagggcgtttatcccatgtgtggaatgtggacgtatttacttccaccaataaactggtttcctctatacgggtagtgaatagtgttataaagaaaagataaaataactgttataaactacgtaatgtaaatgcatgaaaatcaaaagggaacgagggggttaaccaattcctcggttttatccttacttttgtaaactatattagagagttatcccgaacaacaaaaagaaaacgatgcagatacgcaacaatacattgataacggaatgttcagcttatgatttcaaggaaatgttggaacgtaagaaagtgaagtcatggcttaaatccgtgtcggcttttgccaatacggaagcatcttctttcttcactacattctataatctgaattggggaaagaacgaaagaatacccgtagaagaagtggccgaaagggtaaacagtcccctcaaaaagtatcctgcaaacgaagaaagttcggtcgaaaagttcggtgtaaatgcgaaaatgttcggtgtaaacgacaaaagttcggagacaaggttcggagagagcacagatgcccctaaaaacataggaaagacagcacagaagattatcgatttcgtcatttccgatcctcctatgtcagccgaaactatggcttacaagattggtataagttctcgtgccgtagaaaaacaaattgcaaaattgcggtctatgggtatcttatctcgtgaaggtgcggactttggtggctattggcgcattgtcattaatcctcaaactgaaaaataagtatataagattgacttgaaattcaaaaacacaagaggcgtgcaacttaatggattacacgcctcttttttctataaaatcacctattgcaacttacttcacttcctcaaaatcagcatcctgcacattatcgccatgctttgtattatcctgagcaccgccttgttgacctgcattcatatcaggaccagcctgtgcaccaccctgagcaccgctctgggcatacatttcagcacttgcagcctggaatgccgtattcagttcggccatggcagaatctacggtagccaggtcttgagccttatgggcatctttcagcttctgcaaagcagcttcaatcggagccttcttgtcggcagggagcttgtcgccgagttccttcaactgattttcggtttggaaaatcatagagtcggcctggttcaacttgtctactttctcacgctctttcttatctgcttcggcattggcttcggcttcggctttcatcttttcgatttcttccttgctcaaaccgctggaagcttcgatacggatagcctgttccttaccggtagccttatctttggcagacaccttcaagataccgttggcgtcgatatcgaatgtcacctcaatctgaggaataccgcgacgtgccggagcaatacctgtcaggttgaactggccgattgacttgttctgtgcagccatcggacgctcaccctgcaatacatggatggtaacctccgtctggttgtcggcagcagtagagaatgtctcgctcttcttgcaggggatggtagtgttggcatcaatcagcttcgtcatcacaccacccatagtctcgatacccatagacagcggagtaacatccagcaacacaacgcccttaatttcgtccgtcaaaacggcaccctgcacggcagcacctacggctactacctcatccggattcacacccttggaaggaactttaccgaagaagtcttctaccaacttctgtacagccgggatacgtgaagaaccacctacaaggattacttcatcgatgtccgcattgttcagaccagcatcgctcatagccttcttacaaggttccaaacaagcttgaatcaagttgtgagccagagcctcgaacttggcacgggtcaacgtcttcaccaagtgcttgggcacaccgcctaccggcatgatgtacggcaagttgatttcagtgcttgtagaagaggacagttcaatcttagccttttcagcagcttccttcagacgttgcatagccatcgggtcttgagtcaggtcggcaccttcgtcgttcttgaactcctgaaccagccagtcgataattacctggtcgaaatcatcaccacccaggtgagtgtcaccgttggttgacaatacttcgaacacaccgccaccgaattcgaggatagagatatcgaatgtaccaccaccaaggtcgaatacggcaaccttcatgtccttgtgagacttgtcaataccgtaagcaagagctgcggcagtcggctcgttcacaatacgcttcacttcaagacctgcaatctgaccggcttccttcgtagcctggcgttgggagtctgagaagtatgcggggacggtaattacagcttctgtcacttcttgtcccagataatcctcggcagtctttttcattttctgcagaatcattgcagagatttcctgcggggtatagagacgtccgtcgatgtctacacgcggagtattgttgtcaccctttactactttataaggcatacggccgatttctttctgtacctggtcccagttttcgcccatgaaacgtttgatggagaaaaccgtacgggtggggttcgtgatagcctgacgcttggcaggatcaccgattttacgttcgccaccatcaacaaatgctactactgaaggagtggtgcgcttgccttcactgtttgcaattactacaggttcgttaccttcgaatactgcaacgcaagagtttgttgttcctaagtcaataccaataatttttcccatgatcgttatttttttatttgttattattctgtttcgacgtccgcctcagtggcagacgccaataaaaagacaaacgttgtgccaaattgttcagagcagccgcagatttatacttgtggcagtttgtctgtcagtttggcagaattaaaatcattttttctgtcggaaattaccatttgttaatttccattccattcaaaagctctacttttgtcgcccgaatcagagatgataaaacatgaacaacattaatcatttcccttgcatacctttaaccgttcctccatggagaaaatattgttccaccgtggagaaaatatcattccaccacgagggaaatatcgttccaccatggtggaacgattaaggattagttaacattgggcttaatcgtagcaacggaaatgattggttttcacatattaaagaaataaataagatgagtatggaaaaaatgagagacagtatcgacttcaagaacacggacatcaagacattgttccgcaaactattgctccctactgtactggggatgattttctccgcactattcgttatcaccgacggcatctttgtcggaaaaggaatcggcagtgatgctttggcggcggtcaacattgtggcaccgctatggttgttttctacgggtgtgggacttatgttcggcgtcggcgcctctgtggtagcctccattcatctgtcacacggaaaggtcaaggtggcacgcatcaatatcacgcagtcggtagtcatatcttccttgttgctgatgtgcacctccaccctattctgttcatttgccccgcaggtggtaaagctgctcggagggtctgaacggctcacgccattggctgtggaatacatgctttggtttgtgcctttctctctgttcacggcattgctcaattcgggtatgttttttctgaggctggacggttcgcccaacttcgccatgatgtgcaatgtggcggctgccgttctgaacatcctattggattatctgttcatcttcccctttggctggggaatgttcggtgccgcactggcaagtgccataggtaccacggtaggtgcattgatgatagtattctatctgatgcgccgccggtgcgcactgcgcttccaccccattaagatgagccggaaaagcatgcaactgatgcgccgcaacattggctatatgtgccgattgggttcctccgccttcttgtgcgaggtggcgattgcctgcatgatgtttgtcggcaatcaggtgttcatccattatttgaaggaagacggagtggcggcattcagcattgcctgctatttctttcctattatatttatggtatataatgccattgcgcagtcggcgcagccgattatcagttataactacggcctgaacgagagccaacgtgtccaccgcacctacttgctggcactgaaaacggccataggctgcggtgtatgttttgccctggtcacaatattctgcagccctgaaattgtcggtatgttcatagaccgcagttatccggcttatgccatagcggtaaaagggttgcctttgtatgccaccggcttcgtgttctttgccgtcaacatcgtatccatcggctatttccagagtgtggagcgtgccaaatacgccacagttatcaccctgctgcgtggttttatcctgctgacagcctgctttttcggactgcccctgctattgggagaccggggaatctggcttgccactcctcttgcagaaatgctgacaaccctctttatcctcgtgatttacatatccgggaaaaaggagcataaagaaaaatccgtatctttagacaagatgggctgtaccccaacataactttttcatgcaagcataaaagtcctgtcttcggtttacactatctttgcagcatggaaactatgataaagaaattctgcaagaagtataaactaccggaaaacactttgcacgaacttctgttacacatggcagaagttcgtttcagcaagggagaactcattatcagcgaaggggaaaggaacagcaacttctatcttttgaagaaaggcatctggcgcgcctactacctgacagacggcacggaaaactccctttggttcgccgcaccgggcgacacagctttctcatcgtggggatatgtggacagcgaggtttccctcatcaacatcgaatcagtgaatgaaagcatcgcctattgtatcagtaagcctgagctggaagcccttttttcgcattccatagacatggccaacttcggcagaagaatctttgaacgggaaattctgtcggtagacagttccacagtagcctacggcacccctcccactgccaaagaaaggtacatgacgctgatggaaaagaatccggaactgctgcaggatgtaccgctcaagtatctggcttcttatctctacatcactccgcaatccctgagccggatacgcgcaggattaaagaaaaagtaaaagacctttttatgtcaagatgcaaaaaaggctcttagcagattatttctgtaagagcctttattatttcaacctatcttgtcagttcttcaccaacaccatcaccaggttattgtcagcatcgtacagcccgatgcctccgcctgccagcttgccaaaagactgaacggaattcaaggctttcagcacacggccttccacctccatatcagggcatgccatcatggtactgataacttgcgggaaagagattgccgacgggttttcatcatcaacctggaaagcgccgttaatcagattgcaacccgcattgccgtgcaagcgcttttctgcaatattaaattcaatgaacggctgcttctccattccgtcgggaatagcctcgcccgcagcctcactaattatccactttccttccaaatcagacaacttggaaacggattctttcttctgcaacacgactatgggacgattggaagcaccgcataaagctatattttcctttcccagcttcttatactttttcactttgttcaaagccgacaacacattattttctacagtcatatccggacaagccatacgggtacttgccaaagcgccaaggtcaatcgtgccgggcttggcattcacgtcaaacgaacccatcatacggttgcaaccactgttgccaaatacttttccagtctttgtgtcaaaaccgatatagggaaattcctgacccggagcagggactacggcagtaccattcacttcaataatattccactcaccgctgatggaagaaagagttgcagcatttttggttgatgcacaagaagacaagcccatcaacacgcttgccatgcatagggaaacaaatacttttttcattgttattcgttgtttaagttaatttattcaaggggcaaatatatagaaaataacccaaatgcaagtaatttgtttaatatttgaagcatttacctcaaagtatttagcaggattttaatgtttatctaagaattaacccttatatttgctctccgtattttttataaacctaatataataatatagtacaaagaaatgggtaaagttcttattatcggtgcaggcggtgtaggtaccgttgttgcgcacaaagtggctcaaaatcctgatgtgtttacagaaatcatgatagccagccgcaccaagtccaaatgtgacgctgttgtcaaggcaatcggtaacccgaacatcaaaaccgcccaggtagatgccgacagcgtggacgaactggtagcactcttcaatagtttcaaacccgaaatcgtcatcaacgtagccctcccctaccaagacctcaccatcatggaggcttgtctgcaaagtggagtcaactatctggataccgccaattatgagccgaaagatgttgcccactttgaatacagttggcaatgggcctataagaaacgcttcgaagatgccggactgaccgccatcctcggttgcggtttcgacccgggagtgagcggcatctatactgcatacgccgccaaacatcattttgacgaaatacaatatctggacatcgtagactgcaatgccggaaatcatcataaagcattcgccaccaacttcaatccggaaatcaatatccgtgagattacacagaacggccgctattatgaaaacggagaatgggtgacaaccaagccgctggaaatccacaaagacctgacttatccgaacatcggtccgcgcgactcctacctgctttatcacgaagaactggagtctctggtgaagaatttccccaccatcaagcgtgcacgcttctggatgacgtttggacaagagtatctaacccacctgcgcgttatccagaacatcggcatggcacgcatagacgaagtggaatataacggcatgaagattgttccgctgcaattcctgaaagccgtcctccccaacccgcaagacctgggcgaaaactacgaaggcgaaacatccatcggttgccgcatccgcggactaaaggatggcaaagagcgtacctactatgtatataacaactgtagccaccaggaggcctacaaggaaaccggtatgcagggcgtaagctataccaccggtgtgcccgccatgattggtgccatgatgttcctcaagggattgtggaaaaaaccgggtgtatggaatgttgaagaattcaatccggacccgttcatggaacagctcaacaaacaaggcctgccttggcatgagattatcgacggagacttggaagtttgaaattaatgattaaacattaatcattatccactaatcattaaacattaacaaagtgaatataggagataaagcacccgaagtattgggtatcaacgaaaaaggtgtagaaatccgcttgagcgactataagggaaagaagattgtactttacttctaccccaaagacatgacatccggctgcacggcacaagcctgcaacctgcgggataattatgccgacctgcgcaaagccggttatgaagtcatcggcgtcagtgtggacagcgaaaagtcacaccagaaatttattgagaaaaacaatctgccttttaccctgattgcagacaccgacaagaagctggtagaacaattcggagtatggggcgaaaaaagcatgtatggccgcaaatatatgggaacgttccgcacaactttcatcattaatgaagaaggtattgtagagcgcatcatcactccgaaagaagtgaagaccaaagaccatgcggcacaaattttataatcattaaacattaacaacgtggcaaaaaaagacgaactgaattttgaaaatggcagcaatctggcatcgggcgaaaaactgaaagccttgcaggctgccatggacaagatagaaaagagctttggtaaaggctctatcatgaaaatgggcgacgaaagcgtcgaacaagtagaagttattcccacaggttccatcggcctcaatgtggctcttggcgtgggaggatatccccgcggacgtatcatcgaaatttacggcccggaatcttccggtaagacaacccttgccattcatgccatcgctgaagcgcaaaaggcaggaggcattgccgcattcattgatgcagaacatgctttcgaccgcttctatgcagcaaaactgggtgtggatgtggacaatctgctgatatcacagccggacaatggcgaacaagcactggaaatcgcagagcaactgatccgttcctccgctattgacatcattgtagtggactctgtggctgcattgaccccgaaagctgaaattgaaggcgatatgggtgacaacaaagtaggtctgcaagcccggctcatgtcacaagccttgcgtaaactgacggcagctgtcagcaaaacacgcaccacttgtatcttcatcaaccagttgcgcgaaaaaatcggtgtcatgttcggcaatcccgaaacaactaccggcggtaatgcactgaagttctatgcctccgtacgtcttgacatccgtggaagccaagccatcaagaacggcgatgaagtaatcggcaagcagaccaaagtgaaagttgtgaagaacaaggtagctcctcctttccgtagagcggaattcgacatcatgttcggtgaaggcatctcccgtgcaggcgaaatcattgacttgggtgcagagcttggcatcatcaagaaaagcggctcatggttcagctataacgagacgaaaattgcccagggacgcgacgccgccaagcaggtcatccttgacaatccggaactggcagaagagctggaagggcttatctttgcagaattgagaaaagacaaataacaaaaaaacttgccaatagaaaaacaaaacattctattggcaagtttccctaaaaggttaccgcttcctattccatcttttccaaacgttcttccaaagcctccatacttttttcaaaacgtttccatgtatcggtatccatttgttctttcagatacttgttgtctttcagcttggctacattttccagccctttcaatgccagttcttgcgaatgcttcaattctccaagccaatcgcggttcttcagcttctctatctcagcccagtttatatccggaagctgtatattcacattgttaccattccagctggtattctgatacatcatgatattctgtatatccttcaaagtcatatcaccttccaaataaacaaatttcagagtagctgcaccatctacaatcataatcagctccttcaccttttcccctttacggctcatgtagaattcagaactggagactgttcccttctgcttcatcagcaattcatatctggaagactgcaccaaagaacgaagatccttacgcatttctttctttacattattatccattgtagaaagtacctgcacagagttcaactgtccggacactttcccaatataaacatctttagtaaacaagttgggattcgtttctatcattgccttggatatgtagacggacgacacgcctttcatatctccatacttgttgaataggttcttctgtgcctggcaaagcaaaggcaacatcagcagtacacctgccaaaatcattttcattgttttcatatcagattattgttgaatttcttttcttacttcctggttcaccttcgttacgtctatccgcgtttcctctatctgttcaattcccttgttcagattcgcagacacctcgattaaagtggcctgcaatgccttataagcagcttccggatcagagaaagtgtcctgaggtgtaggaggacgcatatcctctcccatgttcgtaatgccataacctacacctacaagaaccagaatggtggcagcaatacctcctatccagcgccaattacgtttggccttgttccggtggaaaaaacgttgttcctcttcagccttttcatcaatcatccggctcagtttatcctccaatccggcgggaacattatccaccacttccccgggaaaaaagctgagaaagagtttcttgtccttctgcaagtgctcgggcacttcttcggttctgaaagcttccttcaacaactcttcttcctgctcgttggtattcccttcataaaattcggcgagcagcctttcaatttcctcgactttcatagttactccatttattaaattcctcacgtatcttttttcttgcccgggacaacagtacacggacattggtagcattcaatcccgtgacctgctctatctcttcataagaacatcccttgacatcacgcaacgttactattttctgctgttgcaccggcagacgggcaatgatgtgccttacctgctgcgcttcatcccgcacttcaaagttatctgcttgagacacattatgcacttcggccaactccacgctctgtctgctcaaagtatactttcctgaacgaagcaaatcaaagcacatatttttcaccagagtaacgctgaatgcttccggattactgataatggccagtccttcccgcttgtcccacaacttcagataagcttcctgcaccaaatcttcagcgtcggcagcattctccaacagcctataagctatgcagtacagcttgcgatgatatggcagaaactcttttttaaaactttcagcgtccatgggctatttatcaatagtagattcctgtttatacccttcagacgtagggggaaaggattttgttacacgaccaggaagaaaaaatggaaaaaaaatgaaaacaccaatagcaccagcccaagagtgcgtttatttcaagacatcagcaatccgctttttaagattcaattttgcaatgtcttcaggcttcagctcaagctccaccaacaccttcgctgtggagagtctgtattcctgctctaacgtatcataatttatctgttccttatgaatggaatacaacaaagcaaaatcgtagttcaaggcacgtgagacattatacaacgtatccgtatcaacactttttctcgtaagcatatagtctacactttgaggcttaactttcagtcttcgtgcaagttccgccttggtaacctgctgttcaagcatcacgttcttgattatctctccgatgtatatattacttttttccatttatatgaaggtacaaattaatcattcatattataaggaacaccaataccaatttgtctgtatgtatcgttctttttattcataattcgtttgttttatcaaatattttatgatacttttgcaacatattcatataaacaaacaaataatatctgctatcatgaatttactgacatgtattctcatagccatccctatcggcattatttttattatgctatggatatacaatgactaccggaaatataagaagaaaaataagctggccattttgctgtttctcctatttccaaccactttatctgcacaatacgttgatgcgggatgccaagtatcctttaaatggctggagaaccaaaaagggaaattagagtatacaaaagatggggttacttataagtttattccaaacgactcccaatgggaaattataattcgcaacaactcttcagaagatatccgaataaactgggaaaatatgcaattcattgtggacggaagaacctcagaagtcaaataccccatactggcagaagcggaaactccctttgcaataataaaaagccaggcagaaacaagccaaaagattggtgtgacaacttatacggcaaataactctcaaatatacaacaagaaagatattcggaaaggaaggaattcctccattaccattatccttcccatatctatcggtaagcaccctcaattcttcacctctttcgactttatcatcaaaaaagtgaactaactatgacttctcaagatataaaaaaacagctgaaagaaccacatttctggaacattgtattaactggtcagcacgccgaaccgaggacaaaagcaatgctggaagcaaaaggtatcataacttggcttccacttgctccggtccggcgtcaatggggaaggatattaaaagaaatacacaccccggttatcccgagatgtgtattcgtctatatatccaatgaggaaagaaatacgttgcaaaaatcctaccgacttcttcaaccggaagttatacttcaagaactgccggaccgatgcaatcagaacaagtagatatatgccaacgtgctcacactaatcactatccacaacaaggtgccttgtatcaagggcttgatgcctactgccttcagtacatcacgtgacagagaggcaccgataaagaacagagtgatagtcagcgtcttgcgggccaaagaattgattccctccccaatcatggcacccgtttcggtagtccccagcacataagtattgaaaatcatagccagcacaaagaagaagatgaaccagggaatactgattttctgtcccttactcttaaagatgaacgaagttaccagagccaaaggaataatccataaggcacgtgtcagctttatagtcgttgccaccttcagggcctcctcgccatatgcggcacctgcccccactaccgaactcgtatcatgtatggcaatggccgcccatgtgccgaactcatgctggctcatgttcaaagcgtggcctatcatcggaaaaacaaacaatgcaatggcattcaatataaaaatggtgcccaatgccacagacatctcgctatcctttgccttcaacaccggccccacagccgcaatggcactgcctccgcagatagccgtaccggaactgataagataggaagtgtcacggtccactttcaggaacttacgtcctatgagccagccgatgagcaatgtccccactacagaaataatcgtgaactccattccttccttgcccgaagccagagaagcctgcagattcattccaaatcctaaccctacaacagagtattgcaacaggtactttgaagtcttcttattgaacttcggatgtgcctgcccacacagcaacgcaaaggccaaccccaagaacaacgccaacggcggagtgacccatgccgaataggcatgcataccgggcacataatccagcagcagaaagaaggagaggacaaccagaagagatacataaataaatttattattactttgaagaaaaggcatattaatgcttttagccaaaactcgatttgaagccatactgtttattttactattattactaatgtttattccttaattttccggatgcaaaggtagttctattttagtacacccgccaatcgtttctacttatagactataacttattgttatcgggacataaacatatagttcataaaggcttgtgacaaccctccttcctgcccttgcaactggacaaagcagaagtcgcgaagcatgggcatatcctttatctcgaccacgcggaaagtgcctgccgccagttccttgcagatggaacggatagacacgattcccatgcaatcggagttttcaagaaagagcttgatgctttcggtactacccagatacatcagtacatggagtgaggaaagcttgacgccgtgcttctggagtgagcgttctatcacgtccagcgtacccgaaccgcgctcacgaagcactaaaggaatagcgggcaaatcctggggagtaatctcttcgggcaattgtaaacggcttttggaatggactaccgctaccagttcatcctcaagaaaagtagtatacttcagattgggaaggcggaaaaccccttccaccaatcccaagtcaatgcggtgttcctgcaaagcggcttctatttcccgggaatttccattgagcaaggacaagttgacctgcggaaacttgccgataaaactgcccagcaacggaggaagcacatactgcgcaatggtagtgctggctcccaacttgagttcgccaatatattcgttatgtaacaagtgcatttcatattccagccgtttatagtcctccaatatccgttcgcaatgctccaaaagcagccggcccgactcggtcaaactgattttacttccctgccggtcgaaaagcctcgtctggtaagtggcctccagctcctggatatgcttggttatagccggctgacttacaaacaactcttgcgaagcctttgtaaaactcaagttcttggcaacagactgaaacacttttaaacggaaatcactcatatacttcttatatcttataactcgtcagacttgatgccgaatgcatgcgccaaagaataaaacaccggctccaggcggcaatacaccgggctcagaggttcctccgtgatgaagtacacaactttgccccgttcttcttcactcttgtctttgaagaaacccgccagcttctcctccactccattaccatatacctgatggaaaggcaacagcatcaaacacttcacatccgcagaatcaagcgccaggttcatcaggtcaagaaacaactcttcggtagagactaaaccggaagaggtgacggaagaaaatgcaaattcgcccagcggcgtacggcatgcctggtgattcagtttattcacatcggatggttcacaacacttcagcacgtccgctgccggagtatgcaccagcaacacttccacctcattttcttgttctctcaagccggcgtccaatgccagatagctcaaccatgccggcaggtcaacatcgggtagcttccgtcccaacttaccttccaaaaagttctttgcaccatataccacttcattcagaaatgcaacatctatcaatatcacatttgccggaaactttatcttatcctccattatcttctattttaatacgtgattatacataatgctcctctgcaagcggagctccaaaaacctaccacacagaaagcacaaaactttgaagcagtaaaagtacgacaaatttatcaataacttgtatcatcccaaacaattaatctatatctccgaagcggaaagagaatatccttcctccgcaacacgggaaccttggagctggaacacgaagacttagctactaaaacatataggccctcactacatgagatgtgcatctcgtactacatgagatgtacacctcgtactacatgagatgcacatctcatgcatgacatccttatttgcccttctctttaaccaatagagtttaatacgaaaaggaactttgctccaacttcttatctaaagaagtagaaagaaacaaaacgactgatttacagacaatttgtcattttacatattttatatgcagacaatttgtccgaaatgtgccaatggcaaatcttttgcgccttcccaagtgttatgaaactgataaaatagaaaggagaacaaaatatgaactttaacaactttaccattaaagcgcaagaagcagtgcaggaggctgtgaacctggtacaaagccgtggacagcaggccatcgagcccgtgcatgtacttcaaagcgtgatgaaagtaggtgaaaatgtcaccaacttcatcttccagaagctgggcatgaacggtcagcagatagcacttgtactggacaagcaaattgattctctgcccaaggtatccggcggagagccatacctgagccgtgaaacgaacgaagtgttccagaaggccacccaatattccaaggaaatgggtgatgaattcgtctccctggaaccggtactgctggctttgctgaatgtgaaaagcactgcatccaccattctgaaagatgccgggatgacggaacgcgaactgcgggaagccatcaacgaactgcgaaaaggagaaaaagtaacttcacaatccagcgaagacacttaccagtcattggaaaagtatgccatcaatctgaacgaagcagcccgcagcggcaaactggatcccgtcatcggccgtgacgaagagatacggcgtgtcctgcagattctgagccggcgtaccaagaacaacccgattcttatcggtgaaccgggtaccggtaaaacggccatcgtagagggacttgcccaccgtatcttgcgtggagacgtccccgagaacttgaagaacaaacaagtctactccctggatatgggtgcactggtggccggcgccaagtacaaaggcgaatttgaagaacgtctgaaggccgttatcaacgaagttaagaagtccgaaggagacatcatcctcttcattgatgaaatccataccctggtgggtgccggcaagggggaaggcgccatggatgccgccaacatcctgaaacccgccctggcacgcggtgaactgaggagcatcggggccactaccctcgatgaatatcagaagtatttcgaaaaggacaaagcgttggaacgccgcttccagattgtcatggtgaacgaaccggatacactgagcaccatttccattctgcgtggtctgaaggaacgttatgagaaccatcaccacgtacggattaaagacgatgccatcatcgccgccgtagagttgagcaaccgttacatcaccgaccgtttcttgccggacaaggctatcgacctgatggacgaagccgctgccaaactgcgtatggaagtcgattcagtaccggaagaactggacgaaatctcgcgcaagataaagcagctggagattgaacgcgaagccatcaagcgcgaaaacgacaagcccaaactggaacaaatcggcaaagaacttgccgagctgaaggagcaggaaaactcgtacaaggcgaaatggcaaagtgaaaagacccttgtcaacaaaatccagcagaataaggtggaaatagagaacctgaagttcgaggccgacaaagcagaacgggaaggcgactatggccgggtggccgaaatccgttacggcaaactgcaagcgctgaaccaggagattgaagaaacgcagcaaaaactgcacgaaatgcagggtgacaaggccatgattaaagaggaagtggacgctgaagacatcgccgacgtagtatcccgctggaccggcataccggtaagcaagatgctgcaaagcgaaaaggacaaactgttgcatctggaggcagaattacaccaacgggttatcgggcaggacgaagccatcgaagccgtatccgatgccgtacgccgtagccgtgccggactgcaagacccgaaacgtcctatcggctcattccttttcctgggaaccaccggtgtaggtaagacggaattggcaaaggcgctggcggagttcctctttgacgacgagacgatgatgacccgtatcgacatgagcgagtatcaggagaaacacagcgtttcccgtctggtaggagcgcctccgggatatgtgggctacgatgaaggtggacaactgacagaagccgtaaggcggaaaccgtattctgtcgtcctattcgacgaaatcgagaaagcgcatccggacgtattcaacatcttgctgcaagtgctggatgacggacgtctgacggacaacaaagggcgtacggtcaacttcaagaatacgattatcatcatgacctccaacatgggcagcggctatatccaaagccagatggagaaactaaacagtagcaataaggagcaaatcgtagaggaaaccaagaaggaagtgatgaatatgctgaaaaagaccatccgcccggaattcctgaaccgtatcgacgagaccatcatgttcctgccactgacagagcccgaaatcaagcaaattgtggtgctccaaatcaagagtgtgcagaagatgctttccggtaacggtgtggaacttgttctgacaaatgccgccatagacttccttgccaatgcagggtatgaccctgaattcggcgcccgtccggtgaaacgtgccatccagcactatttgctgaacgacttgtcgaagaagctgctggctcaggaagtagaccgcagcaagcctattacagtggatgccaataccactgacgacggactggttttcagaaattaaaagcaatccgtatcccccaataaaagaggcgattcccgactattgagaatcgcctcttttattttgtatttcaatccttctccgattactcggccttgctttcctccttcgtttctgccgcaggagtttcttcaaaatccgtcataccgcttgccaccagcaaattataccaaacaatcaatttcttgatgtcggacggatatacgcggtcgcgatcgaaggtaggcaatacctctgccaggtaagcacgcaagtcgtcagcagtagctttcttcaaatccagcactacggcagcaccattttcctttttcttcatggaaagaaacacttccttcaaaggaacatcttccgtatctgtatacatggcgatatcgcccaaagaaataatcttctcattaccataggcagggaaacgcttcttgtctgcaagcgactctacaatcaacatattttttccctgagaaacaagcttatacaatcccggtttaccggaaatggacaaaatagtcttcaacataatatattctgttttgatgattagtagttatttttttcggggggcaaagataatgtaagccgaagacaatacaaaataagcttgcttatttttattgttaaggagatgcctattttttaaagatagtacattttttcagatagcgaaccgattagttctaaaacctggggtattaatggagtttcgccatcatttacaatgacaaaatctgcatatttacgcttttcttcgtcatccatctggctacggatacgcttttctatcaattcgcgcgaggaagcatcccgccggacggcacgtgaaatgcgcacctcttcgggcgcatagaccataacaatagcatccacctcacctgcaaaccccgcttcgaccagaatggccgattctataccgacaatgggaaaagcggtgcggcattgtgtccaccgcctgaaatcctcctttacacgaggatgcacaatacagttgatttctttggcatgctccggactaccgaaaagataagacgccaacaaaggcttgttcagcgtgccaccggcatacacttccgcaccaagcaaagctgacaattcctcgcggatcaatgaatcggatgccatcagccttttcgtttccaagtccgagatatagacgggaacacccagcacttccaacagccgggataccatactctttccgctaccgataccaccggttatacctatcttaatcgccataatcaggagaaacttgctctatcagaaaatccacttgtgccggattgaagcgtacctggctcacccctttcggcagattcttaatctttaccgtatacttgtcggaacccagacggagcagttcctcataggacacgtaaatatgaaaatcatcagcgttaatctgcctgaaatgactcagaccaacctgaaacgtgacctgcaccttggaagggaaagcgcgcagcaccttgtcggcaggaaagttaacgccacgcaacggcacctccactgtcttttccgtataaatatccaccggaagcatcatctcaatggaagaaggcacaaacttcacacctttctggatacgcagggggacttgctgcctcaaggtatccgatatatcttccagcttcaccggttgcgtataggcaacagcaatcgtatccagcacgccttgcggcgcatacaccaatacggaatcgggactgaatatcgtatccgaaagataatactcacgtccggcactcagcgtgccgcgcagcttcaccggcaccagtttggaggctcccgtcgaatagatgtactccaatgtatccggcttcatggaaagcaggcgggtagaggcattcagctggttcagcactttcttttcaaactgcgagggatatatccttacttgattatccacgcccttataatcggcataatcgagaataacgggataaaagctctttcccaacatatagttgagcagtaccgttcccttatcctttaccttgatacggagttctgaagcaggttcagaggtaatcaccacattattgggcactcccttcagccgcaccggtatagaaaagtccgcctcatagtcgttgttcaaggtctgcaagagccagaagccaccggctacaaagaaaaaaaacaaaaaaatgaagaactccctgcttttatcgctaagcaaaaagtccttcacttctcttgatatcttcagatatgtacgttgtatgttcctacgttcaaacataggctcacatttctattatttagatgcctgactgctgttcgcatcagcagctgcagcaaaaatagaattcttgtctatacgaatcttaacgttagaagcgatttcaagcaccacatcattgtcgttgatttccttgataacaccatggataccaccagctgtgattactttctgattcacttgaagcgatttacggaagtttgctatttccttttgcttcttgttttgaggacgaatcataaagaaatacataataacgaacatggctatcagcataatccacatcatgctaccaccaccggcagggcctgcagcgggagcctgcaggaagaatacagtcattaagttcataaatactcagttttggtttctattattaaacaaaggtattagtttttcgttaacttaccttctttttttaattgattaactattccatccaatgtaccgttcacgaagctgccacttttggccgtgctgtaaactttggcaatatcgacatattcgttcaacgaaacactcaccggaatgttcgggaaacttaatatttcggccaaggcacactgcatgataacaacgtccataaaggctacacggtccaagtcccaattacgcgtattctcgctgatgaggtgacggtaatagtcacagttcaagatggcacggcggaacaaacggcgtgcaaattcctggtcttcctcatccttgaactctggtagaagttcctgattggcaccattcttctcttcaaagcgcttgatggttttcagtacgaaagtatccacaatctccttgtcgtcattccagtagaggctctggtcttcgagcacattgtccaaggcttcgttgttgaagacaaaagtcttatacagctttctccacaattcacggtcgtattcgtaagaattgtccgaagaagccatatattccttatatatatctgattccacaattttctcatacaatcccttgacaaagtcttcatcattgacccacgtgcgcttttggttggcaatgaattccgtcaattgtttgttcacttccaactgggctatgaacttgttttccacaaatttcatgttgggatacagctcctcggcagtgggagccagcttagcttttgccgcatcaatacgtttttgtgcgtagttcgtcaaagctatcatcagcatcagcaggtagttgtagaggtcgtatgcctttgaaaggctaaagaacaattctttctccgctgagtctaaatttttactgccattctgataataagcatatacaatctgtataatcttaagacgaataagaactctgttgatcataattctaaagtaaatactagtgttttaacaaggcgcaaaagtaggcatttttaatgagtttacataaataaatcacattttttaatgcagatattgattatccggtctttttcttttgacagtttaaaaaaaatcgtcaattttgagcccgataaagagctaaaagctacgagatacaagttttaaggtgataatatcaaaattgagacctattataatatggaagactttaagaagaaaaacgcagcggacatgaacgacaaggagattgtattctcccaatccatcaaagcaggtaagcgcatctactatttagacgtcaagaaaaacagaaaagacgaaatgtttctcgccatcacggaaagcaagaagattgtgatgggcgaaggagacgactcgcaggtaagtttcgaaaagcacaaaatctttctatacaaagaggattttgaaaagttcatgaacggacttcagcaagccatcggcttcatccaggaacagcaaggctgctatacaagacataccactgacgaagaggctgaaagtcccgaaacgggaaaagaagaactgccgaaagaggaaaaagcgtcttcattggaaggagaaatcaagatagacattgaattttaagttataaccttttgataattcaaaaagaagctgtacttttgcaccgcttttttgcaacatcgtgtggcaagccacatcgtgtgatggtgaattaagcaaaaaatttacttaatttagagtaacacaaaaatttttaaaatgaaatcaattgaagtaaaaggaactgcaagaactattgcagaacgttcttcggaacaagcaagagctttgaaagctattcgtaaaaacaacggtgtaccttgcgtactttatggtgcaggtgaaaatgttcacttcactgtacctgcagagggtctgcgtaacttggtttacactccgcacatctacgtagttgacttggtgattgatggcaagaaagtaaacgctatcatgaaagatatccaattccaccccgtaaaggatactatcctgcacgttgacttctatcaaattgacgaggctaagcctatcgttatggaagttccggtacagatggaaggtttggcagaaggtgttaaggccggtggtaagctggtactccagatgcgtaagctgaaagtaagagctttgtataacgtaattcctgaaagactgattatcaacgttgcccacttgggacttggtaagactgttaaagttggcgaattgcaatacgaaggattggaattgctgaatgccaaagaagctgttgtatgcgccgttaagctgactcgtgctgcaagaggtgccgctgctgctgcaggcaactaatcgattctttccaagaaagactaaatattcgggaacgcggattaacgcagccaacgcagatttcatactgatttccgcggaaagttgcgataatccgcgttctttttacggctcacgagagtgtataattcaccacagattaacacagaatgaatttaatgtaccgataatcaaagatgtctatctgtgcaaatctgtgtaatctgtggtgaatactagttttaacaccctcataaacaggaagcacagactatgaaatatttaattgtaggattgggcaatatcggccccgaatatcacgaaacccgccataacatcggattcatggcagtagatgctctggcaaaagcagcgggtgccacttttaccgacggacgttatggcttcaccacaacgctgtcagtcaagggacgccaactgttactgctgaagccttccacctttatgaatctcagcggcaacgccgtgcgctactggatgcaaaaagaaaacattccattggagaatgtgttggtagtggtagatgacctggcactgcctttcggcacactgcgcctgaaaggtaaaggaagcgatgcgggacataacggccttaagcatattgcagcaacattgggcactcagaattatgcacgcctgcgtttcggcatcggcaatgattttccccgtggtggacagattgactatgtgctgggacattttaccgatgaagattggaaaacaatgggcgagagattggaaacagccggagaaatcatcaaaagtttctgtctggcgggaatagatatcaccatgaatcaatataacaagaaatgaacgaagccagaattgacaaatggatgtgggccgtacgcatcttcaagacacgtaccatagccgccgaagcctgcaaaaaaggacgcatcagcatcaatggcgcactggcaaaggctgcccgtacggtgaaaccgggagacgtcatccaggtgcgcaagccccccgtcacctattccttcaaagttctgcagcccatcgaaaagcgtgtcggcgcaaagttagtggccgaaatgatggagaatgtaacgactccggaacagtatgaactgctggagatgagccgtgtcagcggtttcgtcaaccgtgccaaaggtaccggacggccaacgaaaaaagaccgccggagtctggaagaatttacagaaccggaatttctggatgatttcgactttgaattcgattttgaggaagagtaaaataagggaaagattatgagcgagagaataattaaatggggattcatcggttgcggagaagtgaccaaatacaaaagcggaccggcatttcagaaaatagagaactccgaagtagtggccgtcatgagccgaaatggcgacaaggctaagacctacgccaaggaaagagggattcccaaatggtacgacgatgcccaggaactgattgacgacgaagaggtgaacgccgtgtacattgccactcctccttcttcacatgctacatacgccatcatgtccatgaaggcaggcaaaccggtctacatagagaagccgatggccgttacctacgaagagtgctgccgcatcaaccggatttccaaggaaacgggtgttccatgttttgttgcgtactaccgccgctatctgccctacttcctgaaggtaaagtcactggtagaggagggatatattggcaacatcatcaacattcaaatccgcttcgcccagcctccccgcgacctcgaccataacaaggaaaacctgccgtggcgcgtgcagccggacattgccggcggaggatacttctatgaccttgcgccccaccagatagacttgctgcaggaaatcttcggatgcatcctcgaagccagcggctacaagagcaaccgtggcggactatatcctgccgaggacactctaagcgcatgtttccagtttgacagcggactggtgggcagcggctcctggtgctttgttgcccacgaatccgcccgcgaagaccgtatagaaatcattggagacaaaggcatgatttgtttctccgtattcacctatgaccccattgcgctgcatacggaaagaggacgtgaagaaatcatcgtcgaaaaccccacctacgtccagcaaccgcttatacaggcagtggtagaccacctgctgggcaagtccgtctgcagctgtgacggcgaaagcgccactctcacaaactgggtgatggacaaaatactgaacaagctctgattaacgactatgaaggtgtgcctaaaaactatcaagaagtaagatgccttttgttttgtcacacctccatgtcgaaaccttcgcctttctgactgactaattcgtacacatcggcactctcgcctacaacccataccacatcgccttctacaaaaggttcatgcgggtcgggagcatgcagggtctcccctccccgctccacaccggcaatcaggcagtgatacttctcgcgtatccctgcttccttcagggtcttgttcaggaaaggagactgcccgtccacacagaactggcgtagaatcatctcgctcttctctatcacatccgtattcatggcagacaccttatccatctccttgccgaagatgttcagttcctcgtccgtggcaatcacttgtatcttgtcctgtggaaaaaggcggacagacgctccgggaatattaatccgtttcttgccccgaaggatggagaccacatggatgccgtatttctttccgaaattcagctccgccaatgtcctgcccacccatgccgactcgccggggatttcaaaatccgtcaggtgcaggtcgcgcgacagcagacgccccgcatactccggtttcttctctcccatatactcggcacgcatgtcgcggtaccgcagattctggaagaatgtcctctctatcatgatggactgcttcttcaactggcgagagagtatcatcaaagtcaccagcagcaccgccactccaaacaccagaccgacggacatcttgaacaaaccggctattacgaacatgacgaacgaaacgcccagcagcagacgcagtacaatggtggccaccaacggtgcccggtttccacggttatccttccataaagtcacgaactcttccgagtggttctttttaatcatgatggcacgcaggaacggagctatacacagaatgatgataaaggcagccaacagagagccccataccccgggcagactgtcgtgcacgaaaggcaccagaaaacggaacgccaaagctatcaccgccacgcaaatgatggaatacaccaccgtaatcctgaccagcgcaaatatcagtttcttccacagactctcgtggttcatggtctgcgaacctgaagcatagcgggtcaagaactttctccatttttccggcaaatgcgtatccacaagattggaagccggttctgccaaacgaatcatataaggagtgaggaaagtggtgatgacagacaccgccaccacaataggatacaagaaatggctggtgacatgcagtgacacgcccagcgaagctataataaaggcaaactcaccgatttgcgtcagactgaaaccgcattgcatagccgtcttcagcggttgccctgccagcagcacacccagcgtcccgaagagggattgcccgaggatgaccgccagagtaatcacgactatgggtcccgcatactccacaatcatggccgggtctaccatcatgccgaccgatacgaagaagatagcgccgaacaagtccttgaccggcttcaccaggcgctctatgctctccgcctctaccgtctcggcaagaatggagcccatgataaatgcaccgaaagcagccgagaaccccgtatgtgcagccatcaccaccatgccgaaacagagtccgagagagactatcagcaaggtttcctcgctcatcagcttccggcaccgcttcaacaatccggggatgaggtaaatacccaccacgaaccaaagtatcaagaagaacagcagtttggcaatgctccccagcatctccgtaccctcgaagttatggctgactgccatcgtggagagcatcaccatcaatacgatggcaagaatatcctccagaataagcacactgagtaccagccccgtgaactgtttcttgcgcatccccaaatcatcaaacgccttatagataatagtggtggatgacatggcaatcataccgcccagaaagatacagtccatccgtttccagccgaaaccggtacctaccgtcacacccaacaatatcatacaaaagatgatggtacacgcagcaataatcgccgcgcctcccaccttcacaatcttcttgaagctgaattccaatcccagtgcaaacagcaggaagataacgcctatatccgcccaggtctgtatattagccgtgtccatcaccgacggtgtataggccatgtgagggctggcaaggaatcctgcgactacatatcctaacaccagcggttgcttcaatttcttaaaaagcagggtcataatccccgcacaaatcaatatcagagctaaatcagctatcaaaggggctaaatgtgacataacactacttatctattaatcagagatatataactgcaaaactatgcaatacatctgcagtggctctgcaaaagccttgcagcgtcactgcaactgctttgcagcagcactgcaaaaggtatgcagtaactttgcagcagttgtctgcacgattctacaacactcctttcgagcttggcagttcaaagtgataaatatccctcttcaccgccatcttcagcgcacgtgccaacgccttgaagatgccctctatcttatgatgttcgttctgtccttcggcttttacattaagattcatccgggcagcatcgctcaaggacttgaagaaatgcaggaacatttccgtcggcatatctcctaccttctcgcgcttgaactcggcatcccataccagccacgggcgtccgccaaagtcgaggcacacctggcagagacaatcgtccataggaagggcatagccatagcgttcaatgccccgcttgcttcctaaggcctgataaaggcagtcgcccagagcaagggcggtatcttcgatggtgtgatgctcgtccacttcaaggtcacctttcacacggatggtgaggtccatgccaccgtgcttgcctatctgttccaacatgtggtcgaagaagcccagtccggtcgcgatgtcacaatgcccgtcaccatccagattcaaggatacgtatatatctgtctccttggtagtgcgacgtacttccgccgtacgctcaccggcaaagaggaattcggcaaccttatcccaatccctggtggcgagggcgcagtaatcttcaagtccgtcacaagcggcaccgccaccttcggaaacgggtttcaatgacgccgtgtcatcttgcagaagaatggcgcggcagcccagattctttgccagttccacatccgtaggccggtcgccaatgacgaaactgtgggacaaatcgtagtccgggttatcgaggtatttggtaagcattccggtacgcggcttgcgagtcggtgcattgtcgtcgggcatgctgcggtctatgcagatgtcgtcgaaggtgatgccttcgccttccaatgtcttcatcatcaggttgtgtgccggccaaaaggtctcttccggaaaggaagttgtgccgagcccatcctgattggtcaccattacaaaatcaaaatccagcttgctgcggatgaagccaagattgcgcatcactttcggatagaactccagcttctccagggagtccagctgataatcaatgggcggctcaatgactaaagtcccgtcacggtctataaaaagtagtttcttcattttaaaggatatttttttgagggaataaagggagttatcgggagttagaaggaggtagaaggagttagaggagttagagccggtagttctgcttgcataagcattacttgtatagaacagcagtatcggcctttaactcccttttaatccctttaccccccccttttactccctttaactccttctacatatattccttcagcgcttcaatcaatttttcattctctcctctcgttcccaccgtcacccgcaggcaatttccgcagagtgacacggagttacggttgcggacaatgatacccttgcctaccagataattgtaaatcttcacggcatccgtcacacgagctaggaagaaattggcatgggaagggaacatcttcaccgtacatggcagtgcggcgaactcggcttccagattctcccgttcttctttcagtgtcttcacccaacgttctatttcataatagcggtgaagcatttccactgcctgcttctgtgtcaactggttcacgttatagggatattttatcttactgaggatgccgataatatccggtgaggcaaatgccatacccagacggatggcagcacatccccatgctttggaaaaggtttgcagtacaatgagattcggatattgattcaaattttcaaggaaggaaggtgcctcggagaagtcattgtatgcctcgtccagtatcactaacccatcaaaccggcgaatcagcgtttcaatttcgctacggagcaggtcattgccggtaggattgttgggagagcagataaaaatcagtttggtatgctcatccgcagcagccagaagcttgtcggcagagaactggaaatcctcatcgagcagcactttacggtactccacatcattaacgtcagcacagacttgatacatgccgtaggtagggtcgatggccactacattatccacacggggttcacaaaaagcacggaacaccaaatcgatagcttcatcactgccattccctaagaagatggaatcgggactcacctttttaattttagacaattctgtctttaactcccgctgcatggggtcgggataacggttgtgcggcatgttataaggattctcgtttgcatcgagaaaaacggatgccgcagcaccattatattcatcacgtgctgaagaataaggcttcagacgccagatattcggacgggtaagttcttgtaatgttttcaccatgttatttatgatttgacaatttacgattaaaattactttaagccatcagctctcaattttcaactttcaattttcattctccaactgccccagtctcacactcacggcattcttatgcgcatccagctgttcattggcagccatcagctcgatggcagggccgatgatatttaatccttccggctttatctcctgaaaagttatcttgcggataaagctgtcaaggctgacaccgctgtatgctttggcatagccgtttgtcggcagggtatggtttgtgcccgaagcataatctcccgcactctccggagtaagagaacccaggaatacggaaccggcattcacgatacgttctgccacggaaagataatcctcggtttctatgataagatgttcgggagcatacgcgttggtcaattcaatggcttctgtcatgctgtccactacaatcagtttgctattggcaagagacttttcggcaatctctttacgtggcagtaaggccagttggcgttccacttccacctttacagcttgttgcaattcgacagaggtcgtaattaatatagcctgactgtccactccgtgttctgcctggctcaacaagtcggcggcgacaaaaatcggattagctgtttcgtcagccaaaacttctacttccgaaggtcctgccggcatatctatcgccacatcacgcaagctcacaagctgtttggcagccgtgacatactgatttcccggaccgaatatcttgtaaaccttaggcacactttccgttccgtatgccatagcggcaatggcttgtatgccgccagctttgaaaatccggttgacacctgccacttttgcggcaaacagcacagcgggatgtacctttccgtcacgtcccggaggggtgcagagaacaatctccttgcatccggcaatcctggcgggaacggccagcatcagtaccgtagaaaacagcggagccgttcctccggggatatacaatcccaccttttctatggcaaccgctttctgccagcaggtcacccccggctgagtctgcactttcttgccctcaaagcgttgtgcggcgtggaaagtctcgatgttctgctttgccaggcgaatagctgctttcaagtcttcactcaccaggttttccgcttcctgctgttcctcttccgacactgccagcgaggccaacaccactttatcaaatttttcttcataatccagcacagcacggtctccctcctccttcacacggtcaataacactccgcaccgtatcaaacagattctccgtattcatcaccggacgtttcagaatctcttgccactgggatttatcgggattactaatcaatatcataatgacatgtttttaaagatttatgcataaaccatgatattattggaggtgtgtcaaaactctctgaagactttctattaggcgctgattacgcggatttcacggattcattttaccgattccgcgctatttcgcgtaattcgtacctaatgtcgtaacataaagaaagcgtttatatacttttgacacatcctcgaggctttaaattatcattttctcaatcggtagcaccagaatgccttccgcccccagcgctttcagctttccgataatctcccagaaacacttctcgtcgagtacggtatgtactgagcaccagccttcttgtgccaaaggcatcaccgtggggctcttcatgcccggaagtacagagacaatctcatccagtttctctttcggggcattcatcagcacatacttcttatcttcggctgtcttcacggcatccatacggaacaacagctccctcaatatctcttgcttttcctcgctcaggttcctgttaccaatcagcagggcttcggacttcatcacaacctccacttccttcaaacggttgctcaccagcgtagaaccggaacttacaatatcgaaaatggcatctgccagaccgatgcccggcgccacttctaccgaccccgtaatgacgtgtatctccgcattcaccccattctctttcaaaaagccggaaaggatacccggataagatgtcgcaatcttctttccgtgaaaccacttcacccccggatactcaatatccttcggcatggcaagagacagacggcatttgctgaatcccagacgcttgattatctctgcatcctcattcttctcaacaaattcattctcacccacaattcctatatcagccactccggtagccacagactgcggaatgtcgtcatccctcagaaacaacacttcaagaggaaagtttgacgactgcaccaacaacgagcgcttcatggcactcaactttatatccgattctcccaaaaacgacatggtctcgtcatacagacgacccttagcttgtactgcaattcttaacataaggttatttactattttacgatttactatttactattttgaatgagatgacagaaaacaaaacgaggcttaccaatattcggcaagcctcgtctgttatgtcatctgttgtacatatacactcatacgcccaccgagttattcgttaggatgatgatggtgatgatgtgcaacgatattcttcatattttttggattttaatgcgacaaaagtaaactaaaagtttgaaactccaaaagatttatcacaaaaagtttattttttctttcaaattcatcttagttcaccacaaattacacagatttgcacagattatttttattccaatctatgcaaatctgtgtaatctgtggtgaaacaattaaatcaacggcaatatttcctcctgctctacttcgcagctatggaaatgcatttccgcttccgccttctccttcggaaaggtaaagtaggtgcaagtggcttctgtgcaaagttcgcccatgctattatacaggcgtgcttctatgatagcaatattccgcttctgctcgcgaagcgaagcccgcagcaccacatgcgtgtcgttggtcgatatggatttgcggaagcgggtttccattttcgatgtcaccccgccggtctgcagcttgcggaacacgacccagccgcagatttcatccagcaatacggactggatgcctccatgcaacgtattcagccacccttgatactccggacgcggcttccagatgctcaccacctcgtcaccgtcctcataaaactccattctcacaccggcttcattgtcaggagagcaaccgaaacagttgtagccctccatatctttccacggattgataatcttcttcatatcgtattcttctttatctggttttgattcataaagtctctcaataagacgttcaatattagtcattccgattgagaactacaaattattgatgcctttttcagagaaaaattagcgggatactgttcaaaaaccggttattttatttagctttgtataaatgagagagaacaacaagatgcaaagaggggcctttttctgcttatggatattatttacattctcattgtttgcgcaaaacaaggagaacggttctgtcgcatgcgacagcatcgtatataaaaacaccttcggaaaagcattgaagaaattcctcaacttcagcgacttcgacactacctatatcagtcccaaccgatacaattacgccctgatgctcgaccatttcaccaattacgagtattactccgtgggcaatgacgaccagcggctccgtttctcgcccaaccctcacaacaagataggcgcttacttcggatggcgttggatattcctgggatgggctgtcgatacggactggctctacggaaagaaaagcaagaaaaagcgcggtacggagtttgatctcagtctttacagttccaaactgggagtcgacattttctatcgcagcaccggaaacgactataagatacacaaggtatccggcttttccgacgagattccctccaattattccgaagatttcaacggattgaaagtaaagatgaagggattaaatctgtattacattttcaacaatcgacgtttctcctatccagccgccttcagccagtccaccaaccagcgctgcaatgcaggttctttcattgccggattctccgtatccacccacaatctgaacttcgactataccaagctgcccgaaatcattcaggaaaccatgaacccgggtatgaaggtgaaacatatcaaatacacgaacatcagcctcaacgccggctatgcctacaattgggtgtttgcccgcaactgcctcgcatgcctgtcgttcaatccggctgtcgcctacaagacatcacgcatagagaagacagaagagcgggaagcggacgactggtacaagaatttcaatatcgacttcattctgcgtgcaggtgtggtatacaacaacagcaaatacttcgtgggtacctcattcgtaggacggacatacgactactacaaaaacagtttctccctaaacaacgggttcggtaccctccaaatatatgccggattcaacttttatctgaaaaaggagtaccggaagaacaaaaagtaaaaaaggctttcagccctcatctcccctcaaaagctataaacacactccacccctactatatccttccgcttatccttctcccattgcctgcaatagaagatgtccacctcccagcgctcggacaagggcaacgtaatacccccacgatagcgcatccgctttactccgaagtgctctgtcttattcaaaccattatacatctcggccgaagcatacggttccagcttgcacttcggaatgtcataggcaaacttcgcacgcgagcgcaagcggaactcatctctatgcccatcgaacgtatactgaaagcgctcacgcaaggacagtttcaccctttgcacacgggcagacagagtgccttccaaacggtagcggtgccggaacttccagccatctgccccccgattgcggtaatgcgtctcatacccagctccaagcttcaggaaaggcaacagcttatagcttccccccaccttcagcccccaccggtctgtctttcccaaatcatcctttgtacgccactccagcccaccggaaacagtaaatgccggcttcaacttatattcgaaaccggcattcgcccaagtggcaaaatccttctcctgcgcccgcagggaaaaagacgaaacaacccatagaactatcggcaaaacaagtactttcgtgcatgaagatatattacttaccatacgcttattctgttaaagtgtcaaaggtaaggataaattctgtaacaattctgtaatactacaaatcttgtctgcacatttccgatttttcaatgatacttaaaaaacagaaaccgagatacaaaaaacaattcaaagttgccatatatgtatggcatcatatatatatttgtagcatgaaaaaacacccttataagcgtttcatagattatttatttggggtgattcatttatgtgaaatctctttcaaatactcctccacctttccgaagaaggaggtcaaatgagaaccgtcgacaaaagcatggttcacataaatggaaagaggaaataccagacggccttcacgagatacggccttgccggcagtcatcaacggataactgcaaccgttgcctgcttcggcaagtgtataggttatcgaggtgaaatacattttgggaaccgcactcagatggaccacatcgtaatcgccttgctcggcaagaatcttttcggctccataagggtcaccgtcctcgggcatgtttgttatcaaggcgtaggcttcggcatagaaacgttcaaagtcttcgtaatagggaatgcgcacggtatagaatgttttcccaggaacggctatcggagaaatgatgtccacccggtcgtgaaaaacaacccggccttccttgtcggtacggtaacggagttcatcgacttcattggccgaacgcaccacagcatacagataataaaggaaaaaggagcgctttgcagcccgggctgcagcactggcttccgtgcagtcaatctctgtggtgacggaataccaggaatttacaaaattgcggaaaaagccgtagttatcccggcgttcccaagtatcaatgtctataatgtgtttcatacaaaaaggggatttagtgaaaaaaggatacctttttacaagcatcctttttccaattctatttatttctctttcttataattctccagtccggtctgcaggaactcgatatacttaggtatatcctcgtcgtaggagtaagacttgttgagcggcttgccttcgttgtcaatcagcacgtagaagggctgcgcattggcgccgaacttgacacgctgcagatagctccatttgtcgcctacggtgcgcagcgtgcgttccgtgccgttctccacaatcttcacgggagaaggaagcggtgtcttgttgtcgacgtaaagcgtgataagcacatagtcgttgttgatgatgtcgctcaccttcgggttggtccatacggcaagctccatcttacggcagttcacgcagccgtagccggtgaagtcgagcatcacgggcttgccatgctggcgggcatactccataccgaggtcgtaatcgtcgaacctggcatgcacctcattattgtaaaggttgaaatcctgcgtctgcatgggcggcgcaaaggcactgaccgccttcaacggcgctccccacaaaccgggaaccatatacaccgcaaatgccagtgaggccaacgccataaagaaacggggtacactaacctttgaatcgtcatcatcgtgcgggaacttgattttgcccaacaagtagaaaccaagcagtgcaaaaagtacaatccacaaagcaaggaacgtttcacggtcgaggatgcgccaaccgtaagctaaatcggctaccgaaaggaacttcagggcaaaagccagctccaggaagccaagcgtcaccttgatgatattcatccatccgccggatttgggcatggacttcaaccaggacgggaacagggcaaacagcgtgaaaggcaatgccaaagctatggcaaagcccagcatgccgatggcgggagccaccacgctgcccgtcgtggaaacctgcaccagcaggaatccgataatgggtcccgtgcaggagaaagataccagcgacaaggtaaatgccatcaggaagatgctgagcaaaccgcttgtcgcctcggccttgctgtctacagccgtactccacttggagggcaacgttatctcgaacgctccgaagaaggaagccgcaaacaccaccagcatcaggcagaaaaggatattgaatactgcattcgtagagagtgcgttcagtgcgctggctccgaaaacaagcgtgattgccagtccgagcgtcacataaatcaccacgatggaagcgccatacgtccacgcatcgcggatgcccttcttcttgtccttgctgcgtttcaggaagaagctgaccgtcatcgggatgatgggccatacacagggggtgaagagcgccagcagtccaccggcaaatcccgtaatgaaaatataaatccaggacatgtcttcctgcgaagtggtttcgcccaaagaattcagttcactgatgaccggcttccataggtccaccttgtccgccaccttgatttccgtcggcccgtccgcaccgccgatggcagccacgggagccgtgccggagacagtctcctgctttgcgggctgttcttcggctttcgtttcagcggcagcggcggcagcttctttggcagccccttctgccttgccggagaacttgaaaggaacttgtgtgggcggcaggcagttttcatcgttgcaagcgccatattccagatagccttctatctgataagcgccacccgtcaacttcagcttctgcacaaattgcgccgtattctcaaaatagcgcaccttcatttcgaacaacttatcgaaagtagagatttccttgcctacgggcttcagtttgccaaccacttccgctccgaatattttctccacattgaaagtcgccgagataggccctccatcgcccaagtcggtggaatagacatgccagcccttgtcaatagcagccgtaaaaacgacctccgcttcatcggcagccaaaatcttcagttcggaattgaacttgacggggtcttgtatctgtgcctgcaccgccacagcgaagagcaacagaacgaaagggaacagtaatttcttcatgttctctgatttaatttttaattttcaattatctcgtagtccacgcaggcacggctctctttcacagctgcgataagcttgccggcagctacatggtcgggatgggtagcatagtatttcacgtcatccaacgtatcgaactcactgtaaagagcgatgctccaagcctcggcaggattgatgttcaatccgacttcaatcttgcggataacggatattttagccggaagcgcttcgatagctgccttgaaactgttcatcgcagccaacttttcgtcagccggtgcctcatcttttaacttaaataatacaatgtgctttaccataactttgccatttaaatgatttatcactatatttgtcagcctaagcggctgttttaacaactgcaaaaatactggttttgtttcaaatatacacttaaacggatgttaataataggaattgcaggcggaaccggctcgggaaagaccaccgtcgtacgtaaaattatcgaaagcctaccggctggtgaagtggtattgttgccacaagactcttactacaaggacagcagccatgtgcccgtggaagaacggcagaacatcaacttcgaccaccccgacgctttcgagtggagccttctttccaggcatgtcgccatgctgcgcgaaggaagaagcatagaacagcccacctactcatacctgacgtgtacccggcagcccgaaaccatccatatcgagccccgggaagtcatcatcattgaaggcatccttgccttgtgcgacaagaagctgcgaagcatgatggacctgaagatatttgtagacgccgaccccgacgaacgcctgattcgtgtaatccagcgcgatgtagtggaacgcggacgcacggccgaagccgtcatggaacgctatacacgtatactgaaacccatgcaccagcaattcatagagccctgcaaacgatacgccgacctcattgtgccggaaggcggaaacaaccaggtggccattgatatattgaccatgtacatcaagaagcacttggggagttaatttgtaatggagaattgataatggaggattaagaacgcactaaaccctatgagatatgaacagcctgttttctttcgccagacataaatcatccattatcaattctcccgtcccaattatcttgctgttgttgttgtgctgcatcgcaggatgccgtggaggacatcctgccgaaaaagaagaagcggatgacctgcaacagataaaggacagcggagaactggtcgtattgacactgtacagctccacttcctacttcatctaccgtggccaggacatgggattccagtatgagctgagcgaacagtttgccaagagcctgggagtgaagctgagaatagaggtagcccggaatgtgcacgaactcatagagaagttgcaggcaggcaagggagacctcattgcctacaaccttcccatcaccaaggaatggaaagacagcctgctttattgcggcgaagaggtcatcacgcaccaagtcatcgtgcaacgtaacggcggacgcaccaaaccactgaaagacgtaacggaactcatcgggaaagatgtatatgtgaagcccggaaaatattatgaacggctggtcaatctggacgaagagctcggaggaggtatccacatccataaagtgaccaacgacagtatcagtgcagaagacctcatcacccaggtggcacaagggaaaatcccctataccgtagcagacaatgacgtggcacagcttaatacgacctattaccccaacctgaatatcggactctccatcagctttgaccagcgtgcatcgtgggcagtccggaaagactgtccgcaactggcagccgccgccaacaaatggcacgaggagaatatgacttcacctgcctatacggcaagtatgaaacgatattttgaaatcggcaaggccattccccactctcctatcctctccctgcgcgaaggaaaaatttcccattacgatgatttgttcaagaaatatgctcccaagatagactgggactggcgcctgctggcgtctctggcatatactgagtccaacttcgactccaccgccgtatcctgggccggtgccagggggctgatgcaactgatgcctgccacagccagggctatggggctacccgaaggaaaggaacagaaccctgaagagagtataaaggctgccgtgaaatacataggcgccacagccaaaagtttttccaagataccccaggaagaacgcatcaactttgtgctggcatcttataattccggtatcggccatgtgctggatgccatggcactggccgaaaaatacggcaaaaacaaatatgtctggcgtgataatgtagaaaacttcattctgctaaaaagcaatgaggaatacttcaccgaccccgtctgcaaaaacggctatttccgtggcattgaaacttataacttcgtaagggatattacgtcacgcttcgagcaatacaagaagaagataaaaaaatagggattaaggattaatccctaatccttattttccttcctatttaaaacagattcagtttgttctttctcgcttcttccagggaaacggttgtcacttgtttctcccggttcttttcgcacaactgccgatacttctcatgcagttcttcttccagctcctcctttgtcttaggattcatcagcttggctgctactgtagcattctgtgaagcgtccttcagatggattacgggagcatgatagaccggagcaattttcagagctgtgtgaagcggtgaagtcgtggcaccacctatcagcagaggaacgtccagacctgccttttccagctcaatggctacatgcaccatttcatccagcgaaggggttatcaagccactcaatcctatcatgtctaccttttcctctatggcatgctgtacaatggtttcggcaggcaccatgacgccaaggtctattatttcgtagccgttgcaggccattactaccgagactatatttttgccaatgtcgtgcacatcacctttcaccgtagccagcagcaccttcccggcagcagtcgcaccttcttctttctccgactcgattacgggctggaggatggcaaccgccctcttcatggtgcgcgccgtcttcactacttgcggcaggaacatcttgcctgccccaaacaagtcgccgacatgattcatgcctgccatcaacggaccttcaatgatggaaacagccttgggatacagcttcagcgcttcggcaaggtcttcttccagataatcgccgataccctttgtcaaggcgtacttcaaccgctcttccacaggagtcccctctctccaggcaagttgggaatgggcggcagcctgccgctctcctccagaagtttttgccgcctctgcttccgctttcaagcgttcggcagtttctatcaggcgctcggcagcatcgggacgacggttcaagaccacatcctctatgcgctccaatatatcagcgggaatatcggtgtaaagaacggaggcagccggattgacgatacccatatccatgccctcgcggatggcatagtaaaggaatacggcatgcatcgcctcgcgaatgtaattattgccgcggaaagagaaggaaaggttactcactcctccactgacatgcgcaccgggcagattcttgcgtatccatccggtggcacggataaagtctacagcataattgttgtgctcgtccataccggttgccacggcaagtacattcgggtcgaaaattatatcatggggattgaaacctatcttgtccaccaaaagacggtatgcccgttcgcagacctcaatcttacgttcgtacgtgtctgcctgccctttttcatcaaaagccatcaccacggctgccgcaccatattgcttgatggtacgcgcatgctccaggaatttatcttccccctccttcaaggagatggagttgacgatggacttgccttgcaagcatttcaatccggccacaatcacttcccacttagaggagtctatcatgacggggacgcgggcaatctccggttccgaagctatcagatggaggaaagtcgtcatctccacttgagcatccagcagtccgtcgtccatatttatatcgatgacctgcgcaccgtcttccacctgctggcgggcaatgctgagcgcctcgtcatatttcttttcattaatcagacgcaagaatttgcgcgaacccgcaacattacagcgttcacccacattcacgaagttattttccggcttcacttccagaagttcaagcccggagagccaaagattttccggtctgggaaccggctgatggggcgttgcaccggcaatcagcgaggagtactcggcaatgtaggcatctgtcgttccgcaacaaccaccgataatattcaccaatccctcatggatatactcttttacttcatgtgccatatcggcaggagtctggtcgtatgtgcccaaactgttgggcagtccggcgttgggataagcactgatataataaggtgcacgggcagcaagctgctccaggaaaggtttcagctggcgggcgccaaaggagcagttcaacccaactgaaaaaatatcggcatgttgcacggaggcgagaaaagcatccaaagtttgtcccgacagagtacgccctccaatatcagaaacagtcacagagagcatcaagggtacatgaactcctacagtttccatcgcctgcccggcggcaaaaatagcagccttggcattcagcgtatcaaaaatggtttctatcagcaaagcatccacaccaccttcgagcaatgcttccatctgctcacggtaggcatcggccagttcatcgtagctcaaggcacgaaaagccggattgttcacatcgggactcatagagcaggtcttgttcgtcggtcctacggagcctgccacaaaacggggtttgtcgggagtaagagaagtaaactcatctgccactttgcgtgccaggcgcactgcggcaagattcatctcgcgcacatagtcctgcacatgataatcggccatactgacgcgggtggaactgaatgtatttgtttcgataatatccgcacctgccgccagatacttgcggtgaatgtcttgtatcacatcggggcgtgtcagacaaagcaggtcattgttacctttcatctgtccgggaatctgcgagaagcgttcaccccgaaaatcttcctctgtcaagttgtattgctgtatcatggtgcccattgcaccatccagaataaggatgcgctcacgcaccaaactaccaagtttactcatattatcttttaaacatacgcgccatatcgcgtttgtcatctttttccttcagtgattcgcgcttatcatattgcttcttacctttggcaagtgccaccacaagtttggccagccctttttcattgataaacaagcgcacgggaacaatggtgaaacccggatctttcgtgccgcgcatcagtttttcaagttccttcttattcaacaaaagcttgcgctccctgcgtgcattgtgattgttgtacgaaccatagaagtattcggccacatgcatgttcttcacccacaattcgccgttggcaaagtaacagaacgtatcgactaagcttgctttccccaaccggatggacttgatttctgtgcccgtaagcacaatgccagccgtataggtgtccgtcagttcgtaatcgaacgtagcacgcttattctttatatttacaggagcttgtttcataacatttatcagtttagcactaccgtcagcttattgaatatccattcaatggccaccggacaagctattaacaaaatagaagaaagaatggtgaaacgcaaacggtctttttccgctatctgcatcacctttttgcttccttcccacacaacatacacgatatagaattggagcaacagagccataatgccaaaatcaggcaatatgccgataacaatcctcagcatgaacaccactaccagtgcataacctgcaaactgttgcgccaaaggaatatcactgtcctgcataaacatgcggacacgcaacccattgatgagataggctgccaaaaagtatcctccaaacaaggatacagccaccgcacagcattgtgtcatggcatattgaaagctttgcggcccgtcccatcccatcttcatcaaagagccgatgaaaacggacaacccgcataaaccaatcataggatagacaaaagcagtaaatacttttcgtctatcctctaaactaatttcctcccaggcacgagccggagaggaaatcagtagtattgctatatgaaataaatctttgtaattcaatatcaatttattgattagtagacgcaattttgtattctacagtatattccgtatagttttccggtatttctgtattgctattatttccactttcatgcgacttaataactaatttagtaggaagatttcctgctttttctttaaacctttctaaagcattttttatatcatacccataccaattagaataataaacatctgtcttatcatcagcacccttatcatgacgcagatagaaaacaaggtctgtggcccctacttcaatttcatccagtacacaagctaaagcaaatttatgcatcttaaacttatcgttgtcattttgcagtctccaagcgataggagttacaagtatatccttgttatacaaaaatggctgaactgacccattttccaatttcaaagttatcaccggtgctgtttccggcgcatcaacaaccaagctttctgctgtcattgatacgacagcgtttgcaaaagaaataggctgaaaattcttcaaagtgaagttggtagttttagatttttcattcgtctcaggttctatgctctttcctaagatgattcccattcgagaatctgaaatcttcaaacttgaatttgcctcaaattgagtaacagaagccggtgtaggttgataagtgttacccgcagcatcttcaaaagagagtaatcccatatagttattcactaaaaccatgccataaatgtcatcatactctccgtcatctgaattcagacacgaagtaaacgaaatgcccatcaacaatgtcaaggcaaccatcaagaattttaattgtttcatctttcctataaatattagagtttgcaaatttagataaaagaattgagtaatatagtactctcctcgttttttcattgtttttaagattaaatgaaagattaatctaaatactgcatgtcacagtgatatttaacatttatatcagttaatccacactacacaatcttggcaaacagctccaaatgctcatccacatagccggcaaccaaagctgtatattcctcctccttttccaaaaattcatcttccagttcatcgaaagcctcatattgctcgtacattgccataaactcctcgtctgtgcgttcacgttccaagtcgccacgatggctatcgtatattttcttggcagcataaaccaacttactcaaatcgcccactccccacaaacgcatcactttggcaaacggattgtcgaaaatataaccgccataaccattttgaatcagttggcagaagcccccttccatcacttcatcacggaatatctgataggccaacaatgaatgctgttcaccggtaagcaaagacatcgtcccggcagtcatttctccgcctatttctttcttataagcaccggtgaatacgccgatgaatgcatccatcccttcaccggcagcctggcgcaatgccacatctgtaacttctatcatagtttgtattttatttaatgtgccacaaaggtaagactttgcagccatagtcaaacacggactcccctttattttcttcgccttgccaaccagttggcaggattttgccttaccattggcaagactttgccaccgcgttggcaaaactttgccataggcatggcaaaagtttgccaagacgcaagcaaggggttggcaaaattacttcctgattaacaagcacataccttattgattcacaaaccctatcagagacgagaaaaaacagtcaactgcaaactccactttacattccgcagaaattcagcttcttattacttctttttttaaaaaaagtcaaattgaacagttggcagaaacggggaaaacaactaactttgcacccgactaataaaagtggactacgttttttttaattatatcacttaaaaaaagagctaattatgacttattcacacgaagtggaacacatgtgtgttgtgaagaaaggtcctaatcacggaccggctcctattcccgaagaaggtaaatgggtaaaagctaaagaaattgttgacatctctggtctgacacacggtattggctggtgtgctcctcagcaaggtgcatgtaaattaaccctcaatgtaaaggaaggcgttatccaggaagctttggttgagactatcggttgctccggtatgactcattctgctgctatggcatcagaaatcctcccgggaaagactatcctcgaagcattgaatactgacctcgtttgcgatgctatcaacacagctatgcgcgaactcttcctgcaaattgtttacggtcgtactcagtctgctttctctgaaggcggtttgatgattggagctggcttggaagacttgggcaaaggtctgcgcagccaggtaggcacattatacggaacgttggctaagggttctcgttacttggaaatggcagaaggttacatcaagactatcgctttggacaagaacgacgaaatctgcggttacgaatttgttcatctgggcaagtttatggatgaaatcaagaaaggtacagacgccaatgaagcattgaagaaagttaccggtacatacggccgcttcactgaagagcaaggtgcagttaaacacattgacccacgtcacgaataatataaggaggaaagacatatgattagagaagtaaaatttgaaagccaagaccgtcgtatcaagcagattcttgctgcattgaacgcaaacggtatcaaagacatcgaagaagccaatgctatctgcgaagctcatggtctcgatccttataagacttgtgaagaaactcagcccatctgtttcgaaaatgcaaaatgggcatacgttgtaggttgcgccatcgccattaagaagggctgcaagaacgctgctgaagctgctgaagctatcggtatcggtctgcaggcattttgtattccgggttctgtagctgacgaccgcaaggttggtatcggtcatggtaacttggcagccatgttgctgcgtgaagaaaccaaatgtttcgctttcttggcaggtcacgagtcattcgctgctgccgaaggtgctatcaagattgccgctaaagctgacaaggtacgtaaagaacctctgcgttgcatcctgaacggtctcggcaaggacgctgcacagattatctctcgtatcaacggctttacatacgttcagactcaattcgattactatacaggtgaactgaaagtagttcgtgaaatcgcatacagcgacggtccccgtgccaaagtaaaatgctacggtgcagacgatgttcgcgaaggtgtggctatcatgtggaaagaaggcgtggatgtatccatcactggtaactctacgaatccgacccgctttcaacacccggttgcaggtacttataagaaagaacgcgtattggctggcaagccgtacttctcagtggcatccggtggtggtactggtcgtactctgcacccggacaacatggctgccggaccggcttcttacggtatgaccgacacaatgggtcgtatgcactcagatgctcagttcgctggttcttcatcagttcctgctcacgtagaaatgatgggattcctcggcatcggtaacaacccgatggtaggatgtacagtggcttgtgcggtagacgtagctcaggctttggctaagtaatataatacattactaatatataaatccctgtaactgtaatggttatggggatttttattttagttatactgcaatgcttatcccctatctaatactcatttccttttgttattcttcttataattagctgtgattggataatggaattgaagcaaattatagcttaaatggagcttgaatctctaagggtaaacgtggctgattatctttaaaagtaggctaaattgaagctattctgtgtgcaatttgtgtgcaatttcatgtttttatcaaactgcacacaagat

SEQ ID NO: 4425 - DNA, 16850 bp, Unknown
  gut microbiota DNA sequence
gtaaatgtgtctacctatatcaggataagacaggggatataaaaaagcgcaggcagtttatctacccacgcttttgtttttgatactgggattgtattattctcccggatgaattgcttcagaaggacaaacatctgcacaagtaccacactctgtgcaagtctcagggtcgatatgatagatatcaccttcagagatagcgccaaccggacactcgtcgatacaagttccgcaagcaatacaatcgtcactaattacgtaagccattttcttttagatttaaattattattagtactaattcgtttggcaaaaatagtggttttctttattacttgctatcaatcttgattaaaaacgtataatttgtatgtcgtctaaataaggagtcgagaaagcgacacagcataccgcagagactgaaaaatgttcgtttttgaatttcgtaaacgaattgctctgatactattggctttagctggagcttaagccgattttcaacttttaagaaagagtcggataggtaaaagtaatcactgcgatttctccttcttcgacattctcggtttgataggtacctttgaaatgttcaaagaacaactggttgattttctgttgcactgatactttttgagaggcaaacctggaatcggctataggactgttctctatccggcatgcgatgatgtgtttgtccggatggttgaccaagaacatgctgactttgcgtgtttctttgcagtcgttcggataaagcagcatacttgtcactatttgtgtaaggcggttgacgtcggtatggatacgtacatctcctacctccacttgtagttccaggaggatacggccttcactgcgcatttgtattagacaatctagttcgttgcaccattcttttacattacaatcctgcaattgaaatttcatcatattcgcttccaggcgtgagaggtccaatacgtcgtttaccagttggataagctcacccgaattggcttggataatacaggaatactcttttcgctcttcttcatccagctcgttgtcggtggaaagcagttgggagaaaccgactacattgttcagtgggatacggatattataactcatattggcaaggaaacggctttttatttcgttggcttcttcggcaataattgccaatttacgcatttccttctcatcttgttgcagccgcttcctgcttctatacatatgtaggttgaaaagtaacaaggctataatgatgatgatggaggtaacgagacagatacggtgaaaagtggcttgccgctgttctttttggaaaagcagttggtccatattatataggctttgtatctgttctatctgtgaggtggagaatactgtatataacgaatcttttgccttggttatttgtttatagacaggaagtgcgtcgtccggaaaccccatctttactaatatatccgctttctgaagtccataaatcatggcatcatccagtgaaataggggttacaagttcaatggcgtcttctaaataaaccaaagctttgtcgtattcttttgtcagttggtaatattcggcatatgctgccaaacgtatcaaccgataaggaagaaatgaagatgtactgagatgccgctctgctttctgcaaatattcccatgcttccgcaggacgttgaaggcgggtatagtaaagggcgtattgtaaatctatgagcagatacaaattggtatagccgtttgtcagtacggtggtgccttcttcctgcaatctgttttttgcattgttgagttcctccagataccggaacatgttgtcattgtcatgcagatatgagtaagccagtaccgcttttgtcaataaatcaatctgagtggcaagggaggaatccggacttgtcagttcaaaagccttgtttaggtaggtgattccttctttgtaacgtaaggtattgaaatatccagtcatcaggcataggcatgcttcgcgcataccgtcatggttgccaagactttgagccttgtcgtacatgtcttgtgcttgtttgagggctaattcaatcttctggctgatgacatagaattctatcatcatctttttgcctctgaagtaatgacggtagtagttgtgctcttcagacaactgttcgagcctcttcagccattgttctgcatgtttttggtccagtaggttgtagtaataaataatgtgcgcatatatggccgcactctggtaaagtatatttttctgggcgatggcctcttccagtaatttgttctcgtaatagatgaatgtcggtgacagttggtcaagcagtgctatctgatatagggtttccaatctggtggtatcggctggggaggcaagatatatacgtagcaggctatccttggcttctgtccgtcgcacatctgcgtgtgcggacggtaacagccagcataaggcaatgagcaatgtaaatatctgtttcatttcttattctcctttctgcctgtctggcttatggggtgggtgaagcagaagcgtgagccttcggcatactctgaatcaatccatatttgtccgccgatatgctctatgataagttggcatatggagagccccaacccactgccttgagcattctcattcagcttttcaaaacgttggaaaatgttggcttgcttgtctttgggaatgccgcaaccggtatctgttacggtgaatagtacggtgtcgtccgtttctttttccagctttaggacaatgctgccttgtggggtaaatttggtagcatttatcagtaggttaatcaggacttgctgcaggcgtgagtcgtcagtctcgatgggcatttcttccagctcggtggtgaatgtaagttcagcttgtgtctgtttcactttgttcacggtatctatcacgtttctgcagatgcttacggcatcatgttgtgcaatacagaattgcagtttgccgaattcaagactcgatagatctatcacgtcgttaataagcttcagcaatagttctgagttctgttggataacttcattgcactgacggcgtgtctcatcgtccagtccctcttccgtcaatagggatgaaaagcccgataatgcattgagtggggtacggatttcatggctcatgttcgagaggaacacgctttttgcacgcatggcattttcggcatttatccgtgatgttgccagtttttgggtggagagtttcaccttttcccgttgccttttgagtaggatggcaagtagaacaaataacgttactaatgccatcgttcctaccaatatgctggttatgattttattgtattcgttattgctggccgtctctgccttatctacctggtattttgcctttatcgtattgatttgccggatatagctttgtgaagcgagtgtatctataggaggatacaattcctggtagattcggcaggcttccatggccatgccttgtattttacagagatagattttttccagcgaagtccagcggtaatacgtggagcgcttattaccggagtattctgcttgcaatttggagtagatgtccagagcttgtttccagtattgtttgtcccaatttcccatggctctatagtaggcggcagtggtataatccaagtgaaaccgatagaacttctctgggtgcagttggtaaatggagtccattttgtggagccagatgtttgcttcatcaagatagtcttgtgagaggtgtccatgggaaatggcaaaattcgtcttttcgatgcagaaaaagaagtctgtcgggtagtcaggctcctgatataatattttctccagctcttccaggattttttccgcttcttccagacgtcctttccgttgcagaacgttggacatttttaaaagaagctgtgccctatatggatgctggtctgaaatgttggatagttcagtcaaagcatcctggtatgattccagggctttatcccccatgttggctattgtattataggcgtctccgatggcttggttggccactaccataccaaattggtagtctgttgctttagcttcttcgtacataagttgtgcccggttcgtcgctaagctgatatcgccgcgcaatgtataggcattggccaattgaagttgtaatagaaaatacgttgttctatcttcatttgattgttgggtgggaagaagttgctcgctccacgcaatgacactgtctatggatatggagtcatcatagagaacttgtcttttgaccaatgattgcagaatactctgcttttcttgattggctattgtatgtgctgataagacagaagtatacagtatctgccccaatagcatccatataatcatttttgttctcaaatgtttgtttgcctcttttgtttattattggcaaaaataaatataaatgaataaataaaaaattaaatagatgctttttttatcctttatactcaatttgttagcaactttatgcaggcgattggaagggattaatacagttccaaaccaaactcttcttttagttgtaatagggcactgttcttttgtgccatcatctggaatttttcaacgcgtccgtaggcacgtaccttttcagtaggagcactaatccggacagtcatggtgactttgcggttctttagccgggtacgtaggtaattttgcagagtgggtatcatgccggtaaattccttggcaacgatttcattgtctaccacagcctcaaaagttgtgtcatttattaaagtgatgcgcatgttctgcatgcgcttggctatggctacttgctccttgggcatacgtccggcatactcctgccagtaatagttcaaatccctttcattgaagatgtagtcttcttccggttgtgctgcttggtgggcggcagtagggttagatgaagggtttctttgttcctcttctatatgggggcgtttgatggagacccctaatccggacattttcatgaccggaatttttttctcttctctcccttgcgccattaatacggcagcaggtgtggcatgtggagttgttgcattactatgctgcgtggcagcaggttggggagtgctgtttgtctgtactgccggctgtacggtttgttggggcatggcagcagtggcctgtggctgctgagcggcggcaggctgcgtgaatatgggttttatagcttgtttagggctgcgcccattggcaccgtcgtcctcctcggcggtcagttgtgccacttgtatcagagtgagctctaccagtagccgtttgtttttactggcacggtagttcaggtcacaatcgttgcagagcttcatggcacggtaaagaaaagggagggggcattgctgtgcttgtgcttggtaacgttcgcggatgcttgcgcccacttcaagcaacggcagtgtcgccgggtctttgctgacaagcaagtcgcgcaggtgggatgaaagtccggtgatgaagtggctgccgtcgaagcctttgttgagcacatcattcagtaatagcaacgcgtcactgattttgttctcaagaaagaatccggttagtttgaagtagtattcatagtccagcacattgaggttttcaatcacgctcttataggtgatgtgtcctccggtgaagcttaccacctggtcgaagatggatagtgcgtcgcgcataccgccgtctgctttgagggcaatgacattcaacgcttccggttcagcagtgataccttctttggaggcgacatatgcgaggtgtgctacggtatcttccacaccaatccggctgaaatcatatatttggcagcgtgaaaggatggtgggcaatatcttgtgcttctcggtagtggcaaggatgaatatggcatggcgtggaggctcttccagtgttttcaggaaagcattgaaagccgaggcggacagcatatgtacctcgtcaatgatatatactttgtatttgcctatctgaggtggaatgcgtacctgctccaccaattggcggatgtcatccacagagttgtttgaggcggcatccagctcatggatattgtaggagcgctgctcattgaaggcagtgcaggattcacattggttgcatgcctcgccgtctgctgtggggctcatgcagttgattgttttagcaaagatacgggcacaagttgtttttcccacgcctcttggaccgcaaaaaagataggcatgcgccaattttccggtggcaatggcgttcttcaaggtagtggtcagtgcacgttggcctaccacagactcaaaggtcgagggacgatatttccgtgcagatacgatatagttttccatattcgggatattctttgctttttgtgcaaatgtacacaaaaaaaagaaatctttcggttattcctcttatctttgtgacgtgaagttatatgatggacaagctccatcatgaatgataaattgctaaatagtagataacgagatggataaacttgcttctctttggtcttttgtccgcaagcataaatatttgattacgcttgcgttgtttgctgtaattatcgggttcctggatgagaacagtgttgtacgccgtttgggttacgcccgggaagaaagccgtctgcgcgatgaaatagaaaagtaccgcaaggaatacgaggagaataccgaacggctcaatgagcttgccgtcgactccggtgccatcgaacggattgcccgtgagaagtatctgatgaaaaagcccaatgaggatatttatgtatttgaagaagatatagaagaatgaaacaactgatacctgcccttttcgcagtaggggccgtgatgctcttggcaggagctgccgtttatatcacgggctggcctctttcaccttatatatatactatcggcgctacgatggttgctttggcccaaattaattctccgtccaaatgtaaaagtcccactgtcaaacgcctgcgccgacagcaaatattcggtgcgcttttgctggtgcttacgggggcattcatgctctttacaaggggcaatgaatggattgtgtctctgacgatagccgccattcttgagctttacacttcgatacgtattccacaagaagaggcgaaagaaggtttaagctaaatccggaacatatattctgcataaacaagaggggctgaactcttttatagagccagcccctttctcatttagttaatcttctgcgttatccgtctatctttctaccttttctactgtcagaactgccgaagagacacctgccgttacgtcaactgtgaaccggtaagcgacaccgttttccaggcttttgccttctacgaggcccaagttgccggcatcacgtccgttggtaccgtcacctataaatactaagtcactggtggtagacaaggcatcgtttttatattcacctccccaaccttgctggtggaagaacttgaagttgatgtcatcagatttgatttgctctcccgctactactgttacctgatacttcttcgcttcaatctgtgacatacagagtcctttctctgtggtccaacctacggcattggtcgctacggaaggtttaccgataccgtcaccgataatccaaagggcgccggttccgtcatcgttcagagtggcggtgcttgttccgttcattttcaatacttccagataattcagggccaggttggcaatgacgcgataagttccatcgatgggcaggaacttcagcgaaccgtcttcattcttttcgaagaagtcggggtctatccaatattggtcgaagttgggaatgtctgcagtgatgttgtccccttgcttcagattgaggtcgatgctgtaatggtcatcatccaccatctccatttcagaaccgttcagcagtagtttcacgaaaggagcggctgcataagtcaacgtattgaaggagatggaatattctccagctgacagattggagaaggtaatttcactggaggtaccttgtgtaatggcaccgttgctccatccgaagttgatttcattcccgttggcgcctactttaggagctttgatgtaacctttcactttttgtgcaaattcaccggtcacgctatactgattggctgcgactttttccatgcggtattcttggtctccggaaatcagagttaggtaggggaagtccggacgactcagcgccacgtcatagcttttctctgtaattgtgaaattgatgttctgcagaatgaacttcaatgtagctgttccgttgggaatatttgccagatagggaacatatattttcccggtatagtcttgaccgtttacttttgtacggattatagtctctgacaccatttcgtcgctgaagtataaccgcgcttttaacgtggaaaggggtacatctgcgtccgatgccttgattgtaaaaggcagactgtctccgaacaaggctgaagaaggttctgcctgaaagtccattgtcgggttgccgggaaccggatcgtcatcgctgcaagcattcagcatggctatgcctgccaatgccattagatagtattttaagcttttcattataatcttctgtttaaattattagttttattttttccaacggtaagaaacgactgctttggccggaacttcgtaggaaaagtagtgtgtgccgtcgcttacggtgattcgcttggcatctgcattgttgtttgccaatacgaatgcataggtaccgtccgtattctcgaaggcggagtaggtgattccgttggctgtgtaaccggtcgttccgatacgtacagctcccggtttcacgactgaagacatgtgcccgataaggtaataatgggaattacggacaattttagaatagtttgtattgtcaatatccactgcaccgtagcaggtcttgcaagaaccatctgaggggcttaccggtcccaggtcactgtctaacatcagattccacacaatggtgccgcggcaccagttgttggctgttcccaatgctatttcttccatatcgttaagcaggcgtgcttccaaatcgcgaccggagttccaagtaccgatggaggtttccgtaaaaagcagttccttgttgggatagagtttgtggatattcagcaactcagaacggttaccgccataattatggtaggcagcgcccgcaatgtattgtgaggcttccgcatcatcataaatcttggtagggtaacttttttggtcggccagattgtcgtagttgtagttatggtcgaaaacataaatctttgtagtaactccggcttctttgaaggcagggcccaggccggtcttgatgaagtcacgggcttcttcccatcccatgaacaaggatgctgagttaccgtggttcagcggttcgttctgcggagtcacagcgtggattttgatgccttccttttcgaaagcttgtatccattttacgaaatagtcgccatacgttctgtaatattcggggttcaagtgtccgctggtccatgagtcaaagggtacacgttcctccaggcttttcactttcatccacttcggacatgtccagggagcggcaattattttgacggcaggattgattgccagaatttccttcaatataggaatcacatatttggtgtcttccatcggaagggcaaagtgctcaagccccttttcgtcacagcaagtgaattcactgaatgagaagtcggaacaaccgatggcaatacgtacatagctgaagccatagccttctttgtccgagaatgtttcagtcagaaacttcgtgcggttctcttgtgtcatctgcatcaggttgtaaccggtagagccggtgatggctgcaccgaaaccgtccatttcctgatagcgggtggcagggtcaagtgtcacggtagaaggtgacatgttgcttccggtgccgaaggccagcccggactttgtcaaatcataagtacgactggtgttcgttacatagagggtaacatcctttgcctcttccgtgggttggtctggcttgggttccggtgtaggggtgatgttactgtcattgtcattgccgcaggctgccagtatggtgaagcagcctaatgcggtagtgaatatatttcttaaattcatattcaattgatttttatattactcattagtattaatagcccgggttctgtatcagattttcgttctggtcgatggctccttggggaatagccagcagataggagttctcattgaacagattttcttgtgcatggcggccgctgtctttggcgtaaacggcgttcatcacttcttctaccttattgaggcggcaaaggtcgtaccagcgctgtccttcaaaggcaagctccatgcggcgttcgtccatataagcttggagcaatgcttctttactgctgcgggtgctttgtggaagtttgcccagtccggcgcggttgcggatgcggtcgatgatgtcggctgcaccgttcaggtcgggagcctctcccataatttttgcttcggctttgaggagcaggatatcggcatatcgcagatagataatgctgttgaacgcagagcggcatttgtacatgaaggcataatggtctgccggataatagttgctccatccgcagtcataccatacaacagattcattgtaacgtttcgtgtctccttgctcttcatagaggcggataaggtcacgggaaggggtaatccatttggcccaggtgaaactttcatcccagttgctcaagttacggccgaacatccaagtacaccagttgccggagccgggaggaaagtgggcttcgagaattgcctccttggtattgcgtacccggcagtcttttttttccgtatcatacgcccaaaggtcgctgaagtcttccacgaggtcgaagccgtcggcagcaagttcatcggcatatttgataacctttgcataatcgcgcagaggtttttctgcatagaccttggcaagcatggcacgtgccaccgatttggtaagtatgctcttgtctgatgtgtcgtttgtcggtgtgttggggttttccactgcttcagtcaggtctttctctatttgggcgtaagcctcttcagccgtattctgtggaggaaaataggtcgggtacatttcttctacgttgtcttcggtaatgtcaccgcccacggtagtgatgaccgggaagttaccccataagcgtaccatatcgaacatgaccatggcacggaatatcttggcttgtgactgatacttgccgcgttcactttcactgagtgccttgagctggtcacagcccacgatgatgcggttggcaacggcaatgtcgcctaagaaacggtcccagtcacgttttagtacagaattagagccttcaatggagttggtttcgtaaggcaccacttcggcccccgttgttccggcgtaggcattatcggaatgagcgtcaccgataagcagtttgtcgacataccagtgctcctgccggtcacgaaattttttgtgaagggttaccattgaagtttccacgtcttgcacactgttgaaaataggcttttcatcagttttgttcactccttccgttacatccgagtaggtgtctaccggattatagtccaagtcacatgaggttgcggtcattgccaacaatacaccgcaagctatacttttatatatatggtttagtttcataagttatttcttccttttttagaattcaacattgataccgaaaacgaatgatttgctctgcgggtaagttccatagtcgatgccctgtacagaaccgctgttgccatattggttcacttcggggtccatacctgaatagctggtccaggtcagcaagttgctggcggtaaagtaaggctgtacgcggctgataccccatttcttgaactggcggcaacggatgttgtaagagagtgaaatgtctttgacacgcaggtagctgccgtcttctacaaaataagtggagttcttgatgttgaagttggctttcgggacattcgtaatctgtccgggaattctccagcgtttcaatacttccgttgactggtttttaccgtcatacataccttcggtttccatacgggacacattgaagatgtcgtttccgtagcttccttggatgaagatgctcaggctgaggtctttccatgtaaaggtgtttgtcaatccgtagatgaagtcgggattcgggtcgccgatataggtacggtcagaagtggaaatcttgccgtcttcgttaaggtcgcgataaatcaggttaccggtttcggagtctacaccgtcgctgatgtagccgtagaaaccacccaaaggacgtccgggctcattgcgtacgatattttctttcaccacctcggcactgcttgctgctgtatagattttctgcaatgacagcttggtcagcttgttcttattgaaagaaatgttgaagtctgtatcccaagaaaactcgccggtcaggttatgggagttgatggcgaactcgaatcccttgttggtcatctcgccttcgttacgggtgatgctggtggttgctgccgcaccagcaggcagacttacgttcatcaacatgtctgtggttttcttgtaatagtagtccatgctgaaggtcagtctgttgttcagtacggtcaggtcaaggccgatgttggtctggctggtggtttcccatttcaggtcacttgttctcaggttggcctggctgatgccgggaacagcatggtcgttgccctcttcgaaccacggtatgcggttgatgttgtagcgttgcagatacgagtaatcgcctatgccgctttggttaccggtctgtccccagccgccacggagtttcaggtcatcaatccaagtgatgtctttcatgaatttttccgatgaaatgcgccaggcagccgagaaggacgggaaaatgccccaacgatggtcgggatgcagtttggacgaaccgtcggcacgcatgttcatggtaagcatgtacttgctgtcataattgtaggacacgcgggcgaaataggaagagatagcccactgtgaagctcctgttccggtaccgtcccatgaaattttattggcggcattcagagtctgtatcttatcgtcccggaagtgtgagccgtttatccagctgttggtatagtccgatttggtataggaagaacctgccatgacgtcgataccatgtttcttgatgttggtgttgtaagtcaatatattgtcgaaaaccaatacggtattcatgtttcggttgtcggaagctgtaccgaagctgttgcgtccgtcggtggtcgatattggatcgaggaatgtggtgcttacaccgttacggcggtccagggctacggatgatttcaacttcaggttgggcagaaagctgatggtagcggctccggatgcgatgaggcggttctccttgttcttgttgtttttctggcgggccaggttttccatcgggttcatgatatttaccccgtagaagttcttattgtattgattcggcttttcagggtcccaaataggagcataggtcggtgtgttgataaccgagaggactacaccgccacggttggcacccgtaccggaaatgatgccggtgtttccgatattgtcggagtaggagatattggcacttacgttcagccaactgcgtatctggttgtcaatgttggcacggaagctatatcgtttgaagtacgtgccttccaaaatgcctttttcattcagataaccggcagagaggaagtatttcatcttttcgtttccgttagatacggacacctggtagttttgggtctgtccggttttgtaaacttcatcaaaccagtctgtctggtctgttagaccttcaagggcagcggggttgacagccccgatttcttcctgtaactcacggtattgttctgtattcagggcatccatgctcttggctactttcgtcataccatattgtacgttcagtgccactttggcattgccttctgctccggctttggtcgtaatcagtaccacaccgttggctgcacgcgaaccatagatggctgccgatgaggcatcctttaggatagagagactttcaatgtcgttgggagagagaaagttgatgttgtccacgggcacaccgtccactacgtagagcgggtcgttgctgccgttgaatgaggtggtaccacgtacgcggatgctcatgcctccgcccggttcaccgctgggttgcataaccgacacgccggctgctttgccttgcagggcttgggctgccgatacaatggggcgttggtccaaatcctttgtagaaaccgtggatacggctgtggttacgtctttacgcttcacacttccataaccgataactaccacttcgtccagcagttcgttatcttcctgcaatgtgatattcatgttggtggttgcttttacctctatcgttttgtagccgatgaaggatattaccagtgtggcattctgtcctacactcagggaaaactccccgtccagattggtaacaacaccgttggcggtacccttttccaatacggatgcgccaatgacctccaggcctgcagcatctgttactttacccgtagctgtcaatcgttgggcaaatgcatttgttgacattagcagtacgagtaatgtcaaaaggagcttgtaactccgcgtaagaagatttcttgtaatcattctcatagtactttaattgaaagatttaatttattattagaaaagtatgtcctaatagagattggtggttttccatagtacacttttctttctgtgctgcaaagatagcggacaaccctattcgtccgataggcaggtaatatggagaagtaagtctgtgtgaaatgtaaatatcagatatataataagttgtattcttgctgattactgtgtaaagtaaaggtcggccactatggaaggaggtctgtatatactgttttgtcgctttgagcggtcgaaatatctcttaaatttcatgtactttttagggtggaggtagtttatgtttagatagattaatttatctttgtgctctcagccttatatagataatagaaatgaaaagaaaaatcatagctttactatttttgctgatggggtgtacctttctgaatgcggcaccttacagtgaaaagataaaagaactgctggtgcgtcttgattctctgattgcgcaaaaaaacacgtttgctatgcttaaagaggcgaagattgcccagttgcacaagttgcgaaaggatgtgcgtactttggaggagagatattggctgaataaaaatctttatgatgagtattgtgtctataatgccgattctgcaatgaattatgtggcaggcaatttggacatagtttataagcagaatgataaataccggcagatggagtggaagataaaaaagtcttttctgttggctgccaccggtctgttgaaagaagcccaggatgagttggacggagtctcgggcggttcgctccccaaagaattgttagtggactattacggacaaatgttgtatctgtattcgcatttcaatcagtataccggtagtgaaatgggtactttgcatgaacattatgcacagttggagcgtgtttacaaggactctttgaatatggttcttacccctgaagaccccttgttcttgtggtataaagggcaggtagtacaaggtacggacagtatgtatgtttttaaagaacgtttgcagaagggaattcttaattctgcattcgacactcggcgcgatgccatgaatgcttacgtgctggcctgcttttatcgcgagtccgatgagcaggaaaattatctgacttacctgatatattctgctatggccgatgtacgtatctccaataaagatattgcttcgttggaagagctggcgggggtactttttagtttgggtgatattgaccatgcttatgtctacatgagttactgcttgcagaatgccttggcatatcggaaccgggtgagggtagtgggcatctctgcggtgcaggacaccattcatcagatctatcaggaacgtaatcagaggcaagaagcgcggttacgtatgtatttggtactggtcagtgtcttgtctttgatatccttgtttgccttcctatatatatacaagcagatgaagcggttgaagcagtcgcgccaacagctgaatgaggcaaacaaccgcttgaataagcatgtggaagagctttcgaaaatgcacggacaagtggcagaaacgaatgtacagcttacttctttgaatgaacagttgagggataccaataatcagcttcgtgaatccaactatgtgaaggaggaatacataggttatgtcttttccatttgttccaattatatcagtaagctggatgagtatcggaaaaatatcaatcgtaagcttaaggcaaaccagttggaggatgtgaaagcattgaccgatactcattctatggcacagaatgagttgaaagagttctatcataactttgatgctatcttcttgcacatttatccggatttcgtaagtgacttcaatgccttgctccatcctgacgagcagattgtgctaaaagatggtgagctgctgaatacggaattgcgcatttatgctttggtgcgtttaggtatcactgatagtgtgaagattgccgaattcttgcattattcacctcagaccgtttataataatcgtttgaaaacacgtaataaggctatcattcctcgagaagagtttgctgccgttgtgcgttctttgggtagggcacagaagtggatttgataaaggcttctactgattgtcgcagtatggtgcgtagatgacacctaagagttaggaaaaaaactgcgatgtactaccttgtttttctctaaaaactaatctttccacagcaatgttcttttcttaccacagctgtggaaagaaagaaacgcggg

SEQ ID NO: 4426 - DNA, 92482 bp, Unknown
  gut microbiota DNA sequence
actgcgtaacagtgggagagtaggtagtcgccgttttcagaagaagcctccgtgtctgataaggatacggagactttgttcgtttatatacctccggaactgctccccttaatccctgtcatgcgttgttgcatacgtatttttctgcttcttttgtcattcttttgttatcattacagaacaaagttggtgtaaaatgagttttttttggaagagcaagaacttttcttcctttctttctattcaatatcaaatggatttttgtaaatttggcgtgaatctaataggaagggaaaaaatcacgcaattaatattgtaatataaatcatataataactcctgcaaatatggaaaacaagattcaagagctgaccgataagatctaccgcgaaggcgtagagaaaggaaacgaagaggcacagaaacttatcgcaaaagctcaggaagaagccaagagaattatagaggatgctcacaaggaagcggattctatcgtggctaccgctcataagtctgccgatgaactggcagagaatacaaaatctgaattaaagttgtttgccggtcaggctgtgaatgctctgaagtccgaaatcgctacgttggtgacggacaacattgtgaatgccgatgtaaaggcatttgctgcaaacaaggattatcttaatgccttcatcgttgcattggcgtccaaatggagtgtgaacgaaccaatcgttatctctactgccgatgcggaaggcttgacaaaatatttcgcagcgaaggcgaaagacctgctggacaagggtgtgaagattgagcaagtgaatggcatcaaaaccttgttctccgtatcgcctgccgatggttcgtacaaggtgaactttggcgaagaagaatttatgaattacttcaaggaattcctgcgtccgcaattagtggaaatgctgttctaaaaactcccacaggattatgagtaaatactattacttggtagccggtttgcctgaacttactctggaagacagtaaactgagctatacagtagccgatttcaagacggaactatatcctgccttgtcggaagatgataaaaagttgatagatttgttttatctgaaattcgataatgcgaatgtcttgaaactattgaaggataaggatgctgccatcgacccgcgcggaaactattcgtcggaggaactggtggaatatatctcacaactgaaggatggcgacgaagtctctgacagtgtattcccatcttatctctctacgttcatttccgaatatttcagcctgcctgccgaggacggtttcttgtatgaagaccgcctggcagcgctctattacgcctatgctatggaatccaggaatcagtttgtgtcttcctggtttggcttcaacctcactctcaataatatattggtggcgctcacagcacgtaagttcaagctggacattgctccgctgattgtgggtgatacggaagtgtgcgaggctctgcgtacttccaatgcccgtgacttcggtctgggtactgaggtggattatctggagcagctggtgaaaatcagtgagacggaggaactggtggaccgggaaaagaaactggaccagcttcgctgggactggatggaggaggccacattcttcgattactttaccgtggaacgtctgtttgtcttcctgctacagctggagatgatagaacggtggatttcgttggataaagagaagggtaaccaactgttccgcagcattatcgctgccttgaaagacgaggtgcagatacccgcagaattcagataaaataaacaactaaaaatatatggcaacaaaaggaactgttagtggcgtaatagccaacatggtgaccctcgtcgtcgacggaccggtagcgcagaatgagatttgttatatctcgaccggaggagacaagttgatggcggaggtgattaaggtagtaggtacccaggtctacgtgcaggtatttgagagtacccgcggactgaaagtgggggccgaagctgcgtttaccggacatatgctcgaagtaacactggggcccggtatgctttcgaaaaactacgacggtctgcaaaacgacctcgataagatggacggtgttttcttgaaacgcgggcaatatacctatccgctggataaaggaagcaaatggcattttgtgcctttggcaaaggtgggcgaccaagtggaagccgctgcctggctgggacaagtggacgaaaacttccaacctctgaaaatcatggtgccttttgaacagaaaggtgtgtgcaccgtgaaatcaattgcaaaggaaggtgattacagcattgaggataccattgcagtgctgacggatagcgaaggtaatgacatccgggtgaacatgatacagaaatggcccgtgaagcgcgccatgaccaactataaggaaaaaccgcgtcctttcaaattgctggaaaccggtgtgcgtgtaatcgacaccgtaaacccgattgtggaaggtggtacgggttttatccccggtccgttcggtactggaaaaacggtgcttcagcatgccatttcaaaacaagcggaagcggacatcgtaatcatcgctgcctgcggtgagcgtgccaacgaggttgtggaaatctttacagaattccccgaattggttgacccgcatacgggacggaagctgatggaacgtacgattatcattgccaatacttcgaacatgccggtggctgcccgtgaggcatctgtctacacggctatgacgattgcagaatactaccgaagcatgggattgaaggtactgctgatggcggactccacttcacgttgggcgcaggcattacgcgagatgtccaaccgtatggaggagttgcccggtcccgatgccttcccgatggacttgtcctccatcatctccaacttctacggccgtgcgggttatgtgaagctgaacaacggcgagtccggttccattactttcatcggtacggtatcgcctgccggtggtaacttgaaggagccggtaaccgagaatacgaagaaggtggcacgctgcttctatgcccttgagcaagaccgtgccgacaagaagcgttatcctgccgtaaacccgattgactcgtattccaaatatatagaataccctgaatttgaagagtatatcaccaagcacatcaacggtgagtggattggcaaggtgaatgaaatcaagacccgtttgcagcgtggtaaggagattgccgagcaaatcaacatcttgggtgacgacggtgtgcccgtagagtatcacgtgactttctggaaatcggaattgattgacttcgttattctgcagcaggatgcctttgatgaaattgatgccgtgaccccgatggagcgtcaggaggagattctgaatatggtaatagaaatctgtcatacagaatttgagttcgacaacttcaacgaagtaatggattacttcaagaaaatgattaacatctgtaagcagatgaactactcgaagtttaagtcggaagaatacgacaagttccataagcagttgcaggaactggttgaggaacgtaaagcctaaggatgtactatgtgactatttacaatttactatttgccttgcggatgcaggtgtacggaggttgtagataggaaaatagtagaataggatggcagagatttaaatagtaaatagtaaattgctaaattgtaaataaatagatggcaacaaaagcatttcaaaaaatatataccaagattactcagattacgaaagctacgtgttcgctgaaggcaaccggagtggggtatgacgagttggcgaccgtaaacggcaagctggcccaggtggtgaagattgccggcgacgaagtgactttgcaggtgtttgagggtacggaaggtattcccaccaatgcagaggtagtattcttgggcaaggctcctacaatcaaagtgagcgagcagcttgccggacgcttcttcaacgcctttggcgaccccatcgacggtggtccggccattgaaggcgaggaggtggaaattggcggtccatccgtgaatccggtgcgccgtaagcagccctcggaactgattgcaaccggtattgcaggtatcgacttgaacaatacgctggtgtccggacagaagattccgttctttgccgaccccgaccagcccttcaaccaggtgatggcgaatgtggctctgcgtgcggagactgacaagattatccttggcggtatgggtatgacgaacgatgattacctttacttcaagaacgtattctccaatgccggtgcgctcgaccgtatcgtcagctttatgaataccaccgagaatcctccggtagagcgtctgctgattccggatatggcactgacggcggccgagtattttgctgtaaacaataatgaaaaggtgctggtgctgctgacggatatgacttcctacgccgatgcgctcgccatcgtatccaaccgtatggaccagattccttcgaaggactccatgccgggttccctttattcggacttggcgaagatatacgaaaaggcggtgcagttcccaagcggcggttccatcacgattattgcggtgacgactctgtccggtggcgacattacgcatgccgtgcccgacaatacgggttatatcacggaaggccagttgttcctccgtcgtgacagcgacatcggtaaggttatcgttgacccgttccgttccttgtcccgtctgaaacagcttgttacgggcaaaaagacacgtaaggaccatccgcaggtgatgaatgccgccgtacgtctgtacgccgatgccgccaacgccaaaaccaagcttgaaaacggtttcgacctgacgaactacgacgaacgtacccttgcctttgccaaggactactccaaccagctactggccatcgatgtcaacctcgataccacagagatgctcgatgtggcatggagtctgttcggcaagtatttccgtccggaagaggtgaatatcaagaaagagcttgtggaccagttctggccgaaagcaaactaaataaatgtacgattagacgatttacggtttacgattgatattactgaaattgtaaatctgtaaattgagaaattgagtagcttcagtcgtctaatcgtaaatcgttaaatcgtaaataaaatggctattaagtttcaatataacaaaacctcgcttcagcaactcgaaaagcaactgaaggtgcgcgtgcgtacactccccattattaagaataaggagagtgccctgcgtatggaagtgaagcgctgcaagggagacgctgccgcgttggacgcgaggttggaaaaggaaatccaagcttacgaagccatgttcgccctttggaatgagttcgacgcttcattgataaaggtcagcgatgttcatctcggtgtaaagaagattgccggtgtacgggtgccgttgctcgagaatgtagatttcgagatacgcccttacagcttgttcaatgcgcccaaatggtatgcagacgggctgcatttgcttaagtcactggcacatactgccatcgagcgtgaatttactgttgccaagttgaacttgttggaacatgcgcgtaaaaagaccacccagaaggtgaatctttttgagaaagtacagattccgggttatcaggatgctctgcgcaaaatcaagcggtttatggaagacgaggagaacctttccaagtcatcgcagaaaatcatgaaatcccatcaggagaaaaggaaggaggcagaggcatgattacgaaaatgaagaagctcacgttccttgtgtatcataaggagtacgaagcatttctggcacaaatccgggaactgggcgtggtgcacgttgtggaaaggcagtgcggcgagatggacgacaccttgcagcaattcatgcagaagcgtacgctctacaagaatatgcttcagagcatgcacaccctggcagacaaacagccggaagaaaaggtgcataaagagttgtcggccgatgctctggtgaaattctacgaggacttgcaggcgcggatacaagacttgaaccagcagattcccgccatcgacaaggatgtggcgcagatggaagtctggggcgatttcgattggagagccatccgcaagctggaagatgctggttggttcgtgcagttctatacctgcccggagaaagactataacgaagcgtgggcagaggactacaatgccatcgtggtgaaagagaacggcggacatctttatttcgtgaccgtcactccccaaccggtagaactggatgtggaaccgctccgtctgccttcactcagcctctccgaactgagccggaagaaagccgatacggaagaggcccttgtgcaggcacatgccggattgaaagaattctgcaaagcgaattactgcacgttggagaagtacaacctacagctccaggaagagatagacctgctgaaagtcaagctgaacagcgaacatatggcagaaggtgccgtagtgttgatggaaggctggattcccgaagactgcgaggcggatgtgaggaaacttctcgatgaaagcggcacttattatgagataagggctgccaagcgcgaggacaatgctcccatcaagctgaaaaacaacgcctatacacgcatgtacgaagtgcttaccaaaatgtacggtatgcccgaatatgccgagttcgacccgacaccgatacttgcgccattcttctcgctcttctttgctttctgtatgggagatgcgggctacggtctggtactgattgcactcgggttcattttgaaaaggaagatgtccaagtccatgaaaggcatgatgaacctggtgattacgttgggtatatttacgtccgtcatcggtgccatattgggaaccttcttcggtgtaagcctctttgacctggagatacccgccaaactgaaggaattcatgattgtgggtaagataggtgagactacctatgacaagcaaatgctgctggcgttgattatcggtgcggtgcacatctgcattgccatgacggtgaaggccgtgggacagaccgttcgtttcggcttcaaggagtcgctcagtgcctggggatggctgttgctggtggtgggatttatctgcaccggcggactttccttcttcaagataatttcggaagacgtgtctacgtgggcatttatcgtgattggcggtgtttccgccatcggtatctacctgctgaacaatatccaccggaatgtatttgtcaacatcggtgccggagtatgggatacctataacatggcaaccggattgatgggcgatatactttcctacatccgtctctatgccctcggcttggcaggcggtatgcttggaggcgtgttcaaccagcttgccttcatggtgaacgatgctgcaggtccggccctgggatggctgttctgcggtctgatactgatattcgggcatacgctgaacattgccatgtcttgtctgagtgcctttgtacacccgctccgtctgacatttgtggaatacttcaagaattccggttacgaaggtaagggcgaagcctataaaccttttacagtagtaaagaaataaacaaattaaaaaacaaataaaaatagaaacattatgaatgaaattttaggttatctcggtctgggcctgatgttggcccttgcaggaattggcagttgcttcggtacaactatcgccggtagtgcggcagaaggtgcgttgaagaaagacccttccaagtcagcaagttatatgattttgtcggcccttccggctacgcagggactttacggcttcgtggctttcctgatgtccatgggcaaggattttgctacggacggtcctttgatgctgggcatcggattgggtgtcggactggtatgtctgttctccgctatccgtcagggacagatttgtgctagcggtattgtgggtatctcccagggacacgacgtacagaccaatacaatgatttacgccgcgcttcctgaattctacgctattttggcgctggtagctgcattgatggtataatccggattataagaaaataaaccccagggatttacaattgaaatccctggggttttttgtttaaattcctggggcttcaactgaaaactccagaaattcttttttgaaacttcgggaattttagacgaaaaatgcatggatgggcgagtcaatggggcttttgtggctaaactatgacattccgcaaacgattgtttatgcatatttaatcagttttttcgattaaaaggctatttttcaaagaataatacgtacttttgcagccgtaattaagataaagagattataacataatatgactaaagaactacttacccccgattacatcttcgaagcgagttgggaagtgtgtaataaagtaggcggtatctatacagttttgtctacaagggcaaatactttacagactaaatttcgcgatagattattctttatagggccggatttctggcagggaaaagagaaccctttgttcattgagtctgataacctttgtgcagcgtggaaaaaacatgcagcgttgaaagacaatctttccgtccgcgtaggtcgctggaacattccgggagaacctattgttatattggttgatttccaaccgttctttgcagaaaaaaatgagatttatacagaaatgtggaaccgctatcaggtggattcactgcatggatatggtgattatgacgaagcatccatgtttgctttcgctaccggcaaggtgatagagagcttctatcgctataatttgacggaaacggacaaagtggtgttccaggcacacgagtggatgaccggcatggccgccctctatcttcagtctgccgttcccgagatagggactatcttcaccacccatgccacgtccatcggccgctccatagctggcaacaacaagccgctttacgattatcttttcgcctacaacggcgaccagatggcggaggagctgaacatgcagtccaaacattccattgaaaagcagacggcccactatgtggactgtttcaccactgtgagcgaaatcacaaacaacgaatgcagggaattgcttgacaagcctgcggatgttgtgctgatgaacggttttgaagatgattttgtaccgaaaggcgccacctttaccggcaagcgcaaacgtgcccgttccaccatgctgcgtgtggcaaactgcctactgggtgaggacttgggcgacgatacgctgattatcggtaccagcggacgctatgagttcaaaaataagggtatcgatgtgttcctggaatcattgaaccggctgaaccgcgataaagatttaaagaagaaagtattggcgtttgtcaacgtgcccagctgggtgggagacccccgcgaggacttgcagaagcgcttgaagagcaaagataagttcaccgaaccgttgcagtgtcctttcatcacccactggctgcacaatatgacgcacgaccaggtgctggatatgctgaaatacctcggtatgggcaatcgtcccgaagataaggtgaaagtaatttttgtaccttgctatcaggatggtcacgatggcatcctcaacaagcattattatgacttgattttaggcgaggacctcagtgtctatccgtcctattatgaaccgtggggatataccccgctggagagcgtggctttccgggtgcctaccatcaccaccgaccttgccggtttcggactttgggtgaacagcctgaaaaaccagcatggcataaacgacggagtggaagtgctgcaccgttcggactataactattccgaagtggcagacggcatcaaggacaccgtagccttgttctctaccaagacggaagccgaaatcaaggaaatacgcaagcgtgcaggccaggtggcagagcaggctttgtggaagcactttatacaatattattacgaggcttacgacattgcactgcgcaatgccatgaagcgtcaactaaaataaaagaattattaatcaattagttatcatacaatgaagattaaagttagtaatgtaaacactcctaactggaaagatgtgaatgtgaaatcgcacattcccgccgaactggagaaactgtctgaactggcacataacatctggtgggcatggaattatgaagccaccgaactgttcagagaccttgaccctgctctctggaaagaagtgggacagaaccccgtacttctgctggaacgtatgagttatgctaaactcgaggcactcgcaaatgacaaagttattctgcgcagaatggatgacgtatactccaagttccgcacatacatggatgtgaagcctgacagcaagcgcccgtccgtggcttatttcagtatggagtatggtttgagccatgtacttaagatatattccggcggtctgggtgtacttgccggtgactacctgaaagaagcttccgatagcaacgccgacttgtgtgcaatcggtttcctgtaccgctacggttactttacacaaacattgtctatggacggccagcagattgccaattacgaggcacagaactttggccagttgcccatcgaccgtgtattggatgagaagggcgagcagatggtagtggatgttccttatctggactactacgtgcatgcttatgtgtggagagtgaacgttggacgtatctctctctatctgcttgatactgacaatgaaatgaacagcgagttcgaccgttccatcactcaccagctgtatggcggtgactgggaaaaccgcttgaagcaggaaatcctgctcggtatcggtggtattctgacgctgaagaagctgggcatcaagaaagatatctatcactgcaacgaaggacatgctgctttaatcaacgtacagcgcatctgtgactacgtggccgaaggtctgacttacgaccaggctatcgagctggtacgtgcttcttctctctatactgtacatactccggttcctgccggtcacgactacttcgacgaaggccttttcggcaagtacatgggcggctatccttcaagaatgggtatcagctgggacgacctgatggacctcggacgtaacaatccgggcgacaagggtgaacgtttctgtatgtctgtattcgcttgcaacacttctcaggaggtgaacggtgtgagctggctgcacggaaaggtttcccaggagatgttcgcttccatctggaagggttacttccccgaagaaagccatgtgggctacgttaccaacggtgtacacttccccacttggagcgctacggagtggaaacatctctatgctgcgcattttgatgagaacttcctctacgaccagtccaaccccaagatttgggaggctatctataacgtgtccgacgaagaaatctggaagacgcgcatggtgatgaagaacaaactgattgactatgttcgcaagcaataccgtgaaacttggttgaagaaccagggtgacccttcacgcatcgtttccctgctggacaaaatcaatccgaacgctctgctgataggtttcggacgccgtttcgctacctacaagcgtgcacacttgctgttcaccgacctcgaccgtctggccaagattgtgaacaaccccgactatccggtacagttcctctttaccggtaaggctcacccgcacgatggtgccggccagggcttgattaagagaatcattgagatttcccgtcgtccggagttcctgggcaagattatcttcctggaaaattatgacatgcagttggcacgtcgcctcgtttcaggtgtggatatctggctgaacactccgacacgtccgctcgaagcatccggtacttccggcgaaaaggcgttgatgaacggtgttgtaaacttctccgtactcgacggctggtggttggaaggctatcgtgaaggtgccggttgggcattgaccgaaaagcgtacttaccagaaccaggaacatcaggaccagctcgatgccgctactatctacagcattcttgagcaagaaattctgccgttgttctatgcacgcaacaagaagggatattctgaaggttgggtgaagactatcaagaactccatcgcacagattgctccccactatacaatgaagcgtcagctggacgactattacgacaagttctacatcaaggaggccaaacgtttcaagatgctggctgccgacggttgtgccaaggctaaggaaatagctgcttggaaggaagaagttgccgagaagtgggacagcattgaagtggtgtcttgcgaaaagaccgaagacctggtgaaaggctccatcgagagcggtaaggaatacaccattacttatgttatcgacgagaagggcttgaacgatgctatcggtctggaactggtgactacttatacggctcaggatggcaaacagcatgtttactccgtagaaccgttcaatgtagtgaagaaagaaggtaacctttatactttccaagctaagcacaagatggaaaatgcgggtagcttcaaggtttcttaccgtatgttcccgaagaatgcagacctgcctcaccgtcaggacttctgctacgttcgctggttcgtataagagcataaaaaagataatgtgcctgcggatatggcggaacacattatctgttcagataaaagatatcatctgcatgattgcaggcagaccatccgtttaaagtaaacggatggtctgtttcttttctagagcttgctttttatttcggctgtccaggcgtcaatgcgttcggcggttttgttactttcgttcacttcgtcgaggggaagtcctacgaatgcaccgtctaccacggcgatggaagaggagaaggaatacccgtccgtgctgactttgttgcccaagaaggtacacccgctatccttcaggtcctcgtagagtactccgatgccgtcgcagaatgtgtcgcagtaggagtcggagtcgccgcaaccgaataaggctacgaacttcatggaaaggtcggcgctcttcagtacctttacgccgtcataccagtcgtcctgcagttcgccgtctccccaagtggaggtacctagaaccagcacttcatattccttgattttatcggcggtcatcttgtcaacactatgtacgtcggtggaggaaactcccaacttttcggctatctggttagccaactcttcgcaggttccggtactggaaccataaaaaacaccagtctttttcattgtaaataaagtgattaaattgtttgctgcaaagtaaaggctttgccggagaacgtgaaatacctacatgtagggcttttagtgttgtgccgctccccatttcgggttagcttgtggcgtggtttatagaggtcgcggctacctactaattgggatggcagactctctttttgatgaaaagtaggtattgccggattgttaaaaatgaaggacatttgtaccggtaataatagacaagtgtttatggttagattcgtacattccactcattcgcaattccatccttccgtggctggtaagtggctggtgtgggggactttgatgatgcttcttgcgggggtggctatcattgttttttcggtattctcgcatgatgcactcgatgcgtgctgtaattgcataatctgtactttcaaccgtgtcccgaaggaaggggaatatttgtataaccgctacctgccggtcatcagcatggtgtgggtggcgtttctgatacttttggtatatgtggtccgctattgcatgaacaagaggaggtagccgggtgttctataggtaaaactgaaaggagactatatgaaaaagattgttttgcttcgccacggcgagagtgcatggaataaggaaaaccgcttcacggggtggacggatgttgatttgacagagaaaggcgttgctgaagctgtaagggcgggtgagctgctggcagaaaagggattccgcttcaagaaggcgtatacttcctatctgaagcgtgccgtgaagacactggattgtgtgctggaccgcctcgaccaggactggattccggtggagaaatcgtggaggttgaatgagaaacactacggccagttgcaagggctgaacaaggcagagacggctgccaagtacggtgacgagcaggtgttggtatggcgccggagctttgatgtggctccgcatgcattggccgaggatgacccgcgtaatccgcgttttgaggaccgttatcaagaagtgcccgatgccgaactgccccgtacggagtcgttgaaagatacgattgagcgtatcatgccttactggaaatgtgtcatcttcccgaatctgaagacggccgacgaattgctggtagtggctcatggcaatagcctgcggggtattatcaagcatctgaagcatatttcggacgatgaaattgtgcatctgaacctgcctacggcggtgccctacgtctttgagtttgacgatgagctgaacttgacgaaagactatttcttgggtgaccccgaggagataaagaaattgatggaggctgtggccaatcagggaaagaagaactgattttggcgcacggaagcgcgctatttctttatcctctcattccatggagcagcgtcatgctgagcagtaccccgaccactatacagatgaggataaggaaccagttcatgagccgtgcgcccagcttggtttccttgtgcaagttctgttcaaagtagttcttgaagaacagatagatggcaggcacagtggcgcttgccagtagcaggtcttcgggaatcttgtagatgtagactttggaaaaggcgatgagcgcccagtggcaaaggaacagaatgacgagcaggttgaccctgcgcgagaaagccagcagcagcccgatggtgaaaactgctaccgagcagggcatcacggtggtggtcatcatgggaaattccattccgcgtgcccacgaaaggagcgggtagaggaaaggcattgcatagagtacccccaccagtaccttgtatttcgggttgcgctcgaacggagtgtagccggtaaacaaatcccatagccacaacactgcaatcactccccagaagatggcgagtatatggtggtgtccgcgcgctccgcaatacatcatgtagtacacgatggatatccacccgttcagaaataccatgtagattttcatggagcgttttgcccataaggtcggtttccagtagagttgcgtggtgagcaggatacctgctgcggtgatgaggagctgtgtccaccaggtggcctcgttgtattgtgcgatagtattccagaatatttccatttgtgtccattaaaaaaacggctgcaaaggtagagttttctgccgaaagaatgaaatcgttttctacattttgcctatctttgtgcctccaaaaaaataggtaaaaagattcatggataagactttgactgaacaagagattgccctgctgcgcaggaaactcgatttattgcttcgtaccggacagctgctggtggagagtgcggctgatacgaaccgtgttgttcgtaacctgaaccgtgttgccgcctatctggggctgccggaagaaaagctccacatcgacgtaagttataccatgctggtggtgaatgtgagcgacggcctgcattcgttctccaaattccagaaatgtgaaaagcatggcatcaacatgacggccatttccgaaatcagcaaactgtcctggcgggctattgagaatgactattccctcgaccagtatgaggaggaactggaaagaatcaaaaacaagaagcggaactatgtgccatacgttgttgccatcggtgccggctttgcctgcggaggtttctgtaaactgttcggtggtgactggatggcgtttctgtttacctctatctgcgcttttgccggcttccgcgtccgtgcccgttgcatggagttcggcatcaatcactatatgagtattgccattgccgcattgatttctacctgtctggcctatgtgtcttcgtttgccgggctctcggaaactccctatcatccgttgttggcgtgtgcactgttcatcgttccgggggtgccgctgataaactttgtggatgatatgattgacaattatatccaggtgggcattgtgcgggctgtgaatacggtgctgatggtctgtgcaatggccttcggcattgtaatagccatgcgcctgctgacggtggaggatgtcgtgattgacaagaagttcagcgaattgagtatggtgcctcatgacagttatctggtgtatgccattgcggcggcgatagctgccatgggattttccatgatattcaacatacagcggcgcttgttgtgggttgttgcggtgggcggtatcattgccgtttgtacgcgtaactttgtcaatttcgaattgggttacggaccggtgataggttcgttcatgggcagcatggttgtcagcctgatagccgtgaaggcagtgcattggttccatgttcccaatcacgtactgacgattccttctgtcatcccgatgattccgggagtgctgatgtatcgtgcacttttcgggcttatcaatatgcacggtgtggtaggcgaggtgacggcggttgtttccaacggcatcacggcttcactgattattctctgcatagcgctgggagtggcggtgcccaatatctttgcccgccggtatattgccaaggataggcagcgctttcttcaggaggagctgcagaagcgcagggaaagagggaaatttatagaatggtgatataggtggagggtgtcaaaaaactcttaacactttcttttaggcgcggattacgcggatttcacggattttgtttattgaatccgtgttattccgtgtaattcgcgcctgatattataacattataaaagtgctcatatatttttgaaaacttctcttcttttttaaatgccctttttcggattatagtggtaaatgacggtttcgcctttttgcagggatgtttgtacgtcaatcagacgctggttgcggcttccccggaaatagagttcctcatccctcagttctttcttgaatttgccgtccaccagtacgtcgatgtacttcagcagttgggcttggcgcgggttgcgcagtagtttttcgaaagtatagcccgtatagcaccagatgtttttccggctccgctccttgatggcatgtgccagttgggtgaatccttccggctggaacatcgggtctccaccactgaaggtgacgtctgcaaagttgtcggcaaggactttttccagaatctcttccgtactcatccagtgcccgcggttgatgtcccacgactccggattgtggcaaccgggacaaccgttggggcatccggcagcataaatggcggtccggaagcccggaccgtctactgtggtatcttctaaaatatcgagaatagaaagcatgagtagggaattaataattaaaaattaaacatcgcaggtaggaagctgaacattaatcattaaaaattaaacgtcaaccattaaaaatgaagctccgctttgcactgcgcagccctttaatttttaattttcaatttttaattatgaacgaccctgtcgttcaactctgccagcttggcattgttccagcggtcggttgtccccaccaggtagccggtgatgcgttgcagcttgtcgatatgcttgctgccgcacttcgggcattcttccaggtttggggtggagttttcgtgaccgcactccagacagcggttacggttgtggtttaccgaaccgtagccgatgttgtattggtccatcatgtccactacacgcataatgacttccggattgtgggtggcgtcaccgtctatctccacatagaagatgtgtccgccgcgggtcagctcatgataaggagcctccacttccgctttgtggcgggcgctgcatttgtagtatacgggcacgtggttggagttggtgtagtagtcacggtccgtaatgcccggcagcgtgccgaacttcttacggtctatgcgggtgaacttgcccgacagcccttcggcaggagtggcaagcacgctgtagttgtgctggtattgctccgagaactggttggcacggtcgcgcatgtaggtcacgattttcagtcccagctcctgggcttcgccagattcgccgtgatgttttccgagcaatgccacgagacattctgccaacccgatgaaaccgattcccagtgttccctggttgatgacggaagcaatcgtatcgttcggtttcagcttctcgctgcctatccacaaggcagacatcagtagcgggaactgcttggcgaaggcggtcttttgaaactccatgcgctcgtgcagctggcgtgcggtcacttcgagcatactatccaacttggcaaagaaccgggcgatgcgctgttctttgtcttcgatgttcatgcactcaatgcccagacggacgatgttgatggtagagaaagagatgttgccgcgtccgatggaggtcttcggtccgaaacggttttcgaatacacgggtacggcatcccatggtagcaacttcatgctggtagcgtttcgggtcatcggctttccagtcctcgctttggttgaaggtggcgtccaggttcaggaagttcgggaagaaacgccgtgccgtcaccttgcaggccagttggtagaggtcgtagttgcggtcttcaggcaggtagctcacaccccgtttctttttccatatctggatggggaagatggcggtttctccgtttcctaccccttgataggtgcttttcagcagctcgcggatgatgcagcgcccctcggcagaggtgtctgtgccgtagttgatggagctgaacaccacttggttgccgccgcgtgagtggatggtgttcatgttatggataaacgcctccatggactggtgcacacgcgatacggtcttgttgacggcatgctgtacgatgcggtcctcgcccgtcagtccgtccaacggctgtagcagatagtcggccagttccttctgatagagatgggaatagtcttttccattcagttcttccaggttcttgacttcctcgatgaagctgttgcgcacgtagggggcaaggtagaaatcgaatgcagggatggcttgtccgccgtgcatctcgttctgggctgtttccagcgagatgcatcccaggatactggcagtctcgatgcgtttggccgggcgcgattcgccgtgtccggcagagaagccgtatttcagaatatggtccagcggatgctgcacgcatgtcaggctcttggtgggataataatccttgtcatggatgtgcagatagttctgggtgacagcatccagcacttcttcactcagcagatagtcgtccacaaaaggcttggtggtttcgctggcaaacttcatcatcatgcccgccggggtatcggcattcatgttggcattttcgcgtgtgatgtcgttggacttgatgttaatgatttccaggaacatgtcgcgcgtctttgctttgcgggcaatgcttcgctggttgcggtaagcgatgtatttctgggcaacgtccttgcggctgctcttcatcagctccacttccaccaaatcctggatggcttccaccgtcatctgcgaatctcccttgaaagagatgcggtccgtaatctggtgtatcagttgcaggtcttcccccttgtctgtatgcaacatggctttgcggatggccgttgctattttttcttcgttgaatccgacgacgcgcccgtcgcgcttgagtactgtctgtatcataaccttttatgcttaaatgtgactgtcttttttagtttaattgcggaaacaaagatattatagttattgataggttttgttttttggaaaactttttgtagtttaaaaagtgttaatctattgattattaatgatataattgtttaaagtggaaaacttctaatgaaaaataacttttaaagttattcattactgattattattgcatgcataagcatcatctgatttcgaagtgtcaaatgaagataaatcttttgggcagattgtgaatcttcgatttttttagttatatttgcaacgaattggtttatttaaggtttttagtccttgataatacttcttgttgccattcgattgtattgctttgctgctcatggtattggggcaaaagtatcattattataataatcaaagaaaggatgaacatggcaaatgtatttcctccgtttaaaattgatatagctggggctttttgtgtacctcgtgcattgaaggatgtccgcgagcaatatcagaacgggcaggtgagccggcagatattgcaggctgttgaagatgcggaagtgcgcagtctggtggaacggctggagctgggaggcatgaaggttgtttccgatggtggtttccgaagtcgcgattttttggaaagctgggagggtatttgttccaaagacggccggcctttctccgaaggctctcctttggagattacaggacggctcagtttgctacggcatcctattctggaagaattcgcatttcttgattccattgtggacggaggggtgatgaaaaaacagcatatcccttcgccggcagaggttatgacccagattattcaacgtgtggagcggactcagatagaaaccgtttactccgacatccggcttttgacggatgatattgcttcctgctacaaatttttgcttaccaaactttatgatgcaggctgccgctacgtccagttcgacggggtacattcggtgataatggaagataccatccggctcaacaaccgggttttgcgtgagcgtcctgcagggatgtatgttgcattccatgcacctacggatatgctggtgcaactgcatggggccgatgcttatttcctgaattacgactgtggcgcgtgcgaccgtaaccgtctgctctggttcatacacgagaaggaagcggtgttcggtttcgtgctgtcccattatcctcaggaagacgaattggatgaattgcaggcgaaaaccgaaagtgtattgaactatattcctttgaaacgtttcactttatgtctgccggatgccaatgcgcttctttcgccttcggaggccgatgaggagaaacagtgggaaaccgtaaggttggggatggaaatggctgcgcgtatcttctcttgaaaaacgccgcattccatcattccgaatgccacacttcagcaagggaaatgccacacttcacagaggcaaatgccattgattgggcctcgtgaagtgtggcatttcgattgacgaagtgtggcactcctcttttagtctccggtgtgtccggtttattatttgacagcttcggctatcttttcctgaagctcgtcaccgtgcagtccgcgtgcaaggatagttccttcaccgtcaatcaacacagtgtgggggatgctgcttacggcataaagctgtgcgccttcgcagttccagtatttcaggtcggacatttgcggccacgtgatgttcagcttcttgatggcttctttccatgcgtcagcactctggtccagagatacgcctacaatctcgaagttcttgttcttatatttggcgtaagcttccaccaggttgggcatctcgcgacggcaggggccgcaccagcttgcccagaagtcaacaaggacaactttgcccttgcctacgtagtcggacagttttaccgtttttccttccggcgtctgcatctcgaagtctgtaaacttctggcctacggcagtggctttcatcttttcaacgttgttctttatcttgacgatggcttcgtcgttgtcgtaagctgcagggatttggggcatcagcgggtcgaggtctgccacatccatgtagtagtagttctgcttcagcaggagtacacccaccgggttggtgatgttcttgttgatgccggctttgatggcggatatcatgctgttttccagattttccatctctttgcctttagcctcgcgttgttcgtcggtcagtgtggtgtccgacatggattcgtagatgctcatcatttgtttgttcagaccgttgatttgggctctgatttcctggtaggcatcattgttggcagtaccggtggcagagttgttttcctgcgacaagttgattttaatcttgccgttttccaggaagaagtcgatggctgcgccgtcttttccttcggctttgtaggagatgtagcggttgacagcagtatcttgtgtacccttgaaggtaaatgttccatctttgatgacagcagagtccaattttacgaattggcgtccttccacggtttccagatatacggtgtcgccgtcggctgcaccctctacagttccggttacggtgtaaccgttgtttccactgttacaagctgtaaatacagcggctacagcgagcagataagtaaactttttcattgtttgtttttttaatgaatgattatagctgcaaatatagtaataaaaaatcccctccgatatgaaccggagaggatttttatagttttaatcccatttttagcgataacgctgtgcttactattattcggcagcagcttcttcagcagcaggggcttcttcggcaggagcctcttcggccggtgcttcggcagcggcttttgcagcagcttcagcagctttcttttcagccagtgcttttgctttttcttcgtttatcttcttttcagcttccagacgtgcttttgcttcagctttcttagcttcgtcttccttagccttcagagcagccaaaccgctttgtttgttgttcttccaggcttcgaacttagcatcagcttcagcttcgccgaatgcgcctttcgctacaccgcccagcaagtgcttcttcatgtaaacaccttcgcgagagaggatgttacgaactgtgtcagtaggttgtgcacccttcaacacccagtcaagtgcgcggtcgaacttcaaatctactgtggcaggattggtgttaggattgtaagtaccaatcttctcaataaatttaccatcacgtggtgctcttacgtctgcaataacgatagagtagaaagcgtagcttttacgtccatgtctttgcaatctgatttttgttgccatttaattaaaatgtttttagttaatgatttgaattatgctactatctcgtaatagcgagtgcaaaggtaagaaaagattttgagttttgagttatgagttatgagttatttgttggcacgaggggtgttttttttaaatgttcacacaacgtcacccataactcatcacttgtcactcatccttctcccgagtatttcctggggtatctcagcagaatggcgagtatggcgcatgttcccatgcagaaggggtaatacaggtttccgatgatgctgatgggtgaaatgccggcaagtccggaggctatcagcatttgcgctccgtaggggatgattccttgcacgaggcatgagaaggtgtccagtatgctggctgttttccggcggtccaggtggaagcggagggcgatgtccttggctatggggccggtggtgatgatggcaatggtgttgttggcggtgcagagattggcgatgccgaccagggcggcgatgctgaattcggctccccgcttgccgctgacgtggcgggtcagccgggagatgatgaagtcgatgccgccgttgtagcggatggtctcgagcatgcctccggccagcagggtgatgatgatgagctcgcccatgccggtgatgcccgttcccatggctccgaaccagtcgaagaaggcggtaccggtatagataccgataattccagtagagaggatgcccagcagcagtaccagcatgacattgacgcctgctacggccgtacccagtacgatgaggtaggggattacttttatccactcgatggtctgtacttgtggtggggcagagacggacagtccttgaaagatatagatgcccagtatgataagtgctgccggtaccacaatcataaagttgacgcggaacttgtccctcatcacgcagtcctgcgtcttggtcgatgcaatggtggtgtcggatatgaaggaaagattgtctccgaagaacgagcctcccaccacgatggcaaccatgtagggcaggtcgatgcccgtcttttccgccagccccacggctacaggagtcagtgcgacgatagttcctacgcttgttcctatcgagagggagatgaagcaggctgcaatgaagatgcccgccagcagcaggttgtccggcagtatatgtagggtcagatttacggtcgcatcaatggcgcccatctgcttggcgctttgggcgaatgctcctgcaaggatgaatatccataccatcagcatgatgttcttgttgctggcgcctacggaaaactgatagatgcgctgttccagattcaggccgcgcgtgatggcgatggcatagcaggatgaggcgaggaaggctaccgtgatggggactttatagaagtcgttcaccaggagcgaggtcaccaggtagaggcaaaggaacaccgccaacgggctgagtgcccaccagccgcctttggttttaggggttgtatcggttgttgctgacatagttgtattgtttggttgagattaatgtttcaccacagatttctatctttcaatcaattccatgttaatcggtgttatctgtggtgaaatcaattccgccgcaaaggtaacaaaaacaaagggcggcacaaaatggttttgtcccgccctccatctatcagcccttaattttcaatttacaaagttactccggtcttgaagatggctatttccttgtagcctttcttttcgttgttcacgaattcaccgcttgctactttgatgatatattcgatgaagcgttcgcaggttttctccatcggttcgttctcgacgataactccggcgttgaagtctatccagcccggcttgttctttgccaaagtggagttggtggaaatcttcatggtcggcacataggttccgaagggggttccgcgtcctgtggtgaacagcaccatgtggcatccgcaagaggcaagggcagtggcggctacaaggtcgtttcccggagcagacagcaggttcagtccctttactttcaggcgttcgccatatggaagtaccccttccacgtagcttgtgccgcatttctgtgtgcatcccaaggccttgtcctccaatgtagagatgccacccgccttatttcccggagacgggttttcacctaccggttcaccgtgtgagaggaaatattccttgaagtcattaatcagcttcaccgtgtcctcaaacagctctttggtgcggcagcggttcatcagtatggtttctgcgccgaacatttccggcacttccgtcagtacgctggtgccgccttgtgctacgaggaagtcggagaacatgcccagtagcggattggcggtgataccggagaaaccgtccgaaccgccacacttcaggcctacgcgcagttcgcttaagggaatatcctcgcgctggtcctggatggctttggcataaagttcgcgcagcagttccattccttcttcgtattcatcacccactttctgggtcaccataaactttacgcgctcctggtcatagtctcccaggaactcgcggaatacatccggctgattattctcgcaccccaagcctaccacgagtacggctcccgcattgggatgcagcaccatgtcgcggaggattttctttgtattctcgtggtcgtcgcccaactgggagcagccgtagttatggggataagccatgatggcatccacgccctttccgcccgtttcgcggcgcaggccttcggcaagctggttgatgattccgttcacgcagcccactgtcggaataatccatatctcgttgcgcacacctacgtcgccgttcttacgtttgtaccctctaaaggtcaggtttggcgcgccggtattgaggtttagggttgtagtattgaggtctacgttgacggggttgtaagtgtattccagcaacccggacaagttggtcttgatattgttttcattcatccaatccccctgcttctgcgctttccgggcgtggccgatgggatatccgtatttaatgacgttttcgccttccgcaaaatctttcagtgcaaatttgtgtccggcaggaacatcctcgttcagggtgattccctttccgtccaccgtgagtttttcaccggccgggagtgctgtgatagccactgcaacattgtcggcagggttgattttcaggtactttgtttccatcatgttatttacgatttagctatttacgatgtacgattgaagtttgctttgttttacggttgcgatagttgctttttcttgcgggcatggcattttcaatcgtacatcgtaaatcgtccaatcgtacatcgtaaatcgtccaatcgtacatcgtaaatcgtccaatcgtacatccttattatttattgtaataaaactctatattctccttcgtcagcaagtcaatcggcatgaagttctcccttgtgatttccttcttcagaatcaggtattcgcacaaggccttgatgccgtcgaatccttgcagggtgggctgctgtgctatgaggaagaagatgcttccttgtttcaggcagtctacgttgcgttgcagcaagtcatagcccatcaggttgaagtcttttttctgcttcttcagcaggtattccccgatgatgtatgctttggagttgaaggtgattccgttctttacggtaggatgctcttggaagaactcgtccagcatcagtgtgtcctcgctgtcgcgcttggcatgcaggtccagttcccagatgcggcaggcgggatgatgctcctgcatgtattcgcggaaacctatttcgcggcgttcctgctggttcgaccccacgatgccttcatttatcttgcggaagatgacgatttcctgcgcgtcttctccggcaagcagcatcagcatgcgggcggcaaaatatccgctctggtgcgagttctgcccgtagaaggagagggcgggctcttcctttatgttggagtctatatatatataaggtatattatgttgcgtcagctcatccgtgaagggcttggtgtattgcggaacggtgggggcaaacatcactccgtccggctccagtgccagaatctgtccggaggcttccgcgaatgaatgatagtcatacgggtcatagtaggagaggtgcacggccacgttgaagtcagagtaagtctctacggcgttgtgtatgcccgtctccacgtctgtccagtattcacctttctcgtgcagtggcagcaggcaggcaaatgcgtacttcttgttcgaagccagtgcactggcatacatattgggctggtaatccagttgtttcaggatttcttccacccgcttccggctggactcggacacaccgctacgcccgtgaatcacacggtcgacggttcccacggatacatcggccatcttggcgatatcctttattctgactctttccatctgtatatttacgatttaacgatttacgatgtacgattgatgttgctttggctacgattctacaatgtaatctcaatcgtctaatcgtaaatcgtcccatcgtacatcttcttgtgctcgcacacaattataatcttaatattttcgatacaaatatatgataattttttgtatttcaaaaattgttgtatctttgtgcccgtacacgaagactgtgaagaacgaatattattttgatttactctccatagtttcaggtgtttaggttctgtttatacctcgaaatgataaattgaaaggaaacaaattaatttcatattaaaataaaacatagaaagattatgggaaagaaagtagttacattaggtgaaatcatgctgaggctgtctactccgggaaacacccgttttgtgcagtccgactcttttgatgtggtatatggcggcggagaggccaacgtggctgtcagctgtgccaactacggacatgatgcttattttgtaaccaagttgccgaaacatgaaataggccagtcggctgtcaacgcattgcgcaagtatggcgtaaagacggatttcattgcgcgtggtggtgaccgtgtaggtatctactatcttgagaccggtgcttccatgcgtcccagtaaggtaatctatgaccgtgcacactctgccattgccgaggcagatgcggcagactttgatttcgatgccatcatggaaggtgcagactggttccactggtcaggtatcactcccgccatctccgacaaggccgccgagttgacccgcctggcttgcgaggctgccaaacgtcacggcgttacggtgtcggtagacctcaatttccgtaaaaaactctggaccaaagaaaaagcccagtccatcatgaagcctttgatgcagtatgtggatgtctgcatcggcaatgaagaggatgctgaactctgtctgggcttcaagcccgatgcagacgtggaaggcggcaagacggacgctgaaggctacaagggaatcttcaaggcgatggcgaaggaattcggcttcaaatacgtaatctctacgttgcgcgagtctttctccgctacccacaacggttggaaagcaatgatttacaacggcgaggaattctacgagtcaaagcgttacgacatcaatcctatcatcgaccgcgtaggtggcggcgactctttctcaggtggtatcatccacggcctgctgacaaagcccaaccagggtgccgccctcgaatttgcagtagcggcttctgccttgaagcacactatcaacggtgacttcaaccttgtttccacagaagaagtagaagcgctggcagggggggatgcaagtggacgagtacaacgctaagctcatttacgatttgacgatttacgatgtacgattgaaattacttctacagtgaactcggaggaattgaaaatacgattgaaggtgttctctttgagaataatcaagatggtagattgtatgcctaatcggatttcgtcaatggctatagctaaacaaatagtacgttcagggacttcacctgctgccaattatagggcagcttgtttgggaaagtctgataaggattttctgaataaacagaaaatggtagaggaagaactggatgaaactatacactggttggaaattattgctgaaagtgagatgattcctgctaataaactgcttgggttgcaacaagaggcgcatgaattgtataaaataatagtgagttctattgtcactacaagaaatcggttagcaaaggaagttgaatcgtcaaatcgtaaataaaaagaatagatataaagtaaagtaatattaatcgtaaatcgtaaatcgtcaaatcgtaaataaaaagatgagtaaatttgataaaatcgcagtattgaataagattggttctaccggaatggtgcccgtcttttatcataaggatgcagaagttgcaaagaaagttgtaaaggcttgttacgatggaggtgttcgtgcgttcgagttcacgaaccgtggtgactttgcccacgaggtgtttgcggaagttgtgaagtttgcggcaaaagagtgcccggagatggctatgggtgtaggttccatcgttgaccctgctactgcggcgctgtatttgcagttgggtgcatgtttcgttgtaggcccgttgttcaacccggagattgctaagatttgtaaccgtcgtctggtagcttatactccggggtgcggcagcgtttcagaggtaggtttcgcgcaagaagcaggttgcgacctctgcaagatatttccgggcgacgtgcttggcgccaaactcgtgaaaggtttgctggctccgatgccctggtccaagctgatggtgaccggtggagtggagccgactcaggaaaacctgacctcctggattaaggcgggtgtgttctgcgtaggtatgggttccaaactcttcccgaaggataaggtcgctgctgaagactggacttatgttacggaaaaatgtaaagaagcgttaggttatattgccgaagcaagaaaataaataagaaattcattttgtttaaaggtgtttaaaggggacagccatcgaagcgtttcggcgcttcggtggcttgttttttactggaaagtatactcccgatgaacaacaaactgtttataagtgtaaactatacccttaaactctaaaacaatgttataaaacgcgcgaaaaatgtgctggcgttttgtgcgtgcggataaaacacttacctttgcagtgcagttgggaaactgcatttggatttgataaataataaaaacagttttcaataaaggatattagttgttaggtaaaaggattgaaaatagatttttttcataagctaaatgttttgaataaataggtaaattaggtaaaggtaaaaattggattttgaagttttcagaataggtaattgaagttttatttttcaggtaaagagaaagattgatttttaggtaacattgacgcagtttaaaagaaaagcctttaaggcttttcttacaggggcgaggggttcgtgagagcttgctcgtttttttattcctatattcttcgcattttttgtatattttgtccggactctacttcttttttgtatctttgtgtcggatacccattaaaaacaagcagcaactctaaagcttaaatagctctgaatttggaacatatattgaatatattcgattggcttttatacatatggtttgcaataaacatactgtatctattggtttacagtctggcgtcacgccggcgtgacctgcctctgccccctccagccaaggaacacaagcgttttgccatactgattcctgcctaccgcgaagatgccgtgatacacgagtgcgtccattcatgtctggagcaggattatcccgccgactgttttgatacggttgtcatttcggaccgtatgcagcccgaaaccaacgcttccctcgctgtgcttcctgtccgcctggttgaagtgcattttgagaaaagcaccaagtccaaatctctgaatgccgccatggctgccatcggcaatgactatgacatcgctttggtgctcgatgcggacaatgtcatcccttacgattatctgagtgatattaacgacctcttcgccaatccggaagtcgagattgtgcagacccaccggagtgccaagaaccagaacaatgacatggccctgctcgatgccatcagtgaggaaatcaacaataccattttccgtctggggcatgccaagctgggcttgtcggctgcccttatcggttccggtatggcgttccgttatgacttgtttcgtgatacgatggctgacatcaaggctgtgggcggtttcgaccgtgaattggagctgaccctgctctatcgcggcaagcgtttttattatctgcccgaaacctttgtgttcgatgagaagatacagaacaccggcgatttctcccgtcagcgccgccgctggctgtcggcacaatggcactactgccagactttcgccaagtttctgtggaaggcgcttgttgcgcgtaactgggacttctgcgacaagcttttccagcagctttccattccccgcctgctgttgatgggcttcacgttcctcttctccgtgttgtttacggtttatcgctggacatgggggctgaagtggtggctgctcttggtgttgctcgctgtcgcactgctcgttgccgttcccaaaaggttctgcaccagccgcctggcaatggccctgcaaaagataccctatacattcctgctgatgggaggaaacatcttcaagctgaggggagcaaacaagacctttatacataccaggcatggggtggcggaaaaatagaaagggatacacaataaacaagtctataagcaaacaaatgatatacggaaaaatcactttagaagattggcgtacagtctgtgtagagggagaagagccggaatcttcttttgaaagttataatctgagacttttctttttcggaactttgtataatcgggacaccttgcaggcaactccggatgataccaatgccaagcttgctgctgatgcgtttctatccgatccggcatatggcttttcacgcctggacggttcgttcaccatagtatattattcagaaaatgaatgcggagtggtgcgcgaccatcatggcacgcattatcccgtctattgtcacattgatggtaattttgccacttcctggcaatttttagaggaccaactggaagaaaatttcgagcctaatctggtttcattgagtacattccttcagcgtggcattttgaagaagaataatttcgccctattcgatgttcattctttaggtgccggcgaaaagttctacatgttgacagagcttggttatctgatgccggtttgggcttctgtaaagttagagacacaagcgaaagtacattccatgtttgattcgctgaaggaaagaaatcccagcttatatgaaaaggtggcagatgacatttattgtctgaagcgcgacagcgtttttgagcatgaacccaaggtggcgactgaacggaatccggatgtagaaacctactcccgccgttatggagaattgcatgcgcaagccatccgccggcgtatcggccatagccgcagggtaggtatcctgctgagtggcggctatgattccggttcaaaccttgctgcgctgcgcagcatttacgacggccagattgactcctattccgtgggctttaaaggagatgcctggacggagctgcccatggcccgtctgatgtctgaaacctttggtacccgccaccacgagtacgagattgacggtacggaaaccagtgccttgcccgacattgtccgttttctgggtgagccttttatggaaggcgggctgatggtaaactattgtgccatgcgcatgataggcgatgacaagcccgacgtgattctgggaggtgacggcagtgaccagtatttcggtacttccggtcgcgaagtggcgttgcattatctatccgcccgcataggattgcgtcccttgctacgtggcatcagccgtctgctggagcatgaaacctttgataccggtggaaagctttcccgcatcaatttccatttggataagatacttcatattctggaaggggagcgtttcggcttctccgattctgccttgtgtgcccttctgcaaaatccgaaagaagattttgagccggtaaaatcactacggcccgatatccacagtttcgagcatctttatgcgcagcatgccattctttccgatttggagactgtaatcaaccgtatcattcttttcaaggcttccagcatggcacgcatgttcggtaacaatctgacgtatccttttatggacctggagcttttccatttcctgcaggagctaccggtagggttgaagtgcaggggcaacagtgtactggacattgcgcggggtcgttccgtttctaaatatctgttaaagcaccattataaacctttacttcccaaggccattaccttgaagaagaagcagggcggttttgcacctatgccactgttcttccgtgatagggcccgacgtgctttctttaaggaattcattcttgcttccggcattatggacaactatctgcgtcgtgatgcagtgaagaagtttcttacagattatgaacaagttgcagagaaggagggcggttggttctggcataggcagaacaaggctttgcaatatttcaatctgttgacgcttgttgtgtggtgggaagagtttgtggaaggccatgaggtgaaattctgaaaatatgattgaaagtatgaaagtttccattattgttccggtttataatgttgccaagtacatagaacggtgtctgctgtctgtgttgaaccagacctggccggatttggaagttattcttgtgaatgactgcactccggataactctatggagatagtcagacgggtggtggcttcgcatccgcgcggagcggtggtgagatgtctggaacatgaagagaacagagggctttctgctgcaagaaacaccggtattttagcgtctgttggcgattatctgtacttcttggatagcgatgattatattcctgcgaatgcaatagagcttttggcagaggcagcgaggcagaagcaaacgaattttgtgataggcaattatgaggtgaccggcgccagacgttgggctcctcctttatcattaggtaccgggctttatgaagggaatgctcttgtactttccaattatgtgcaggaaaaatggtatgtcatggcatggaacaaactggtgagtcgtcctttcgttttgcagcatcaactctattttcaggagggcatcgtacacgaagatgatttatggtcattcaagctggcatgtatggctcaaagtatgtatgttgttgatgagaccacttactattattctatgcagccggattccatcatgcgggcgccgtctatgcgtaatttggaatgtcgtgtgctggtgcttggatatatctatgattttatccggtcttcccggtgcttgcaggataaccggcagatatacatattctttgaaaacttgaaggctaaatattttgaccgtattctgtatttcacgaaagataaatctttttattatcaaagttatttggtctttcggagcaaaaagtatgcatctttgtttaaaatggtggggttacggcccgtatggaagctgatgttgcagaacatccattatgcgcttcctacatatgccggctatttgtattttaaggcttttgtgaagtcagcctattatttgctggtgatttctataaaaatgaaggctgtgttgcgtgtaaaatgagcgaatatgagtaatgtcccggaaatatccattatagtacccgtctataaagtagaagaatatttgtcacagtgtattgacagtattctcgtacagacatttacaaactttgaattgttgctggtagacgacggaagtcctgaccgttgtggggaaatgtgcgaagagtatgctcaaaaggatgagagaataagagtcttccatcaagaaaatgcgggggtcagtactgcacgaaataaaggattggctgaggcatatggaaaatatattgtttttgtagattcggatgattatatcttacctgcatatctggaagatctatataatgaattgtctgaacataaaggaagtggggttgtaatagaatcagtcataaaactatatcctaatggagttatgcaaccatctgttttcccgaatttagatttttcttcagaggacagatttcgcgtgttgacagacttagtagataagaatataggttatcctcatagtaagatatatagtagagatattataaaaaagtatagtctttcatttttgtcatcaatatctttgctggaagattttttctttttattggattatattcaatatgctgattttattttgatacgtaatatttccaattatatatatagagtagaatattctgatacggcgttatctgtttgtaataagtcgttgaaagaggaatgtgagatattccagaattattattatagagtgattttgtatcagcaagaatataatctaaaagcagatgatttacaattggtttggaaggaactgaaaatattttttcatcgtattttgctgtctttatatgttagtttaccaaaagaatcttataagttacgaaaaacttttttgaaatcattggtactgacatattccgattggataaaatattgttttcgtcctgactacttgtcagatcggattgctcgatttttgttgttgaatcgttgttatctgttttttgatttatggatgagaggcttgttgaaaatacaatttgtatatatgtttggttcaaaaaggaaataaattatgaaaatagtattgccatgttggggattaggaaatgttatgtttcagtacgcatttttatgtgaactgcgttttagaggaagagaagcttgttgtttcttattacataaaaaattacgttttgaacataatggatatgagcttgataaattgtttaaagtacatccttataaaggacttaatattttccaaaggatatatatacgtttagtagagttcttgggggctatggaattaccttattttaaattaatcagccttttctttaaagaggtaagtgttaaagaaaattttatatattatgatgaggtatttcaacatccacatgaaaattgctattttaaaggaacttggcagagtcctttgtattttgttcatgccaagcaagagatattggatacatttcgatttgacaaaagaatgatttcttcttatacaagagatgttttaaaccaaatagaaaagactcctaacagtgtaagtttgcatgtacgtcgcggtgattatttgaaaccagattttgaaggattgagtaaatgttgtcctaacgattattttgaaagggcaattcaatatatgaaagagcatatggataccccggttttctatgtcttttctgatgatatggattatgtgaaggaaaatataaagttggaagacgctttctatattgatggtaatagggggaatgattcttggcaagatatgtttctaatgagttcatgcaatcataatattatagctaattctacatttagttggtggagtgcttttcttaattcccatgacaataaaattgttattgcaccaaaacgctggtggtattattttgagacggatgatgttgtaccggaagaatggataagaatgtaaataagaaaaatatggaacaaaaaccattaatatcagtaatagtacctatatataaagtagaaaagtacttatcatattgtatagaaagtatattaaaacaaagctttacagattttgaactgttgttaatagacgatggtagtcctgatgattgtggagtaatcagtgataattgggctaaaaaagatcgacggattcgtgtttttcatcagaagaatgcaggtttaagcgctgcgcgtaataagggattagataatgcaataggtcgctatgcggtatttattgattcggatgactatgtcgatattgattacttgataaacctttatcgcttacttcctgattctcagattggtttaggatttacagttcagggatataaaaggtgtcaagaaaatgggaaggcaataaagtcttttaatttcttttctcatgtttatactcaggcggacattccttctttatttattgggagtgagatttacaatatgtttagtgcttgtgcaaaattatttgattgttgttttttgaataaatatcatttgcgttttaatactgctcttcgtttctctgaagatgtgttatttgtattggaatgtatgtcatgttgtgattatatttcggtcgggaataaagctgattataattatataagttatgaaggcactatgtcgaaaatagtgactccgtttgtatctgaatatacaacttttttttcatgtaaaactgttataaatcaatatatagcaaatgtgaaactgacatcagtgcaacaacaaggtatatttaagtgcattcatttactgttttgccgtacattgaaatctgattatcattatttggatactatttctggaaccactcgaagaaaacatttgcgctgcttgattaaaagtaatatggactaccttgtaaaatattatgttcctgattatttaatagataaaattggacgttttttactgatgacccataatgtttttctgtatgatatgttctttattacactgtttaaattgaaagtaaggaaaatgttttgtccacctggtgcattttagtagaagttatttatgtaatatccgtctaataaatgtacgtatacttcgtgtaaataagaagaacagtataacagcgaacaaaaggtaagttatgcatgaaatagttgcatatagaatccaattgttgaaagaaacttcaggtgaaaaatcttgtgctggccataaatatatacaaactattgctggtaatataattaatatcatatattttatatatctcacccagtaatggataactgaaattttaaatcctttactataaaggaagtaaggtttccaaatacctacaattaagataaggcttgtgatatttcccatcaatattcctgggagtccccataaataccccccaataattgctacagtcaaattaattacgacctctgcaataggtgcccatatgtcatgaaataaaccgtatccttgtaaaaattggtcagttgctcctcttgtatatccaacgaatgagttgaaaataatcaagaatagaatatgattaggcataatatattcagctcctaaccatagtgaaataaaagcttctgtcagttgatataggcagaaagaaattgtgccggcaataagaaaacgaaaacttaagagctcccagaaaacgatttgaatgtgtttggtatttccttcagcaataaggttacctactccggcgctggtactactgagcagattattgatgagttgggctatcttatcaataatgagtgtatagttattataataggctacagttttcagtgatacaaatgcatatatgaggaaaggggttgtttgaaattgtacaaaacatgctatcttatgtatgaataactgtttggtgtatttgatgatttcaggatattttttgagtagtgattttccttgtttgacttcgctatggagccatgggtatgttttttttattctccagtttagaataaaagtataagttatgcctaatattaactccatgctaatccaaagatagtaatttcctgtatagtaagttagagtcatttgtattagggtttttagcaatacagcactttgatagtatgcagtcactacataatttctttggtcggcgcctaataaagtttgtttgtaattagcaaaatatccgataagtgaagttgttaaatatgaaaaataggcaaaatagataactgatagttgaaactctgtatttgaaaatattaatggcaaaaaacatgcaagtaggcatccagctcctaatatacttagtccaatccaacggtagatgtatccgaagacagaaattatttcattgattttattttcatcatgttgatataagggtttgtataatacatatcctatagccatgccgatgcccagttctgcgagattcagaaatcctaaaagattaagtagagtaccggttaatcccataaaatcagcaccaagtgtatctaaaaaaatttttctggagaagaaggatagtgcaagatttagaaaatagaatatcatattaacccgagcattaagcaatgatttctttacgcgtgattcatgtggcatatcttttcttgtattattgagcaaaaataagaataaaatggtttgtatgtagaaagatgaacaactttttttatctttgctctgaataagattcaatggataggatattaaaaatagtatattgtaatcctgcacttcatgtttcagggggtggggagcgtgttctcacagtcaaagcaaattattttgctgaaaaattgggctatgagatacatattgtcacaactgatggagggaaatatcctccttttttcactttacatccttctgtcaaagtacatcagttgaatattaactatgatgattatttttctccttgtagacgtgtttgggagttcttccataaacgttacctacataagaaacgtttgaatagatgtctgaataagattaaaccggatattacggtgattatgactcgtagggaagtcggattcattgcaagtatgactgatggaagtgtgaagattgcagaaaatcatgttgataagagccgttatatggattcgatgaatccacatttgtcgaaattcctgccgatgtggttaaaacgtagataccgggaaaatattatcgcttcattaagtaagcttgataagtttattctgttgactcatgaagatgaaaaagcttggacggaactgcataatttggcggttattcctaatccactaactatcattcctgatggggtatcacgatgcgagaataaacgggtgattgcggtgggaaggtatgagcatcaaaaagggttcgatttgctgttgaaagcttggaaggaggtggctaatacgcataaggactggacaatgcatatatatggagaggggatattgagagaaaatttgcagaaacagctgatttctttaggattagaagactcatgctttttagaacatcatactttgcagataggcgaatgttttaaaacaagttcattgtttgttttaagttctcgtttcgaagggtgggggcttgtcattgtagaagctatggcatatggattgccagttgtgtcatttgcttgtccgtgtggaccaaaagaaattatagttgatggagtggatggttttttagtagagcctcaaaatattaaggaactagcctgtaaaatatcttatgtaattgaaaatgatgaaattcgtaaaactatgggataccaagcctctgtaaatgttcatagatacgatattgaaaggattgttccgagatgggtacaattgtttgaagaactcacaatataaaaagagtagatattttgtatggataaagtaacattggggattcccatatataatgctgcaaatcttgtggaacggacattgctgtctgctcttaatcagacgtatccgaatattgaatttatttttgtagatgataaaggtaatagtatggatattgttcgtcggataatagcagagcatcccagaagaaatgctgtacgtattatagatcaaaaacataatcaagggactggtgctgcgcgtaatgccattgttacgtatgctacggggaaatatctttttacaatggactgtgatgatgtgattatacctgattgcattgagatactttatcggaaaatggtggaacacccagttgattttgtagcagcatcatttgtccgtaaagatgtacaagggaatatatatccgggtggatgtcaatatgacgatgttttagttgaagaaggagattatgctgttgctcaatatcgttatgggcaaggaaaaaatatatttgtcgcaacttggaataagctctatcggactgattttttacgtaaaaataaaatatgttgtgtaccccattacttgattgatgacccttggtttacatatcaggttattataagagcacgttcttgtcgtctaatatctgattgtactctattttttacatacaatcctttatctgtaacaagtgtcaaagaacaagatggatatacgacatttcttggagaacagtatttgggaactcagaggttaaaagctgattatatatattcattggcagaacagcctttttatccaggagctctggtggatttattgaaaatgagtctttatcatctttatagagtgtgtgcatcatctaaaatagcagaaagtgaaaaggaatattttctacaaagcttcttggaaattcgttttttatcgcccagacattggaattttatgagcaaaaacacatataaactattgccattactaactttttatgctttgccgatgatggtgaaaaaaggattggtaaaaagtatagtaagagttgatttgcgaagtatattgcatcgttggtttcacttttagacagaagattatggtatcaattataacaatcaattataatggatggaaagatacttgcgagctgatagcatctttaaatcaatttgaggagtatccttacgaaataattgttgtggataatgcatcaaaaggtgatgatgtgaaattgataaaagcaacatgtccagatgcaatagttgttagcagtgataagaatttaggctttgccggaggcaataatttaggatatcagtacgcaaaaggtgactatattttcttcttaaataatgatatggtgataaaaacaccaatattggagaatatggttaatcgcttgaaaaataaatcatttgcaggggtgtcaccttgtattgtattcttatataagccagatataatccaatattatggatattgtgaaatgacgcccataacattaaagcatacaacggagagctttgatccttcccgtcgtggggattttatgtttccgcatgaaactgaggtattacatggaggagccatgatggtacgtcgtgaagtgatagaggaggttgggacgatgaccgaggtctattttctcttttatgaggagtttgattggagtcgccgtatgcgtgaagtcggttataagttattttacgaacctacttcagttgtataccataaagaaagtatgagtattcctaaagaaaccccatttcgtgaatactatttgacccgttcacggctaatttatgcttggcgtaattgtcagggcattgataaatatttggcttgtgggtatcaattatttttagtagtacctaaaagagcttttttatatttaataaagaaaagattagatttggcaaaagctggttgtacaggaattctttctggtttatttttgtgcttgaaaaaaaaatagagttcatttttattcaatcttccctcgactatactctttttctccaacgagaggttcatccccatgcggtactacctattgcaaacggtagggcatatagtagggaatcaagtatttgatgaatccttcggccacttctttgttggggaatcccagccgatagatgttgaattcttcatcatattcctttatcgtgaggtagccactttggtaaataacggcaatgggattatccttgaacgactccacgtatgtcagtgtctctgcagtcaccccttcgctcgtcaggtcgggcaggcagaagttgtcttccttcagcagtttcacaaggtaggtggggtctcaaaccagtagctgccgaactccagggagcggaacgtattcagcaggctgaagggattatacaggttggttccgttctggcggaaacggtagccgtcgtaccgttctttcaatcgccggcaggcttcgtcgtaggtgatgtcgtaattttcggctatccggtgtagcgattcctcaaaataggtatgtatctccttgtccgtcatgccgcagagggtctggaactgtcggtccatagagaggtttatcaggttgttcaggtcgctgaacacgctgacttttccgaattttgtcactcccgtcagaaatccgaagcggatatatcggtcctgcgtcttcattacggagtagaaggctttgagcgtgttgcggtattcgttttgcagttcttcgtcaccaatggcctggagcatgggtttgtcgtattcttctacgaggatgaccacgcgctggccggtctgctcgtaggcgcggcggatgattcccttgaagcgcagttcggggttgacttcgctggagacggttccgtagatgttttcccattggcagagggtatcgttcaatacattgataaggctgttcttttcatcgtatttgcttgtgttcaaatccaaatgcagtaccggatatttcgtccattctttttcaagccgttccatttccagtcccttgaacagttcctgctgcccgttgaagtaggcttgcagtgtgctgatgagcagactctttccgaatctccgtgggcggctcaagaagtagtagttacttgtattgaccaattggtgaatcaatgcagttttgtctacataggtgtactcaccaagacggattttctcaaaactctgtatcccaatagggtacttcatacggctgaattttgtttgatgggcattttgcttaattaaaacaaatgtatgaataaaaaatgaggtggtaaagcttttgtccttatagggcgatttttctcataatcttcaattccagtcctgttctgtttttgaaatcctgtatatggcagttataatttgcactgaaaaatggccgttgcctattacatatataggcctttacggaacaaaaattcttgaatgaagaggttctacttatatgttctacggttgcagccagttgttcacagcctgtctttacccaacctctatattgtctgtccttcaattctacaaaaatcagctcatcgtcataatggagcaacccgtcacacacctgttgggtttcttcctctttcccggttttcaagaccaagcaatggtctattccatagaaacctattggttttgaatcaggattatcgacaattcctatccatttggatttatctgcctcgtcaatataagcgggattcctcgccggtggagtatcatcacatagcccgaatagctctttattggaaacacttcttccgttattttccatatttatcttcaagttgcaatagttccgtaaacaaatagccgctttctgccagaagttcattcagatagttctcatcagaaggaagtccacagtaatctgccaatttggatacagttccccgattatttatctcgtatattaccaggtcatccggagataaaagagattttatcgggacgattctgtccaattccttcaaatcgctttctgttccggcaactcccatcgttgtgtcaacttgtttagccttgacagccaatgacaaatcatttatgatgtacgggctgtgggtggttataaccagcttgttttctgctgaataattattgaactccagtaagctatacaacatattccgctgtgaaaccggaaacagattttgttccggctcttcaacgatattgataaaagccgttttattgaactgtgaagatactgccgacagagcaatccttctctgctcgtcggtcagagtcgtatcagcccaaatggatttgacggcatcattaaagcgttgggattcattatggctcattttttgcggattctcaacctgtcttcttacagcattggccagatagtaggaaaccagatagagaggaaccagtgactggaatccactcgatgcttccgacagttccacctgataatcgtttccggtcacatttatcacgtcatgctgcttgtcatattttatttctgcatcattaatcggcagagacaggccatccttgatttcatccttagcattattgaactctgtaatatattccagcagcgaatccggcaaagacttgaacgacttggcttcttttatgatactgataaaatttctctcggcaggcacgtacattatctgtggcaggaaatacttccgagactgcttttcggatatctgaaagtcacctttctgatatttcattgaataagcctcaccttcatattctatttcggcagcatcgctgtgggcattgttaaaaaagtaatttgctatacggtggtatccgcaataggtctttctgaactttactgcggaaaagtcacttattgcataatcgcctctgaccaatgccttctctatccaagtgaaagtggaaatcaatttggcgacacaacttttaccgcttccttgattcccgatgaatacagaaactttctttatgtctatccaaccgtcatcatccggacagccttgcctgatggggccgaaattctttattcttatttttgccatatattaggtatgaaacacatttgatagcaaagatactatattttattaaaagagagggtgtataccctctcttttcttggttaccacttctctttttttacttcaaaacacgggcattgtttcgtccattccatcggttccacctctccgttgttgttcaggtcggggctgaggtcgcgatgtcccgccacttttgcttctggatagtccatcagtaaagcgcggaccagtacgcggagtgaatgccgttgccattcggtgcgcgtgtctttgggatttccatagtggtccaatccgccttcgtaggcgattccgatagagtgggcattgtagccgcgggcgtgggcgccggccctctcgaccgggcgtgtggtcaggatttgtccgtcacggcggatgtagaaatgatagcccgtgccgtcaaatccacgtcggcggtgcgcggcttccagagcctgcccggtaaagggacggtcctcgcacgtggcgctgcaatgtatcacaatcaagtcgatttttctcatttttttctactgtttgcctttgggggctgttcgctaaagggaaccaccactgttcatggcgtgtgcgctgaatgcgcccaaaagtgccgaagctacagcaatgattactttcagaattttgtcccaggctgatgattttgtactcatgatgtttaatgtttaatccttaattcctaattcttactccctcttttttatcccaacggattctccccctggtctccgtccgaacctccactaccgggggtgttgttgccggaaccgcctccggagctgttcttgtcttcggatacaagctcaaagacgaggttgttggctccgcctttggtggtggcgttgctgtcgttcaccagccggagggtgttggccaccttgaagcggatgttgacgcgctcgatgttctttacggtacagtctttggccacttcggtggcacggcatttgaaggtggtgtggaagatgccgaaaccgtccagacggacactgttgccgtccgtaagcgtctggcgcatctgccgtacgatggccttgcctacgtgctccacgtcttcggccgacatggcgcccagtgcttcaatgtcttgtgctatacgggcaaggtcgaagattttggcatcttggggcttgcgtttcagggtgtggaccataggggagttgctgtccccgattttcttgtggcgctgtgtgcgcactaccaatgctgttgacatgttgattaattttaaatttagaattgttcatttccgaagtggacagcggtgtctccgcggcgatggcctctgctccgtttcgttgatacaaagataggacatggggcagggaaggatggaggttgggggaggaaggaggaggaggggggaggataagggaggttattggggattaaggattaggggttagggatgtgcggtcatcgcttacgttatgttatgattttaggcacggatttcgcggattacgcggaaaagataaagaaaaatccgtgttattccgcgtaattccgcgccctgaaagagagcatgacaaggttttttcgggcagtccggagagtccggcttgattttacataggccgtaattccactgtcccatggctgctgcaattcgatacagggtggaaaccgtaggaactgtaagtcctctttctattcttgaaatataacctttgtcggctcctatacgtttggcaagttccgcttgtgtaagccttgcatttttacgggcatccaataggatttgggcattgtactcttcccatgctttttcgcggtttttttcacgttcgggagtcccttctttaattttaaagcctttttaatttcactgtcaggtgttttctgtgtcttctttttgaatgcgttaaaaagtacaacaatattaaggattaaggattagggatgagcttgtgttcattaatcattaatcactaacccttaatccctaatccttcccctttccttttaagaaggctccccgaaaacatcaatcatcagctgtacttgtgcgggcgtgtaccgtcggcaataggggttcatgcccgtggcaagcaagcgttgttccagaccgggggcggtgcgtatccattcgttcagctggttgacggcagtctgctgggcaatgcccggaaggtagtacatggccagttcgcctttcccgtagctgcggacggggaaacggggctctgcaaaagaatcattctgtttcatcattattcttaaagttcaggttatatgttttttaagtttcgcatgtctttgacctgctttcagtgaacaagttgacaaggctataagggggagactgcatcttcttcctgccttgtaaagatacggatttttactcgaataacctaccttgttcctcactatttttcaaccaattttcgttgtcgaactgcgtgttcaccggtcccggtctgtccccttcgggggtggggatataggcttcctcgcagggccagtagcggccgttcaggtggttgtagacgaacttggcatcggtgtgtgcgctgcccagatgcttgaagcggactttctcgatgtagacggtgaccatctgcttggtgtcgttgcggtctaccacgagacagaagtcggacatgttggcgaagttggcagagccgttgatgtcgttcatctcgacacggcgcagggtgccgtccttttcgttgcggttcaccttgcggggatgggccacgaggatgacgaggcactggttgaggatggcgaaacgtcccagcttgttcagggtgtcggtgatgtaggccatttccgtctgccccggttccagatgttgctccaggcggttcatggggtcgatgatgaggatgcgcacccctttgcggcgcaccacctggcgggctttctccaggatgtggtcgatgccgtagctcccgtcgtcgggcaagatgtgcgacacgttgcggtccagccagcccaccgcctgctcgtagacggcttccgtcatgcccggtccgggggtgaagcggtggccggtcagcttctccgccagcttgtgcaggtggtaggcgatgggcatgttttcggggctgaagaaggcgattttccactcgtgccgcaggcagaggcgcagcaccagttcgtcggtgaattcggacttgccgtcgccggggcgtccggtgatgaccagcaggcggcgaggttcgagggtgcagtgctcgtcgaagttgtcccaaccggtgtcggcaccgcgttgcaggccgttctcgtagagggagcgcaggtcgtcgcggcagtcttcggcggtgaagatgccttcgagggggacttcttcggcctgctcgatgcagatgcggaggctttcgacaccgaatttcaccaggtgttcgttggcatccttgcagccctcgccgaagtgcacgatgcggcagcgttccactccgaggcgacgcgtgagttcctgccggagcgactgcccggcagggtcctcgtctacggcgatgtagatggcctgcttgtcttcgaagtgcgactcgacgaagcggtccagccacgtgaggttgctctgggcgccggcgggcacggagacgacgtccttgcgtccggcagcgatgacggctgccgcgtcgaactcgccttcggtgatgatacactccggggtgtccaggatgctgtctacgttgtaggggatgagctcggctcccttcaccatcatgaagtgcttccgggcgctgcggtacttggtgttgacgagtgtcccgttctcgaagtagttgaagcagatgcagttctcttcttggccggtttcgggcaggcgcaccgtttcttcggtgatgcgcagggcgcgcagcagttcctgaggcaggcagcgtacggtggtccagtagcgttccagattctcggaaagttgcatccgggcagggtcgaaggcggggcggcggaagtgctggggcggtgcggcgggttttgaacctgtttgttttcttgttttgtctttttgttcttttgtctgaaaaatgattatacatgaatggtttcaccccttccaatgccacacttcgcggggggaaatgccacacttcacggggggaaatgccacacttgggacatgctgaggtgtggcattcggggtgctgaggtgtggcattcggaacgttgaagtgtggcattccggatgccggagtgtggcgtttcagccgggtttctgcttcggctttttcgatgaaggcggtggggtttgcgaagtccacgaacgggccgtttcgttccagaaggcggtattgtccggtcggggtggcgctccgtcggggatggggcagcccaggtaggtgcgccgtccgtccacaagctgctcgtagcggtaggggtcgggaggtgcggcggcggactgctgcttttcgaggccctgcaacagcatatgcagctcctgcgaggtgcgctggccggcttgggtgtagaacgtgaagtagcttcgcacttcttcctggctgttcatcctctcctcttttccgaggagtacgatgtgtttcttgaattcttccagtgccgtatcaaaatgcttgttcagcaggacactgtagccgcttctcatgcagaccatttcacggaacagttgatttttcgacaagccatccacttgcttcctccagctctggtagggagtgatgccgccgttgccgccgttctttgggacgacatcgtcgtcttttcttttcgtctgttcttctctattctgttcttctcttacgcgcgcggattcggttttcttgctatcttttctgtttttcagttggttatgtgcgttttttgcttcctcgtttttctccggagttttcaaatcattttgcaaatgatttcctttttccgtatggttgaagtcgatggcggattcgaattcttcttcgtggatggtgaaaagttggtattcccagatgattttctccatgtattttctggagaatccttttcttgaaataatattcagctgattgaaactgagtttcctgtcgggctgtgcacagagcatctcgatgatgcgtagatacatgccatagcccctgcatccttcattatcgatgagtgcggccagtcttttgtcattaggcaaatcgttggggtgtttgaaccaaatcattttcttcgtgtattagttttctatttcctgatagttatcttatattctgaaaggatagaagggcttcatagtgacgtgtaaggagagactgctcggcggtcgtatcttttaaaatatgcggcaaagttacgtataacagaacaagcctgcaaatggacttttgtagggtttagcggcgtctcaccgaccccagaagctgtcctgcgtgtgttacagcctcttttcgggtgcttaggcatacaatggagaaatatgtgttttttttacagaaggtagccggtggagctctctctttaggcatccttctacttgttacgtccgtaaacatttgactcacagtagttattactctccggactttgttttgtgcatgcgtgtcatctgccgtatgtgggccagactgcgcagttcgctttgggagaaagacgattttcctttcagcaaatagtcaatggcctctgcaatgatttccaactgatccaataatggatttctactgtgtgcagtatccttttcgatgtttactgcgtccttgtctccgctacggagggtaaaggttactttttttactcataatacttttttaagaaaaacgcgacaaagatacgaatttcgcccgatagatttcgtatatttgcaatatggcaaatgtagaaaaaacttatctgttgaatttgttttgtttttcccaatttgacaaagcttcaactaaatcctcggaaacatgttttaaactttgtgtatgcatcacgtcatagcagtctaaaacaaggcgtttgaataagtctacccgttttagccgttggtacatctccatgggtgagatattcatctttcgagaactggcctcaagagccataactgcgaaatgaattttgttgctttcggaaatttcatctttcataatctatttccatttaaaatccagactttactattctatttttgcatctttcttattgaacgtatggcaaatatacaaaagtttgaaacatgaataaatgtaattccattaaactttcaatttactatttggtgcaaagttatgaataattatttttttgtcacatatccggtaatggcattgtaaattgtctgtacactatgtccccaactgtgtgtatgcgcaaaggcaatgcgggcattcgccagttttgggttgcctgcttcgtttgctgctgctttcagtgctattatccattcttctgttgaaacagctaaatgagtgtgtccggcaaagatgctacgcatggtatgtgtgctggtagctactataggttttcccatggcaaggtattcatctattttcagtgggtaattaccatctgttatagaattgagtatctgtggattgatgcagatgtcaaagtgctgtatatatttcggcagttcttccacttccttatgtcctgtgaagaatacattctttaaattgtgtagcaggtgcttttggaaatgctcgtcttcaggtccgacgaaaacaaaactgtaatcgggcaactgccttgcgatattgtatagcagttcactgtccaggcggctttcgatgatagctcccgtatagccgactattggcgaggggatgttttgcatatccgtcggtttatcccaatgccgggtagcatcgtatagttcaagattgacaccggtattcaatacatatgtgtgccggttcagaggtcggagctgttctgcaaagtaactggaatttgccagtacgatatctgactgacgtacaagcatttcttcgcaacgtggtccgtgcttgcgccaatagggaaagccgataacatagtcgcgccgataataaatgctgattgccgggcagatatattctttgagatgcaggcttcggaaaaggtcggtatcaatcaaatgcgtatagtctttgaaaccaagaacatcggcttgttgtactatccagttgccaatctttttgcaattccggcgattgagacagttgaatagccatgtaggaagttgtcctacggagtgtatgatgaaggggcagtccaatacccatagattttcattgatttgccgcaatggagccgatttgctttggatgacttccagctgtcgatggcctgtaggagatagaggcccttttcctgctgcaatgcgtaaccttgtggcaatatccatgggaggattgagatagagtacacggtgcttctttgctatctcggatgcggtgttcttgatggtgcttcctatctcgatgtcccaggattggaggctggtgatgatgaagtctgccatagttttagaggtgtgggtttatggtgtatggatttcattgtaaatcttcacatattcttcagctgtgcttttccaagagaattgttttacacgttctagtccgtaaacagattgttgccgatagaaatcattgttcttttctaattgtaggatggcgtctgcaatttctgacggcatttgcggattgacaaggatggcgtcagctccggccacttccggcattgcagaggtattgctggttattacgggagtgccgcaagccattgcttccagcattggaatgccgaaactttcccttaaagaagggtaaaggaaagcaaaagctgcactatagagggttaccaaatcacggttgtcaatatatcccggatagaataaatgtgcttttatatctgttataccttcttgctggaggagtgcgtcaatatgttcctcttttaagtccgcaatgagtaacgggcgttttattgcagatgctttcaggtaaagtgaataggccttcagcgtgcgtgccgcgttttttttggggtctgtgttccctaaaaagaacagaaaaccttcctgtgggatatacttttgaatgatattctcgtcaagtgtttcattcttacggaaatgtgtactatatccattatagacagcggttatctgtctattaggcaggtgcagtgcttcgcggatgcgtgtacattcaaaatgtgaaacagtgatgattttcttgcatttctttaagatacgcggaacaaccaatcgtcggtaatgccatcccatttcttgatatagcgaggggcttcggtgttggcgtggttccaagtaaataatatcatgcaacgtaagtaccagcggtatggggcaccacaatggagccgtatttgaggtacaatgcaatatatctacttttaagtggcgtacagctcgtggtaatgcaatctgttcccataggggataggtggggcaacgcagttcgatgatgtggagattgtctgattctttgaggcagcaatcttcaccgggagcaacaagtacatagtactcattgccatctttccgtttctgaagttcccttaagacttcaagaacaacaaaatccattccgtgtttgtcgcggcggaagatacgttgggcctcgattgctattttcatttattcttttttgtacttctgaaaatacgtccgaaatggctgaaaatggaagcgaaaatcagtataggcaatgcccatacagcgtgtttgaaacgcttgtttatttcaccttccggtaaagccattaagaatgtaattatgatgagtaaaagtagtatgtaccatttgaaggataaggtccaatcaagtatggtgaagattactgccgcaatggtgatgcaggcaatgagtaaaaaacgtgatggtaacaaccactggaatagtttgttgcaataatcccactttccttgaagaaacgccaatggcagacgtctcagtgccaagaaagtactattatattgtgcagagagccagcgttgacgttctcggctatatccttgggcgctgtcctgctttttactatagcagatgatttcctgcatatattcagtgtatatattctcttccagcagctttatttctacagctttggcaaggtcagagccctccagtgtcgggctgatgcggtgaaacatttcgaaatcaaaagccattccggaaccaagtaatgcagacgaaaaacctagtttagtatgtcctttacggaaaatattgttgttgatttcttcgccggcggctgctaagacagctgtactggttgttaagttttccgtcatgcggtgtgcttgtatggagtcacaaccggaatagtaggcattgttcaataagtgcaacgcattgggaactacacgattgtccgagttgaaaatcactatcatatcatactcgttaggggaataccgttccataacttgctgaatagcatatactttagtacaatgctctctgtcaggaacaacaatgctgactggcatttgtagcagagctgttaaatcttcttctgaaagttgggtagcagctactgctatatcatatttctctcgtgggtatacttgtgtatcaaggaaataattgatggattctattacttcctttccgttacggagtacgctgaagagcaccaagaatttatgttgtttcttggcttcagggtaaggattcttgtatttcatcaatgacgcaattgcgtaaatgaagagataggctactgggattaaaaagagcagatataaaatagcatctgtcatttgtaacgcattgttgttctcgtctgcccaccagtcgggattgaatatggaaaagaattcgttcattttttattttattttatttcttaataaaattaatgttttgtattcaatatttcacttttagattctcttaacaatctgtctatataaggaccgttcataataaaggccaatgaagcagcaaccataaagaatgaaggagtcatacccattccacgtcctacatacccattgagccatattccgaatacaccacatataaaagctgctaatatatttcgaagccctgagttacggacgcgaaacattataatataacaagaatatattataatggctatacacatgctgatataaataagaagtcctatagtaccggtttgtatccaaatatccacataaaacgcatcaggtggaatcgtatcttccacaactccgtcactgtttacattaacccgggctaccccttttcccagtccagctccccaaggatgtgttcgcatatattcggcaataagcttttgattctctatacggacattgaatgaagtgtcctcttgaggtctaaaagcagttctcatacgccgtattagcacattaccatcaccaatttcagtaaatgcgaagaatgcatatagcatgataacagccaaagctgaaattaccattatttttatgttcttgcagattaggcagtaaagtgccagtcctcctagaggaacaatcattgcacctcgggtaccggacataatcattcctgctattcccataagtgcaatacaagaaaagaatatacgtagccatttttcggaagtatgaaatgcaatgattccataaacaatcgaaatcattcccatgttagagccgaaattaccagcgtcgctataaatggaaaaatagcggattccggaggataaaatatgggtataccaactacctcccatcagccattctgtttcagcagcatcaaaccatcggtacttttgatataataatttcagaaaagctgttatagtaaatatcccgataataatcagactgcgttttagagttttaggattgtctagtaaaatgcaggagacaaaataaagtataggagttgataatagccagcctcgaatgcctgcgatataactagtgctatcacttgccggattaatgaattggattaaaatatacagaaaccatgctatataagtaacagtgaaaaaattaatagcattagaaagacgaatgtcatttttgttttttacataataaaataaaatggagatagtcatgtatatgagcaatccgtcagatatgacgcttagtccatcttgtcggctataacgcatgatggctgtcaggtagaaagtataggcaccatataacaaatagctcattctaggcctttgtatactataagtaagaatgataactcccaatggcagacctactataatggcaaatagtaaaatcttttgaaaaataagtgcatataccatgaacattagtccaaaagctaataacaagaaagttattactttgggagatatgttccgtatctgttgagtcgtatgtgccattatgaactttattactttttataaatagctatttcacagcagcctttttggacgtaaggcctaattgtgctaattgactgaatagtgaatgtacgggagtttgaggaggcagttctccggtaaatgactctacgacctcccgttcagcattattcaggtataggaatatggggacatttcccattccttccatgatatgcgctagagtaacgctgtcactgttacgccacaaacgacatgcattggcaatcaataaattaacatctgctttttgaagtacgggaagaggaatactggcagtatttacagcggggtattctactaatataatattaggtgtttcttctgcttcattgagggcccagaaatctgaaagttgctgtgcattgacatattgctgggtgtccggttcaaaatcaatatgatgtgttacgatacgtacccgtaaaccttcagtttcccaatattcagcaaaatatttggataggaaacttttgccttctcttgcttccatactgagtaaattgataacagtgggggcgtctttttgtaaataattatttaattgacgacaactgtaagcagctgctaaacgattacacgctttcaaaaagccacggaattttaagttactagtgccattgaatgctgcaattacaggcaacttggtcaagcgtctactacgagttgcatcgcgtagtgtacggtctagcaattcaatcaataggaaatatgtgattatgaatactatacttccaacaaaagcaattaagatataaagaatacgtttacgtccattgtctgtgagggggtaggacgggtctgctatgttttgcagattgctggtattcatttcaatgtctttgagacgtagattggcatttgccaaacctcccaactgagtacgatagttatcttctgcgatgccaattgcacgctgttttctggtgatttgtgtacctactggtgacatttgactgtattgatcaaaaatatcttgttggcgttcttttaaaacatccaattctgctttagccttggcttcacttactaatgcggtcaaccattcagaaaccatgtctttgagtccaacaccctcttttgaaaaattaagttcattcagattatcgctgatatgggtaatcttgtcttctgctttacgtaaatcttccttattctttttaagttctttattagtgtctctagctttatctgatatgaaaatttcttgttccataatattttggtttaagctactgactttttctaactctttgagtaaattggtgttattacgaatgatagttgcacggatgtccatcttttcatccaacatttttcttaaggctgaagctgcagcataattgcggcgagcctcttccaaacggtcgtcaacagcatagcgggtatgtgataaagcttcactttcttgtccgtaattaatgacccgttcttggacacaatattgcatcaaatcatcttcttgcttgtttaattctatttttgctaaacggacttgttcttcaaaataagcgataacatcatttgtcgctttaaaacggagaatttcatatgcttttttcagttcatctataagaatgattatggtttgctgagtgatacccgggtcagcagatgtataaataagctgaagaacatcactggcacctttacgttttacaattacggtttctaaagctgaagcactataaaatggtatagggcgattgaacatggagtatacgaaattatcaccgtattcctttcgataattagcaagtgcgtctgccgtcttattgacatctttcctatcaactaaaaccaatacttctttgggagtcatgctcagtaattggcgatagtgcttagcctggatataatgattgtctttccactcttcaccatatgtcagtgcattcgctaataaacggatagaaaccttttccaatgtaccacgggattgcgcaaggttgatgaggttatcgaaggtacttgtaacagctgagtaatttacgctgctcccagtaatggaagtcgctgttgtaactccggcaaataaactaccttctactgtgtaactgtaaggcagaaactgggtgaaatagattactaggccagttacaaataaagttccccataaaagccaatagcgaatacggtatagaaattgtgatataaataaagaggtatctttcatcacgatttatttttctttgataatttttatattagtgagcatttccaataaaataactgaattatgcagggtaacacgtgcttgctcatagcttgtaacggctccggttcttcgtgcacgttctatggacaatgtactaatttcaatttttccttgtatgaaatcattttctaatattttagtttgggcattatataaggcagcagtttctgcttttgccttaattgttgacatttgttctgtaaccgcattatatgcttctaatacccttaatctcctttcttccattacttcttcttgagtatattgcagctgttcaatatcgtatttatattttttgagtttaagctggcggtttattaaatctccaaaactaatacctacacttgcgcctacactaaaactatgttgtgcattcgacattgtagtttgatacattggggtatactcgtcactagcgttgcttagcacattgtattttccgtatgaataattaccgtttagtttaaaataattccaccaatcacgtttttgtaaacgatattcatttttcacttgttcaacttctgattgtgcccgtttcacagtcgcattttctgttactgcgtccagaaaaacagaaagtgggggtagctcaaaggtttgaagttctaatggcatatcggcagatagttttcctattgtattttcttcccataacttgtcttccatttttaatttttcaagtgctttgattcgctcttcacgtgtcatttcttgtgctgatgcagacaatgggacgatgagcaatcctaaaaggatagcattacaaactatgaaagtgatatgttttattgccattttctaatatccttaattattattttatacattctctttctgcacaaacgccgtcagcgtcttgcacaatatcttcatgtccagccagaatgaaaattctttggtatatttaatgtccagttgcttgcgctcctcggcagacatttttccggcgccgcctcgtttctccacttgccacagccctgtcagtccggcgggggccatgaagcgctcgatatatgcgtcgctggtcagcagttctgcttcgtagaggggcagggggcggttgcctacaatactcatatcgcccttgaggacgttgaacagttgcggcagctcgtcaatactgtatttccggatgaaacggcctacgcgggtgacgcggggatcgttttctatttttataaatgtattttgcttctcttgagctttcttttttagaaaatcttcttcggtgatgacaaaatcatccgaaatgagcaatgaagcctcttcttcagaagtgcctgtcaggtcgtcgaaacgaatgtccggttgttcgtccgtcaacgtttcttctatcctatactgattgagggcattcaactctttcaggcgcttgtctgcattggtgtacatggaacggaacttcagaaaattgaatatctgatagttgcttcccacgcgctgggatttgtaaatcactttacctttactctccatgcggatagctattgctgtggcaatgagtagcggagaaagcacaatgagtactgcacacgcaaacagtatatcgaagatacgtttccacataggcaggtggaaggtattgaatatcttgcggtgcgactggctgaactcttgtagcttatgttctttgcgcagttggagaaattttgtcatctgccggatgctctcttcatcagcttggggggggagggtattgttgacccctgcctgcaaataaaccttgcggctttctgtctgcagccccggagtgatgaggatgatatagacgcgcgggaaacgtttgtgcaggaagctaatgtcttggctgtcttttagaggttcgttctgctcgtaaagaatggaagtgttatatcgctcgcgtatgctgtcgatgacctttgctgccttgttgctggaggaaacagccatgaacatgcctcctgtcactttgctcaagtgattgatggtggaccggtcattacctatgtaaatataatataacatatccatttgttgtgtgtgttagaggtatttcttgatacgggctttcagttccatagggttgaagggtttcagaatgaagtcttcagctccggcttcaagcaggttgatgcgttcggtggtactctcttcgctggaaagcataacgaccgggatgtgtctgaaaagtgcgtttcccttcaggtagtgcaggaattcactgccgttcattctgggcatgcggatgtctgaaatgatgagagcaggttcattcccttcattcaaccattctatcgcccggaggggatcttcaaaatataccagttcgttttctttacctaaatacaccgagagtaccttgcctatggcaggtttgtcatctacaaataatattttcttcattgtttatgctaattgtttgctgtttttcatattatctatatacatttgctttcaccggatttgtgtaccaatcctgatggctgctgcgattctttgcccaataaatgaaatccggataggcgctggccgtagggttgtctgtacgtgaaatgttgatagtctctatcggataacggaatccgtaaggtacgcagatagcccatgtgttgttacctgccaaatcaagattttcctgttgtacggttccggcagcggtggctccatatccccagaactcgtagaggtggacttccatgcgctgctgcatacttttatattggtaacagatgaagaaatcgaggttgtctttggaaaacaggggttcggtcttcgtctggtctgccagttcaatgattatttcataggtatacatattggctgtgatactggttcctccggtattaatcatagttccggggcttctaccgaatacgttgtgtacttcacccgcaatagggataacgacactgggatccccatcttccatgtgtgtgccactgttgtagttaaacagactgtacgggtcgtcgaacgatgtctggaatcgtctgtcggctcctccggtggtaatttctttaatgtcggatttgctgatacctactatacgaaggcctacaccaagagctttggacgctccggcagcagcaagggtcacatcgagctggatgcgcttgatgtggtttgtctttccctcagtatgaagaattgtttctacgtctaaaaccacgtcgttgaagtcatagtcgcctaccaacggaaaattatcctcgaacacgtatgtataagggatagggtcggtaggtgtttctgagccggagtcgctgggagtgttgccttcaccggtacagtctccggcaggaatggtgatgggggattctccccatttggatatggttccttcggtgttcttgatggcatcaaggaatttggcttcccaccagatgtcctcggtgatatcatcgtcaatttctttcacttcataatgaatgtttccctggctggagaaattccctatatcttcaattttattgatttttaccagtgcatattcattgtttggacccataaattgtgcttgtgacaattctgcttcatcaagtacggttatcatggagttgtcacccatcgtgatttgggtattgtaattgttgctatggtccccgaaatcctctatctctgcagaagaggtgtctcccatgttcagtgtgcctacaaattcttccgcatatagatagcatccgttgtctatagtgatgttgctgtcggttttcccgatataggctttgccctggttgatgaatttgcatccgctgtcgaaattcatttcatcgacacgtacggtaccgcaattatagaatgctcctccctggctgacatggaaatcatctatttccatagtgccggcattgtagttgtagctgcctccggatgcattggtcaattcgatgtcgttccctttgatggttccacccgcgtagacgataaaccggctggattgtactaaagtgaaggtgtgctcgtccggtatcacgatttcccctccgtcaatcacatagaattcgaagcctcgttcaacggtcatgttgtttccattgggttcccagctgccttcaatgatgatgatggccggattgtcacttcccatgccgtccttgctgattttattcctatatatattgtctttggagattttgtaggcttttccgttttgaaaatcggtattcggccttatttcttcggcacttgatagcattgcggtgatttctgcctcagacttttccggtgaataggtctcgatgctgacactgcgtgtccatgcggcacgtgtagttgtgggggaactgccgaaagcggcatggagctgaccgttttggatggatacgtattttactatgttgcggctgtgtgcatcggtgcggcacacaaaagcgctcgtcagcacagaagggcagtccatgacggtagtaaatactgttgtattattggcggtgccttctgccagcagtttggcagatgaccggctgattaaggggttcttgtcgtaaatacgtatggtgtagtcgatgccggtatcttcggatacagaaacattgacccggacctgctgagtcattttccaatccatagccgggtctatgttcttgaccggaaacctatcctgataggctgctttcactttttcggggttaaaaacatcgtctttacaaccctgcagcagtatgcctactgtaagaataacaagcggcagaaagcgtttgtatagggtattttctcccatattttacatttgttttgcttgattgtaagcaaaagtacgtttatttaaactaataagctttattaatgggggataaaagcgtgttggttaacgctttttaacgattttgtatggatagataatgcaagtttgtcttgaaaattatcaatattactaaatgccctctgtattgccgctttactaaatcttggtgatttctcctgccaggtcggaattcatgcggtggcggatttcggcttggtccagtccatgccccaggaggaacatgagtttggtgacggcacattcgggggtactgtcatagccgctgatgacacctgcctggagaagttgcagaccggtttcgtaacgtcccatctcgacggcgccactttggcattgggtgatgttgacgatgacaatgccacgttcgctggcttctttcagctggcggatgaaccattctttctggggggcattgccggaaccgaaagtcttgaggacaacggctttcaggccgggaacatgaagcacggagttgataatgctttcctggatgccgggaaagagggtgagcactacgacattggtgtcgaaaaggtagtgcggcttcatggggcgcgacgggtcggggcgtcggatgaggtgctcgttatagcggatatggatgcctgcctttgccagtgggggatagttgaaggagcggaaagcgttgaaattctcggcattgattttggtggtacggttgccccgcatcagctcgttctcgaagaagatgcacacttcagggacgataggagtaccgtccggatgcttggcggcggctatttcaatggcggtgatgaggttctctttcccgtcggtgcgcagggtgccgatgggaagctgggaaccggtgaggatgaccggcttggaaaggttctcgagcatgaaactgagggcggaggctgtataggccatggtgtcggtaccgtgcaggatgacgaagccgtcgaagttgtcgtagttgtagttgatgatttttacaatctttgcccagagggaaggctccatgtcggaagagtcgatcggtgggtcgaactgataggaagagatgcggtagttgaagcgcttcagttcgggaacatgctgtagcagttggtcgaagttgaagttctcaagcgcaccggtctcgggattttctatcattccgatagttccgccagtgtaaatcaatagtacggaagggcaatcgactttcatgatattcgtattagagcttttttcgggcacaaagatagtgaaatatgagatggggagaaaataaaagagacaagtctttgcagattttgtctcttttattatttcattgcgaaaaatatattgtatgaaatttgaataagctcactgtttcaaatcttccttcaactgcctgatagccttttccgcatctccttccttctcgttgagcagcgtgacgaagcggctgccgatgatggcaccggatgagtgggcgcaagcggcatcgaatgtctgcttgttgctgatgccgaagcctaccatgcgtggattgcgcaggttcatatcctctatcttcttgaagtaggcttgcttccgggtgtcgaagtctttctgggcaccggtggtagcggcactggacaccagatagatgaagccgtcggtgtgggcgtctatttcgcggacgcgggcttcgctggtttcgggggtaatgagcatgatgacacggatgtcatacttcgaggcgatggctttgtaactctcttcgtaatcgcggaaagggaggtcgggaatgatgacgccatcgatgccgcattccacgcacttctggcagaaggcttcgaagccgaactgcatgatgggattgaggtaccccataaggatgagggggatgcggacatcgcgacggatgtcgcgcaattgttcgaaaagcaggcggagggacatgccgttgtgcagggcgcgggtggcggcgttctgaatgacaatgccgtcggccatggggtcactgaacggaattccgatttcaatcatgctgactccgtttctttcgagggcacggataacgtcggcagtaccgtcgaggttgggacagcctgcacaaaagtaaatggacagcagattcttggggctgtcctggaaaagttggttaatgcggttcaacatactatttctatttactattttacaatttactatttactatttggctgcgcaatatatgctgcatggtacgatttacaattttacgatttacaattttacaatttacaatttactatttaccatgtacaatgtacaatttgccatgtggcgtatattgcgcagccaaatagtaaatagtaaatcgtcaaatcgtacctcccttgagttctttcaggaagtttgcgatgcgttccacatcctttattcccggtgccgtctcgaaacggctgttgatgtcgatacctgcgaaatagggatggcggaactcccggagggcttttacgctgtaggggttgatgccaccgctgagcaggaacggggtgggaccgttgtagcggtgcaggaggttccagtcgaactggttgccggaaccgccgtactgtggggtcttggtgtcgaagaggtagtagtcgcacagaccattgtaggcagatacggaaagcaggtccttgggcagcaagatggagaaagccttgatgaggtgcaggcctgcattgcgcagggaacggcagtactcgggagcctcattgccatgcagctggatgtagtccaggccgaaacggtcggtatacatcaggatgttttccttactttcgttgacaaagacgccgacgcgcttggcgcaggctggcagatacccgggcatttggcacagacaacggggagatttggggtagaagataaaaccaatcatatctacaccttgcagttctacattgcggatgttttctgcttcggtcattccgcatactttgatgagaggagacattttatttacgatttacaatttactatttactatttacaatttggctgcgcgatgtaacgctgtatgagagacttatgtatttacaattattgactttcaattatcaactttcagctttcaattattaattaagagactgtcttggatgaactttttcagggtttcgcccggggtggctgttttcatgaaggtttcgccgatgaggaaaccgcggaagccggcggcacgtagacggcagatggtttcggggtcggagatgccgctttcggagacaaggagcggggatgccggtccgtgggtggcttcgcgcagttgccgggctatccggaaggagttctccacatcggtgacgaaagagccgaggttgcggttgttgacacccaccatgtcgacttccttatttatataggagagttccgaagggctgtggatttcgagcaatacctccagcccgagttcgtgggcttgggtggtgagggtgctgcactgctccggactgaggcaggcggcaatgagcagtacggcgtcggcacctacgatgcaggcttgcagaagctggtactcgtcgatgatgaagtccttgcgcagaatgggaatgcggacgagcggacgggccgtgcggatgtcgcgcagcgtaccgccgaagaacttctcatccgtcaggatggagagggcggcggcgccggcggcttcgtaggaggcgggtatttcctctgcttgggcagcctcgtttatccagcctttagagggtgaacggcgtttgaactcggagatgattcctgtagaagaagcggcaagggcctgcttcatgctgcggcggtgggccgcattctcccggatgatgactccggcttgctcctgcaactgttccagagagacggtttgcttttgcagttcaatctctgtttgcttatgggcgatgatttcggacagtatatctttcattgcttcatttattaatctcgataaattttttcagtgtcgccagcgcccgtccgctatccagcgattcgcgtgcgatggcgatgcactcttcaatctctttctgcggctccatcacctggatggcaaaggcggcgttgacaatgacgcattgcgtttgtgcaggtgtggcatgccccgtaaggatattgtcgaagatgcgggcggcatcttccttgcatgcgccgccgaagagttcttcgggacgggcatccttgaagccgagagcctgcggacggtagatgcgctcgtagttgcgggtcatcaccttgaactcgtccgtcagggagatttcgtcgtagctgtcgaggctgttgaccacggcaaagtcaatgccgagtttatagaatacgttggtgtataggcgcatctgcgagaggtctgccacaccgagcagctggtatgccggacagcatggattcaccaacgggccgagcagattgaacaaggtgcgtactcccagcgtcttgcgtacgggaccgacaaacttcatcgccggattgaaaagctgggcatgaaggtaggcgatgttgcactcctccatgctgcgtttcagtgtgtcggggttgttggtgaagcgtacgccgtgctgctcgatgacattgctggctccgctcacggaagtggctccgtagttgccgtgcttggcaaccttgtagccggctcccgccaccacgaagcaagcgcaggtggagatgttgaaggtgttctttccgtcgcctcccgtacccacaatgtcgatggggcgatagggggcgaagtcgatgggaaggcgtgtctccatcagtgcttcgcggaaaccgataagctcgtccacagtgatgcttcgcatctggaaggcagtgagcaaggctgctatctgcgcctcaggatacatttccttggtgatgttgaggaggatttgtttggtctcctccgacgtaagctcttcgtggttgaagagacgggtgagtattgctttcatctttttatttacgatttgacgatttacgatttgacgattgaatttactctttttctgaagtgcctcatttgaaaagccagttttttacgattgtttttccgtcgggtgtcagtaccgattcaggatggaactggatgccgtgtatgtcatactcccgatgtttcagcgccatgatttgtccttcggggctgatggcggtaacggccagcgcttcgggaaagtcctccgtatcgaccacccaggagtggtatcgtccgacgggaatcctatcgggtaaaccgcagaagatatagtcttcttcgagagaaataccttcataatccttcccccctaatccttcatccctaatccttaatccttcccccttcattcttatctccgtctgtaccccatggaacacctcttccagattgaccagctttccgccgaacacttgtccgatggcttgttcgcccagacagacaccgagtatgggtttccgtccggcataggtgcggatgacatccagcaacagtccggcttcctcggggacaccggggccgggtgagaggatgattttatcgtatggctccaattcttcgagccggaatttatcgttgcgcagcacatccacttctgcgccaagctctttcaccagatgggcaaggttgtaggtgaaggagtcgtaattgtctatgataactgttttcatcttttgtatttacaatctattttatttactatttgacgatttacgatgtacgattgaagttactttatttacgatgtacgattgggctgcgcaatgtacgccgcatggcaaatcgtacatcgtaaatcgtcaaatcgtacataaactcacattttttccgccatctcaatcgcttttttcagtgcgccgagcttgttgttcacttcttgcagttcgtactcgtcgttgctcttggctacgatgccgccgcctgcctggaaccagaggacaccattgcggctgacaaaagtacgaatcgtaatcgcctggttcagcgagccgttcagtccgatgaaaccgatgcagcctccgtaggctccacggttgtgcggttccagctggctgatgagctgcatggcgcgtactttcggggcgccgctcagggtaccggcagggaaggtgtcgatgaaggccttgacggggtcggcctcttcgcggagcgttccgctgacacggctgacgaggtggataacatggctgtaatactgcatctccttatagaagtccacctttacatcgtggcagttgcgggagaggtcgttgcgggcaaggtccaccagcatcacgtgttcggcgttctctttggggtcgtcgtgcaggtaccgggcattgagggcgtcctgctctgcatcgccggtgcgcttcgtggttccggcaatggggtcgatataggcatggcggccttcgatgcggcaatgggtttcgggagacgagccgaaaatgcggaagcccccgaagtcgaaatagaacagatagggagaagggttgatgctgcgcagggcacggtagagcttgaagtcatcgcctgtgaaacgctgctcgaaccggcgggagaggactatctggaaaacgtcgccgcgcagacagtgggcgatgccgcggcggatattcgccttgtgctcctcgtccgtaagcggagaggtggtggggccgatggcgcggaaatcgtaggcggtgtagttacggttatggatggccttctgtacctggtccagttcgctggtctcgccgggcgccagcatctcgaggagcagcatctcattcttgaagtcgttgaagacgatgaggtacttatataatatgtacagcatgtccggcgcatcgttggtagcttcgcggctgtccttcacggggatattctcgaagtagcggacagcattgaaggaggtgtatccgtagagtccgcagtaattgctgtattcgtcctccacgcggaagcggccgaggaagtcgttcagtgcattttccacccggtattcttcggttatgggatgctcttcgcggctgtcgtcgggcaggcggaagatagccgtgccgtggtctatgctgacacttgccagcggacacagagcgatgaatgagcggttgttctcgctaccatgatagtcggaactctccataagtgcgctctgcggaaagatgtcgcgcaccttcagatacgtgctcaccggcgtatgcaagtcaccgagcatggtgcggctgactgttttataatcatattgtttcattgtatcttgtattttatttcattgtatctcgtattttcaaatagctcatcacttataactcatcactcaaatacgtttctatatccttatccccccgtcccgacaccgtcagcaccaccacgtccgtcggcttgaacctcatcttctccagcgcacccagtgcgtgggcgctttccagggcggggatgatgccttcgagccgggtcagttcgtaggcggcgcggatggcttcatcgtcgttgacggcgaggacgatggcacgtttctgcttggcaaggttggcgtgcatggggccgatgcccggatagtccagtccggcagagatggaatagggctcttctatctgtccgtcctcgttctggatgacgtaggtgcgcgagccgtggatgatgcccatcttgccgagggcaatggtggcggctgtcattcccgtttcaatgccttttccgccggcttcggcgaggacgatttgcacgtgcgggtcgttgacgtagtgatagatggtgccggctgcattgcttcctccacctacgcaggcgatgaggtaatcggggcattcgcgtccctcgtgttcaaggagctgcttccttatttctttgctgatgacagactgcaggcgtgccaccatgtcggggtagggatgcgggccgacggtggaacctatcacgtagtaggtgtccgacggatggcagcaccagtcgcggatggcttcgttggtggcgtccttcaacgtcatattgccgctggtgacgggaacgacggtggcgccgagcatcttcatcttctccacattgacgcgctggcgctctacgtcggtcttacccatgtagacgatgcattccatattcatcagggcgcagacggtggctgtggcaacgccgtgctgtccggctccggtttcggcgatgatgcggcgcttgcccatgcggcgtgccagcaatacctgcccgatgctgttgttgattttgtgggcaccggtgtggttcaggtcttcacgcttgaggtaaatccggcagccgtacttctcggacaagcggtgcgccaggtagagtggggaagggcgtcccacatagtcgcgcagcaactggtcgtattcacgcttgaagtcctcactttgcagcaccttgaggtaggtgttctgcaactcttctacacatttgtggaggatttcgggaacgtatgccccgccgaactctccgtaataaccttctttgtcaactaagaaattcatcatgttatttactatttgacgatttactatttactatttcagaaatcaaaacgcattattgcttaaacgaaaaaagccccgtcgcttggtgcgacagggctctttttgttttttactatatattacatatatacatacgagcgctgctcccttacgactgtcggagttgtaacgggtgccaccaccaatatgtatttacgaacattgttttcattgactttttttgttttatcagcggcaaagacagtgcaaaccgaatgtataataaaatgaacttgttcattttttatgctgaggtgcagcctgtcttcgttttcgcgacaaatataagcactttgttttaactgccaaaataaatatgacttttttcccggattaaaacatttttcttgaaatattgttcttataggtgtagtaaaaacgaatattcattcaaaaaaagaaaggaacagactatgaatagaaaacatttagttgccataggcgtggttattgctgtactattgttattatactggctctttgtggccgaagatatgaatgcctggctgaatgtaaactgatttttcgggattttcatgtggagttattcggataaagatgtatcttcgcaaaaaaacatagactcatgaaaggattaagttactcatttttgcgtgcaatatgtgcactggttatcggtttggtgctggtgatgtttcccgaccaagccggtgattattttgtgattacgataggtgtcatcttcctggtgccttcgctcatcagcatcataggctactttgcacagagcacggagatgcgccgccgcttccctatcgagggagtaggcagcctgctgtttggcttgtggctgattattatgcccggtttctttgccgatttgctgacatttgtattgggatttatcttggtgatgggaggagtgcaacagattgcttcgctttccgctgcccgtcgctggatgccggtaccgggaggtttttatgtggttccggtattgattctgcttgccggcttggttgcgctgtttaatcctacgggagtacgttccacggcatttatcattatcggtatcagcagtctggtctatgcggcttcggaactgctgaactggttcaagtttacgcgtcgccgtcccaaagcaccgggtacaaaggactcctcttcaagagaaatcaataacattgaagatgctgaaatcgtagaataaaaaacagaccatgcgttggttgtaaacagatggtctgtttgccctgaacgcatggtctgtttgcattgaatagatggcctgtttcaatcaagcggaccatctgttctttttattcttgcagccacttgtttatcagtgaaatggcttcttgcttttgaacgtcgggcagtgtgccgatgcgtgcccgatggcttccgccgggctctacgaatacatggatgtttttctttcctttcagccaggtcactccggcagccgtccacgggtcgttctgtccgtagatgaatatcattttcgggtcattctctttcaggaacttcgtgattttcttgcttagggtcttgtcgaagggcatgtctttcagctcttcgggaagcatcaggcgatgcaggtaacccttgctcgattggatggaaagatacttcttgaaaggcttcgtatcgtagccataatagcccagctcgcgggcggcctgtacgaagaacgaggctgtgggactgtcggcaatgaagtagtcgggattactgatgtcgagcagatgggcaaatatctcatcgtccgaggccgtggtggcagggatgctgctgacgggagttccccactgccaaagggcaaaagaatactccagcacgcaatagtcgtatatctcttcaacgggcgtatggaacttgagtcctttttcatcgcaatatttctcaaagcgggggagcagtgcggctttccgtttcaacacttccaactggaagtcctcaatccgtttgcggtcctccggagtagacactttcctgaggaaaggctcgtggcgtccgtcttccaccccgtagcagagcggagctacataaggcacggaaatatccacgtcgtccggatagaacgtgcggtagagcagggtagtctgtccgcccttgctgatgccggtcgcaatccatttgccgggatagatgcttttaaaggcgttgcggacggcgtgcaggtcgtcggcagaattctcggcggtgaggtattgccaatctttaggttcaggcgtagattccaggaaataacggtattccacaaaaatcatgttggcatcgagcagttcggaaagttcctcgcgatacttgggattgagggcataggcggctccatagccttcggttacaatcaccgtgggacggtcgaagccgacgtgggagacaatcacacgctggcggaaactgcctttttcgggatgacggtggtccaacggctgggtgaaataggttacatacttctcggagaaccgggtggactccaacggacgggtttccgtaatggcggaaatccgacccagtttttgctgcaaatcggtttgtgccggggcagcagccgaaacgaacagcaaggcaaacagcaggaacgctgcatagtagttacgtaaattcttcatgatgacaggattgttttatctgacgggcaaagataggttatttcccgcttaccgccaacagttggcatggacgaaaaaaagagagagaactgcctcgcggcacctctcccccctgcaaacttaaaacaaccaacaaaagaatgagatagggattaaggattcatccttcatccttcatccttcatttttcatcttataaacagtaactcgcgatatttgggcaacgtccacatctgattgtcgacgatgagttccagcttgtcgatgtggtaacggatttcctccatcatcggtacgatgttgtcgtggtaggcgatggctttttcacgttcactctcaattttgttggccactttgcgcgcctcgatcatggcatccacatgctccttgatgaaggcggtacggtcggcaatctcttcgatgagttccagattcttggcagacagttttgcagccttctctgcggggaacaggtctttcatcttgtagacgttgtcaatcaaatccgactgatactgtgtagctacggggataatgtggttcatggccaaatctccgagcacgcgggcttcaatctgtattttcttggtgtacatttcccatttcacctcgttacgggcttccagttcctttttcgtcatgacaccgatggactcgaacatccggatgctctccggtttcaggtagttgtcgaaaatgacgggaacacttgtctcgcagtccagaccgcggcgggctgcttcggctttccattcatcgctgtaaccgttgccgtcaaagtggataggtttgcagactttgatgtaccggcggatgacttcgaggatggcggagattttcggctcacccttttcaatcagttcgtccacatctttcttgaattccgttaactgctcggcaagggcggagttcagcgcaatcatggcactggcgcagttggcctcggaacccacggcgcggaactcgaagcggttgccggtgaaggcgaacgggctggtgcggttgcggtcggtattgtctatcatcagttccggaatctgcgggatgtccagcttcatgccttgcttgccgctgaggctgacgaggtcgtccttggtgctctcttcgatgtgttccagcacctggctcaactgcttgcccaggaaggaagagatgatggccggaggcgcttcgttggcacccagccggtgggcgttcgtcgcactggagatggaggctttcagcaatccgttgtgacggtatacggccatcagcgtattcactacgaaggtgatgaaacgcaggttctcttcgggcagtttgccgggtgcgtggagcaggataccggtgtccgtacccagcgaccagttattatgcttgccgctaccgttgacacccttgaagggcttttcgtgcagcagtacgcggaaaccgtggttacgtgccactttacgcatcaaggccatgatgagcatgttgtggtctaccgccaggttgcattcctcgaagacgggagccagctcgaactggttgggagccacttcgttgtgacgggtcttgacggggatgccgagtttcagcgcttcgatttccagttccttcatgaaagcggccacacggctggggatggccccgaagtagtggtcttccaactgctggtttttggcgctgtcatggcccatcagcgtgcgtccggtcatcagcaggtcggggcgtgcggcgtacaacccttcgtcaaccagaaaatattcctgctcccagcccagataggcaaccactttctttacttccggattgaaatagtggcatacgtcgacggcagccttgtctacggcacgcagggctttcagcaacggtgccttgtagtccagagactcaccggtataggcgatgaaaatagtcgggatgcagagcgtgtcgtctacgatgaatgccggggaggagggatcccatgccgagtagccacgtgcctcgaacgtattgcggataccgccgttcgggaaactggaagcgtccggttcctgctgcacgagcagtttgccggtgaattcctccatcacgccgcctttgccgtcgtgttccacaaaagcatcgtgcttttcggcagtaccttcggtcagcggatgaaaccagtgcgtatagtgggtcgcccccatttcaaccgcccatttcttcatacctgcggcaacctcgtcggctatgctgcggtccagcggagctccgttgtcaatcacatccgtcagtttggcatacaccttgctcggcagatagcggaacatcttctccttgttgaatacatacttggcaaaatactctgacggacgttccgccgggactgccactgcaacgggtttcttcttgaacgccgtctctactactctgaatctcaattttgacataataccttagagttgtaattgttggtttaataaaatataaaatcattatgcaccgtaggcagactcgccgtgttcgtaaatgtcgagtccttcttcctccacacgtttggaaacgcggaggccgtggattttgtcgagtcctttgaagatgatgaatcccatgcctgctgcccatgcgcctactacgagtgcaccgaatacctgcgctccgagaaagctccagcctgcaccgtaaaacagtccctcactggtggaaaacagtccggtgaggatggttcccgtgaaaccgcagacgccgtgtacggaactggcccctacggggtcgtcaattttcagtgtccggtcgatgaattccaccgaataaatcatcaggatgccgcagatggtgccgatgattaccgccccgaagggagaaaccatgtcacaaccggccgtgatgcctaccaatccggccagaatgccattcagcgtcagagacaaggaaggtttgccatatttcatccagcttactgccaatgcaaagaaaccgcctgcgcaggctgccagattggtggtgaggaatacatgcgagatggcctttgcatcgtccgtagtggctgctgccaactgtgaaccggggttgaagccgaaccatccgaaccaaaggatgaatacacccagtgccgcaatcgtgaggttatgtcccggaatggctcttgacttgccgtctttgccgtatttcccgatgcgcgggccgaggatggccgcacctaccagggcaatccagccgcctacggagtggacgatggtggaacctgcgaagtcatggaaagttgttccgaatgtttccatcatgaaggaacctgcctcaccgttcatcagccagccgccgccccaagtccagtgaccggaaacgggataaatcagcacactgatgaagatggtgtaaaccaggtacatggagaatttggtacgttctgccatagcgccggacacgatggtggcagccgttgcgcagaatacagtctggaataccaggaaaccttccgtgggaagcccgcctccgtcgtagaacgagaggtcgaagaaatggggcattcctatgaatccgcctgcaccgaacatcagtccgaaaccgatgaaccagtagagcaggctgccaaacatgaagtcaacgaagttcttcatcaggatattggccgtattttttactctggtgaaaccggcttcgaccagtgcaaagcccggttgcatgaagaataccagcatggctgcaagcaacatccatacagtgttcagtccgttggtcagttcacttaaaataagtttatccataatttcttgttgcttttagttgtattgtattttcttagttgtggtttgtagctgcccgttatctttcttgttcggcattgtagagtgcgatgtcgcctctctctgcagtacgtatgcgtatggcatcctcaatggggatgacgaagatacgtccgtcgccgatttcaccggtttgtgcagatttgatgatggcttgtacggtcttttccgcattcttgtcgcgcaccacgatggagataaggatgcgctcgatggaactggtgtcgtacatgacaccacggtagatacgggcttgtctggatttcccgatgccccgtacatcataataggagaaccattcgatgtccgcttcgagcagcgcgtccttcacgtcctcgaacttggtctttcggataatagcttcaatctttttcataccttaaataatttacgattagacaatttacgatttactatttgcctttcggtgtgtgtaaatcataggtttttcatcttagaaacttagtccgactacgaaataggcaccttcagaccttggattccaggttgctttggcaaacaacgggagggagaaggaatcggtgattttgatgtcttttgatactcccaggctgacgtcgcatacggcaaatccgttggctccatagaagtccgtggcccaaggggtagcgcctatctcggccgtccagtccagaccgcccagtgtgaagggggctgccacggagatgtaggatgaataagcacggtcaccgtctttgtcaacaccgtcgtcgcctgcaaagttggtgtaccagtttacggctacggggccgaaatcatagccgatttgcgcctcgaacagatgtgagttggcagcattgtgtgcaccgtactggaagtatttggctgtcaccccatctccggtcacattgtaccagtagtccgtcaccgatacgctgaagcctccggttgaatatcccagtatgaggtcgaactctttcgtgtccgaactctcgatgcctacggagccccaagctcccagagagaaacctttgtaggcgatggatgcgctcggctggaggcttacccctcccaaatcctggccacgccacacgtaaccgcttacgaggtcgacgcctgccgacgcttccactttatcctgagcctttgccgtgaaaggcattgccattgataacagcgccattgccattattccccattttacacttcttgttttcatacctttttacctttaagtttagaaaaattccggatgatcagtccgactcgattatagcaagtacctcgctaattcaattgtttttttatttcagccacttccggatgcgcttcatggcttccacgcagtcttcgtgcttgccgaaggccgtcagccggatatatccttcaccgctggggccgaaacctacacccggtgtgcccactacattggcttcgtacagcatctgttcgaagaaccgccaggaacttgttccgtcgggtgttttcagccagatgtaaggagcgttcacaccgccgtagactttcagcccggccgcttcaaggccctgcttcatggtccgggcattgtccatataataatctatcgtttcctttatctgccgctgtccctccggtgtgtagatggcttccgccgctcgctgggtgatgtagctggtgccgttgaacttggtagattggcggcggttccagagcttgttcagcgggatgcgttcgccttccagcgtggcggcagtgagttctttcggcacaacggtgtagccacagcgtactcccgtgaatccggcagtcttcgagaagctgcggaactcgatggcgcatttcttcgctccctttatctcatagatggagtggggcacgtcgtcttcgcggatgaaggcttcgtaggcggcatcgaacagaatcagcgtgtcgttggcgagcgcatagtccacccatttcttcagctcgggcttggtcagggtggtgcccgtggggttgttggggtagcagaggtagacgatgtcgatgcgcttgtccggaatctccgggatgaagtcgttctcggcggtacaaggcatgtaggtgacgttgctccactggccgttttcctccagtactccggcacgtccgcacatcacgttactgtctatatagaccggataaatcgggtcggtcactcccacgctgttgtcgtggcggagaatgtcgccgatgtttcccgtgtcgctctttgctccgtcgttcacgaagatttccgtaggaccgaagtggatgcctcgcggaaggtaatcgtgcttgatgatggcttctatcaggaagtcgtatccctgctcgggaccatatccacggaatgtccgtgcgtcagccatctcctccactgccttgtgcatcgcttcgatgcagaccggtggcagtggccgggtaacgtctccgatacccagacggatgacctcttgcttgggatgtgttatcctgaaagtatttaccttcttggctatgtctgaaaacagataactgcccggtagctttaaaaaatgttcgtttactaatgccataatcttttcttggttgatagttggtggttagtcaattaattcaattttgccgtcgaatactttggtggcttctcccgtcatcagtacatgcctggtggcgatgtcccatcggatggtgagtgagcctccgtccatgatgatgatggattcccttcctgcgcgtccggtgaggaaggctgccacggcggtggcacaagctccggttccgcaggcttgggtgatgcccgagcctcgttcccagacacgcatccttatttttccttctcccaatatctgggcaaattctacattgatgcgtccggggaagagagggtgattctccagtttgggaccgatgactgtaaggtcgatggcttcaatatcattgacaaagattaccagatgcgggtttcccatggatacggtggtccctacatatcgttctccgtccatttcgatgggctgttctttcatcggtttggctcctttgccgtcgtagtctgccggttcgtcggcaggtatgcccatgtctacggttacagagttgacctttccgtctgccaagtgcaggtttagcatccttatacctgacagtgtatcgagtgcgatttctgttttggaggtcagtccgtagtcaaaaagatattttccgatgcagcggcttgcattgccgcacatccgggcctccgagccgtcggcattgaatatccgcatgctgaaatcggccttgtccgaagaaccgataagtaccagaccgtcacttccaattcccgtatgcggtgcactccatgccctcgcaagttcttccggatggctgataggatattgggtcgtatctacataaatgtagtcgtttccggcaccgtgcatcttggtgaattttatagctcttgtcattttgtcctttatcggttggttaatatatccttttgttttatttcgatacaaatatacgacgttttgttttataattaactgtaaagcatatctattttctattattttttagcgaaactttcattcaatgagaatatctactgtcaggctttcaatttaaaagcatatggctttgtttttatataaattgtaatccatgtgaaagtttagtttgactcaaaataagaaaaaagattttttataagactaattgctatctttttgaaaacaagaaaccgctccattgcggacataatgaagcggtttgtttggtttttgtttctaaatgtataaggagcggctattttttctttaaaatttcttccagcactaccggctcattggttgtgatgaaatctactccttggctgatgagccattccatgtctttggcttcgtttacggtccaggcgtttactttcatgccgaggtcgtggcattcctttatccattcaggatgtttttggaagacactgaagtgatagtcgggaccggcacaaccccatgctttcaactccttgggggtaaggtcaccggtcaggtagtagacgggggtgcctttgggtgccagacggataaactccttggtggcatgttgggagaaggtgatatattccgtacggtcctccagccctttgtcctttatcatttttacgatgccctctacggctcgtgtttcctgttcgggggtcttgtgggctttcagttcgaggataaggcgggttttcaggcttttcgccttgtccagatactgttgcagggtagggagttgttcgccgttgtccagttgtacggcggtgcataccttggctgtggcatcttgcatagtcacgcctttaaaggtggcgtcatgattgacaaccagctgattgtctgtggtgagccaaacgtcgaactcggagccgtagcagtggatagaatcagcctttacaagtgcggcaagggagttctgagccgaaccgtctgtagtccagaaaccacggtgggcaatgacttcctgggcctggatagtgccgcatgcagcaaagagcagggcagaagcaaaaaatagttttttcagattcataatgattagggtgttttgttttgaacacaaagataagtattatatttcttttattaaatctaacccctgagtaatttcagtatgtactttccgggcatcacgatgcgggctttcagttggggtgagctgttcaactcgtataggattttccagattttccctcccagttttccaaaatctgtcagtctcaggatggcattcaaatcgtggatgtcggttactttctgccttgccagctcttccatcaggccttggtaattatgcgtctgtctgttgagcgtgtactccggtggagtcagaagaatctcctccttccttcttcccgtctccccttggggagatagagagggggtttctttattctctttatttagtttatttgctaaagcgctgcttgtcttggcatccctgattctctgctggttaaccagtccaccgcgacgtccggcctcctttttagcttcttgttgggcgtcccatggctccatgcggcggcttagtccgggggatgagaagcttgtctcgttcacctcgaacagcgcatagtcatagatgattcgcttcagtgtggcggttgtcacccttgctttttgtgccagtatgggaatcactttcaggctggctttatattcgttctgcaatctgaggaattcgagcactgtccagtaaatgccatatcctttcataccttcttcttgtatcataatcattaattttaggttgctgccggcattggcatcatgtagtaaataagcctccatagcttttgatattggtgttttttgttagtttactatcggtctccattccataaagttctcaatcagaaaagtccgccagccttgttgttccgcgtcccaataggctacgtgagctttaatgcttgtcatgtcatgtttctttttgaagtcgctttcgtaggaaacaagggttcctcttcccatgtagaagctgccgtcctgctttcggtaggctatcaatgcatatccgtatcgcatgtattccaatagggaatttatgcgttgtgccatccattgtacagactccatgctcaatgtcgtgttttccgtaatccgtttttcccatagcttttttgttttttctgttttggatacaaatttctcctcaaattcagttttttcttttcccattttttatgtttttagggttagtaaatgtatgataatcagcaatgaaaaaaggctactcctttcagtacggatggctacgcccttgccttgttgaggctacaccatccgacgagaaaggtgtagcccttctgtccggttgctgacggcggcaaaattaccgcctttccaggtactgaactatcagtgatttatccttacatcatatccgtatgggtcaatcagtgtggtgtcttcccgttttatgatggcccataccttctccaattcggtgattatggtgctgtaagtcaaaggcttttgctctcctctggctctctttgtgaagttttcggatgctacgagcaatttggctatatccgttatttttctaatttttgtgccttcaaaatagcctgatttaaaggctcttaagtaacctacataaacatgggtctggtctccgtagtaaacccgttctgacaatagcttttcatccactatggaactgtgttcttttactttttttgtttttagtttctgtgtatcagattgatacgacatgcttctctgttcgttactgttgagatgcttctttttttgagttctttcatttgtgtaattcttcgttcgtttaactgttttttattctggttaaaaaatgcgaaagtataaaaagtgagggagaaataaggggattttggagggaaatgtgaagggtgagttgtaaatggttgatatataagatgatatgctgttttaaaaacgtacttttaatgaacacaaagatagagacgttttttgtaatggcaaaatgtttgatagaaaaatgttcctaataataaataatgataagtatattacattgaatttcagcagtatatgcaatatatgtaatcagttaaaatcttcttatttttagctctttgagtatgtcttgtataagttcgaaataggtgtttttttaacgtacgattaaaaaacgcttttttgtttctaatacgttcgtttatagtctcttaccaaaaggtaatgaacaaccgcagagaatctgttgacaagaagggcatagtgcttgtcaaacttcccataaaatgctcgcaagtgattgaactacagttctgtaatagtagttcaaagcccccaaggaatacctttttctaagtaaaattagcaagaatagaaatggataaagagaccgaagtttggtttgctatgcgtgccacataccgcagggagcttgaagctatgcatcttctcgaaaaggcaaatattggctgtttcattcccatgcaatataagataagtatctgtaggggcaggaaagtccgtgctttggttcccgtcatccgtaatctggtttttgtccacgcacgtccttccgaagtgcagcgatttaagtctcaaattacttatttgcaatatattactgatacccgtagcggtcagaaaataatcattcccgaccatgatatgcagcgtttcatagccgtcgccggtacctacaatgaccatcttctctatttccaacccgaagaactgaatctttccaaaggtacgaaagtccgtatcaccggtggcgacttcgagggtcaagaaggtgtttttctaaaggtaaaaggtgcccgtgatcgtcgtgtagtaattgcgatacaaggtatcattgccgttgctatggcgaccatccatccagacctcatcgaagtaatccgctagtctttaattgttaatttataatttttaattaatcatgtctcttttagaagaagcactcctccttcagcgtgctgcgcacgatctgatgtatttgggtatggacgggagtcctatctatagtgatgacttgtcccgtcgtaacagcgaagtctatcgcttgaccacaactttgtataattccagtatctggggcactacggtggaggagcaggcaaatgtctgtcttgctctcttgaaagggtatagtgcctcgttcattgaccatggtgaaaaacagcagcatgtgcaggaggtattgaggcgttgctgggatacccttgatacccttccttcctctttgttgaaactccgtttgcttacggcttgttatggagaggttttcgatgagcctttggccgacgagggccgttctatcattgcttcctggaattccgcatcgctcacggcagaacagcaagaagcggttaacgagttttggaatgtggtggataatccttatccgtgggaagaactggaggagtgaaagcataaggttgaagaaagacagaaatatgagaaactttgaagatttgcaaatagcagttgctggtaccggttatgtaggtttgagcattgctactttgttgtcacagcatcacaaggtgacagccgttgatgtaatacctgaaaaggtggaaaagattaacaatcgtatatctccaattcaggatgaatatatagagaagtattttgcggagaaggaactgaacctcactgcaactcttgatggggcatctgcttataaggatgcagactttgtggttattgcagctcctacaaactacgatccggctaagaacttcttcgatacacatcatatagaagacgttattgaccttgtactatcagtgaatcctgaagcaacaatggttatcaagtcaaccattccagttggttactgtcgttccctctatgtgaagtatgctcagaagtttgctcagatggtaccattaccagatggaaaacgtcgtaagttccaccttttgttctctcctgagttccttcgtgaatcgaaagctcttgaagacaatctctatccttcacgtattatcgtgggttatccaaagatgatgtctgttgaatgggaggaggagaacgaagcaatccgcaagattcaaggtaatcacatgaaagagtctgctgagatattcgctaagcttcttcaggaaggtgccattaaagaaaacattgatactctctttatgggactgaaagaagccgaagcagtcaaactctttgccaatacttatcttgcccttcgtgtaagttacttcaatgagcttgatacctatgctgaagtaaaaggtttggattcagctgccatcattcagggaattggtctcgatcctcgtattggcactcactacaataacccatcatttggttatggtggttactgtttaccaaaagatactaagcaactccttgcaaattatgagagtgtaccccaaaatatgatgacagcgattgtagagtcaaatcgcactcgtaaggattatatagcagatgctgttcttcgcaaggctggctactacaatgagaatgccgtatgggatgcgaacaaagagcatgagtgtgtagtaggtgtttatcgcctaactatgaagtcaaattcagataattttcgtcaatctgcgattcagggcatcatgaaacgtatcaaggcaaaaggtgcagaggtgattgtttacgagcctactcttgagaacggcaccagtttcttcggcagtcaggtagtcaacaacctcgatgagttcaaacaaaaatcgaaagctatcattgccaaccgttatgactcttgcctcgatgatgtggtagggaaagtatatactcgcgacatttttaagcgcgattaatctatggtaacatataatgtaaatttggagggcaaaacagtcctcgtgacaggtgctgccggttttataggttctaatcttgtgaagcgcctttttaaggatataaataacatcaaagtaatcggcattgatagcattaccgattattacgatgtgaatattaagtatgaacgcctaaaagagattgaggctttaggttgcgactggcagttctatcagacttcgattgctgatagaacatcattagagaatatttttacggagaacaagatatccgttgttgtaaatctcgcggctcaggcaggtgtgcgttatagtatcaccaatcccgatgcctatattgagagtaatctcattggtttttacaatattcttgaggcatgccgtcatcatgaagtggagcatctggtatacgcttcttcgagttcggtttatggctcgaacaagaaagtaccgtattctaccgatgataaggtggataatcctgtgtcgctctatgcagctacgaagaagagtaatgaactgatggcgcatgcttattcaaaactgtataacattccaagtacgggtttgcgattttttacggtctatggtcccgcagggcgtcctgatatggcatactttagctttacaaataagttgtgtgaaggcaagacgattcagatattcaactacggaaactgcaagcgtgactttacgtatgtggatgatattgtggagggtgtagttcgtgtgatgcaacatgctcctgaaaagcagaatggcgaagacggacttccaattcctccatacaaagtatataacatcggaaacaatcatccggagaatcttttggattttatgactattcttcaggaagaattgattcgtgcgggtgtgctgcctgcggattatgattttaagtcacataaggaattggtacctatgcaggcgggtgatgtgcctgtgacttttgcagatactactccgctggaggaagattttgggtttaaaccatcgacttcgcttcgagttggtttgagggcgtttgctgaatggtacgctaagtattacggtacgtgtcaaactaataattgaaaatagagtgtaatttttatttaagaaaatagcagcaataagtataatgaaaaaagtaatgttagtctttggaacccgtcctgaagctatcaagatgtgcccattggtcaaagagttccaaaagcgcccaaaagagtttgaaaccatcgtgtgcgtcacgggtcagcatcgcgaaatgcttgaccaagtattgcagattttcgatgtccatcccgacttcgacctcaatataatgaagcaaggacaagacctcaccgacgtaactgcacgtgttctcgccggtcttcgtgacatctttaaggagtgccgacctgacgttgttcttgttcatggcgatactaccacttctactgcaggagctcttgctgctttctacgcacagatccctgtaggtcatgtagaggctggtctccgaactcataatatctatagcccatggccggaggagatgaatcgccaaattaccggtcgcattgctacctataacttctcgccaactccactctcagagaagaacctccttgaagagaaagtacatggtaacatctatgtcaccggaaatacagttattgatgccctctatatggtagttgataagttaaaggctgattctgctcttgccgaggagcagaatcaagtgcttgcagcagctggttatgacattactcgtcttaacaacggcaagaaacttgtccttatcaccggtcaccgtcgtgaaaattttggagatggttttatccgaatggtgacagcaatgaaggctctctccgagaaatatccaaaggtggatttcgtgtaccctatgcacctcaatcccaatgttcgtaaaccaatccacgaagtctttggcgaagacctcactcgttcaaatttctttttcatcgagcctctccagtaccttgagttcgttcaccttatgtcaaaggccactatcattcttaccgactcaggtggtattcaggaggaggctccaggtcttggcaagcccgttctcgtgatgcgcgacaccaccgagcgtcctgaagccctcacttcaggtaccgttcacctcgtgggaaccgactacgacaagattatgaatgaggtcagcatcctccttgacgatgctgcagcccatgagaagatgtccaaggctgtcaatccttatggtgatggacaagcttgccgccgcatagccgatgtccttgcagataaggtgactgatcattatgatataaagtaacttggatagcaggacaattgtctgctattatgtaatagaaataaagaatgaaatagtcttagtatacaattatggaaaaaccgaaaaccgtctatgtcggcatgtctgctgatattatccacacagggcatttgaacatcattcacgaggctaacaagcttggtcgcgtagtggtaggtgtactcactgatgaagctatagcaagctacaagcgtttgccttacctcacttacgagcagcgaagtgagattgttgctaaccttaagggcgttgatgaggtgattcctcagagtactcttgattatgtcccaaatcttgaaaaaatacgtcctgattatgtgcttcatggtgatgactggaaacagggagtacagcagaaaacccgccagcgtgttattgactgcatctcgcagtgggggggtaaggtaattgacattccttacactcagggtatttcaagctctatgctcaaccaacgtctgaaagagattggtactactcctgaggtgcgtatgaagcgcctccgccgccttattgcctctaagcctatcgtacgaatccttgaatctcactccggtctcaccggtcttatcgctgagaacgcttgcgttgaggttaataatgtgaagcgtgagtttgatggaatgtgggcgtcttcactcacagattctacctcaaagggtaagcctgacattgaggcagttgatcttacgactcgtcttcatggcttgaacgatgcacttgaggtaaccaccaaacccttcatctatgatggtgatacgggtggcaagctggagcactttgtgtttacggttcgtactcttgaacgcttgggcgtctctgccgttatcattgaggataaggtcggtttgaagcagaactcgctcttcggtactgatgctgttcagactcaggacactatcgagaacttttgtgcaaagatcaaggctggtaagaatgctcagataaccgatgactttatgattattgcacgctgcgagtcccttatcgctggcaagcctatgtctgatgcaattgagcgttgcttcgcatacgttgaggcaggggttgacggtatcatgattcattcaaaggaaaagtccggtgaggatataaaggaattctgccaccagttccgagcaaagtatgccgatgtgcctatcgttgtagttcctactacctataaccagttcacggaggaggagcttgcctcttggggcattaacgtagtgatttacgcaaaccatatgcttcgcgcttcttatcccgcaatgatgaattgcgccaagtccattctgatgcactctcgttcgaaggaggcatcagctgaatactgtatgcctatcaaggagattcttgaacttatcccaggaaccaagaactaaaagacaatggtaagacccgaattttttgtaaatacactcaaggagcacggtatggatttctatgccggtgttcctgactcattgcttaagaacatttgtgcatatattaccgacaaccttcctgctgagcagaacatcattgctgccaacgaaggtggtgctatgggcatcgcagccggttatcacttggcaaccggtaaggtacctgtagtctatatgcagaactccggtgagggtaacatcatcaacccacttgcttctcttactgacaaggaggtttataacattcctgtactcctcgtgattggttggagaggtcgccccggtgttcatgatgaacctcagcacgtgaagcaaggcaaggtgacaaccggtttgctcaacactatgggcatcaactatgccattctgccaaaggacgaagagggagcagcaaggcagattaagattgctgctgactttatgaaatctaccgatgagtgttatgctcttgttattgaaaaggataccttcgatgcttacaaacttcaaaatgtggaggtgaacaacctcacaatgtcacgcgaagaagctattcggaaagtagcttcaagcattgaggacaatgcttgtgtcgtgtcaactacaggtatgatttctcgtgaactctttgaggctcgtactgcttggaaccaaggccatgaacgtgactttctcactgtcggttcaatgggacatgcgtctcagattgctcttggtattgcgattcagaaaccggaacgtcgagtatattgcttcgatggcgatggtgccagcatcatgcatatggggaatatggccattaccgccagtatgaagtgtaagaattacgtgcacgtagtgttcaacaatggtgctcatgattctgtaggtggtcagcctactgtgggcctcaagattgacctttgtgctgtagctcaggctgttggctataaggctgcttatagcgttgagactatggaaacccttgaagaaaggcttgatgaactcaagaatgccgaaggtccggttctccttcaggtatgcgtaaagaagggcaaccgcaaggatcttggtcgtcctaccacaactcctattcagaacaaagaagctttgatgaagttcttgctatgattctgttaaacaatttgcccccccccc

SEQ ID NO: 4427 - DNA, 55408 bp, Unknown
  gut microbiota DNA sequence
ttagtgttttggggacatatcctttacggaggaagtaatattggaggttatataaatcagttgatttactcctttcacatgcctatgtatttcatactttctggcattgttgctaaggatgaaaatttaccgtttggacaatatgtatgcaataaatttaaaagagttttattgcctgcattatgtttttatttgatgacattgcctatttactttcttcaagtttttaataatcgaaaaacattagattttgaatcttgtgtttatgatatcttttatataaaaggtcactgcgcatataacgatcctatttggttctttatttgtctgttcgaagtgttatgctttggcaagttaatacacttgacaaaactgacaaaaagatcccaaatgtgggtttgcgtatgctcttttacaatagcaatactcttgagtgtattgaatttgaggtactcggccttgtttggtctgaattgtgccattctcgctcttgggttttatacttttggtatttgtttacgaaggtatcaagatatgaatcccaactattgtgaaaagaaattaagcgcgtacataataattctgattgtcctttggcttttggtgggtttgatacttaatcctaaagtatcaatgtacggctttatgtatggaaacaggttgatacctctcttcatcctttcaggaataatggggtcgatagttttcttcagacttgcatataaattgcgagatttgaaaatactcaatttttttgcaaaatacactacgattatcatttgtagccattatttgtttgttagtagtttcaatttcctttctacaagatttggattaaaaggtacaattttctttgacatactatcattgttgtatgtgattgtagttctatgggtactttacagacctctatgtgttgcgattgataagtatttgccatttcttaatggaaaaagataattatgaatcaaaaaatcatatttgatattaactctttacctcggatattgaaagggagcggtagcaataaacttttcattgttactggctctcattcgtatcaatcactcaatttcaagaatatgattgagtcgctggatattgagagggtttatttcacggattttactcccaatccattgtatgaacagatatgcaagggtattgaattgtttaaggctaagacttgtgatggtattctggccattggaggtggaagtccgatggatgtggccaaatgtatcaaactggctgtattgtctaaagagggtaatgatgccatcattcctcctttggtgaatacacaggtggaaattgacggcacaaagattcctttcatagccattcctacaacggcaggaacaggcagtgaaagcacccacaatgctgttatgtattaccaaggcgcaaagcagactgtcacaaatgatggcatcttgcctgattatgcccttttggagccttccgtattgaaatcacttcctctctatcaaaagaagtgtacgatgatggatgctctttgtcaaggcatcgaatcttggtggtcggtcaactcaaccgaagaaagctatgaatatagtcgtaaggctattgaactgattatgcagaattgggagcaatacattttcgagaatgatgccgaggcagctgccaatattatgttaggagctaactatagtggacgcgccatcaatatcactcagactacagcagctcacgctatgagctacaaaataacctctctctatggtattcctcatgggcatgctgttgccatttgccttcctgaactttggaagtatatgattgacaatatggataagtgtattgataagagaggtgcaaaataccttggctctatttttgatgaaatagcttatgctatgggagccaatacacctattgatgctgttagactattccgtaatatgatgaagcaaatggaactacagaatcctacgtcggagaaaaaagaggaggatttggagattctctcttcatctgttaatcctacgagattgaagaacaatcctattgctcttgttggcaatattacgttatatttatataagttaatgattttgtaataacgcattctatttaattcataaaaaagatcatatgattaagtgatgcaaccgaatgattagttagaagtactagatagaaaatatgtaaaatatgaacataaggagaattatttcagtcgtaatcaaatattttggagtcaaaaaatatcttataaaacgctctcgaaaaaaggcaagtatgaaattgcaaacagtaggtgaggaggctttatccgcttattacgatgtcgcaaaaaacttaagtatcaatttttctccaatgtttggtaccttattaggaatataccgtgatcataattttatatcatatgatgatgatattgatatgatattggatataaaatctttatcgattgatttgctcaatgaattaaaaaacaaaggttttgaaataaataaaatatatgtagcttctaactataaaggttgtcaattaccaatgaagtttaagggtttgacttgcgatatatatttttcatatattgatgctaattctagatcacatgtttttcttcctttagctattcctggttataattggtctttttcatgtgatttgaatttctttagaattaaggatgtagttgttccatataataatacttcaatgaattggaaattcaggaacagccaggttgaaattccaagtaatactgaagaaattcttactgcgttatatggtgatgactttatgacgcctaaaaaaaatgcacatgcagatccttgtatgcgtcaaataccgctttatgaatgtaattatagatgttttcctatagatttttgtttagaaagcaaaatttggaatgggataattagtgctggcagagactttagatgatatggtggaaaatcttaagaaagagtctgtaaatggtgtggtatggtcgtttttagagactgcgtctacaaaaatgattcaattcactataggcatcattatggcgcgacttttaatgcctgaggattatggcgctattgccataatattcgtttttattactatatcacaagtatttattgatggtggctttgctactactttgattcaagacaagaataagactgaccgtgactattctacagtgtatacatttaatattatgctttcagtactctgctatttgatattgtttatagcagctccttatatatcatcattctataatactaatattacacaatacttgagagtgcaaagcgtgggtataattattttttcgctatctgcaattcacaaaattcgattgattgttgaagtaaattttaaatcaatagctaaagttactattatttcgacgttattttcgggcgtaataggaataatattggcattacaaggtttcggcgtttgggcgctagttatccaatatttatcctctgctactttgatgtctggtatgtacttattaactcaaagatggcggccgatttgtttctttgatctatcatcgtttcgccggctgttcccttttggactacggttgttgtctgcaactataattgatcgaatctatgccaatctttaccctatcattattggaaaattctgcgctcctgtacagttaggatgttattccagagcggaacacttcacttctataccagcttatacatgcatagatgtattttctcgtgtcacattcccgattatgagcaaaatatctgatgatcgtcaacttgtttctgtatacagtagatatatttctttgtcaagttttcttatacatcctgtgttgttcgctctttttgctttagctaggcctttggtcttaatactattgactgaaaaatgggagaaaattattatcttaatgcagatattatgttgtggatatttacttgaacatataagtagtataaatcgtaatttaatttacgttaaaggccgagctgatttagccttaaaactagaagtaattaaaaaaattttagctgttactatattaattgtatctataccatttggactcataggtctttgttttggaaaagcctgttatggtatattggctatgttgcttaactctgcatatacaaaaaaattgataggagtaacaatatggcaacaaatagaatactttactcctagttttgtcttaggaatggttagtgcgcttattgcaataatttctatttattttaataataataagtatggtcagcttattataggaggtgttgcttttttcttgacatattttggactttcattcataacatgtaataattcttttaaggagattgttagagttgtaaaagaaaagtttttttaatagacataatataagaagattttgcctttttagaaccttatttattggttcggcattttttcgtgtgtgctatagtatcactcaaaatgtcagataaactttctttatctataatattaacctagtgctgcataaaaacttttattggtttatgaagttgataattatttcttttgattacgaacttttttttggaataaaggcgggatctgtttataatacattgattttacccacaaataagatgatggattccttagagtctattggtgccaaaggaacttattttgtagattacttaatgataaaaaaattgagagatattgatgaggaaaaagctcgtaaggaccttttgttgatagaaaagcaattggttgatattgttaaaagaggacatcgcgtcgaacttcatattcaccctcattggttggatgcaaaatatttaggaaatggtgagtgggatttttcggatttttctcactattcattagctgaccttccttcagagcaagttaatctgttgtttcgagaaggagttggccttttgacaaaaattgttcggcaggcagatgcaaattatcgaattttggcatacagagctggcggttgggctatacaacctttctatcgtatgaaagaagcttttttagaatgtggtattttaatagactcttctgtcgcaccgggaatgactattaatcgtcataatggaaaggaacctgatttttcaatgatttcttctaatgagatatattcattttcaaaccaaatagagaaaaaagaatgtggtggtgagtttttagaagtaccaataaccacttgcaaaatgacaatatttgataaaatagctaacagattctatataaataggcacaatatggaatttattccatttgcagatggtacgcattccagagtagtaatgagaaagcaaagtagaatatatcgaatgttgaattttattaagtattgtcttattcctaataggataatgtttagtatgacacgcatatctcctaatatcatattgcaaaaagttttgtcttcacaagaaaagattcttgtatttatagatcatccaaaagatatgtctctttcaaatatcaaggtggttcagaaattgaaagggcaaggaacttttgttacatatgaatatttttcaaatagataattatgaatacaattaaagtgctgttgttaaattggacaaactccaatgctacggatttttatattcaaattcttgaagaaggttttaaatccttattcgagaatataatccgagtttatgatattaatgaaattcaagatggggatactgtacttgtaataaatccgagaattttttgcgaaatacgaaaaaagaataagaatacaaaaatatatacatggtttcagggggtaggaccggaagaggcttattatataagtcataatattcgtggtttcttaagcaagttgcattatgagtattatgaaagacaggcactaaaatattctgttggttgtgttttcgtttctaatgcgatgaaagaacattatagaaaaaaatatggttacaacagagaaaactattttattatgccttgttttaatcagggtataaatgctgcttgtttttctgatgaaaagtattcaaaaccaacttttgtttattctggtaatcttataaaatggcagtgttttcctcaaacactagacatttttaagagaattcaagaagttattcctacggctgagttgacaatattaacttatgatatagaagctgtaaaaagtatggttgatgaaaaaaacattcgttctgtttttattaatcctgctgtaaaatatacagaactaccaaatatgttagcaagatttaaatatggattcttgattagagaggacataacattgaacaatgtagctactcctacaaaaatgaacacctatttaggatgtggcttaatacctgttataacaaatgcagttaaagcctttaatgaagcattacataatagcgagtttaaagttattggtaatactgggacagaactaatagagcaaattagaaaacttgagaatagggaaatttctgcctcacaagtattcaacgattttgaaaaaatttttgatgatttttataataaggataaatatgtattgtctttttcagaatttgtaagtttatatagataattatggaagctgtggttagtgtaattatgagtgttttcaaagaacctcaagaatatctcaaacattccatagatagcattctgactcaaagctttaaggattttgaatttataattatttgtgataatccttctgataaaaacatatgcaatttccttaaagtatacaaaagtatagattatagaattaagttagtaattaatcctactaacatgggacttactaaaagtctaaatattggattaaagttggcttctgggaaatatatcgcacgtatggatgctgatgatatctgtatgcatgaacgattatataagcaagtagcttatttggaaaataaccctgagatatcagtttgcggaaccaatcgttattatatagtcaacgataaagttgtaaagaaatataatattctatttgaaaagaatggggatatagtttcaacgttccttttaagaagtccatttacgcatccctctgttatgtttaggacaattcttgtaaaagaggggtggaagtataatgaaaattttgagtgtgctcaggattatgaactttggagtagaatgattttgagcggtttgaagatgggaaatgtttctgaaccgctaatatattatcgtgttagttcagggcaaatatcgtgtaaaaagaatgctattcaaattgaatgtgcaaaaagaataaagaaaaatattttaaaaagttggaactatagtatttctgattcggaattaagtttactggttttgccatatcaggtggatgcaataattacaacttcaagaataaaaaaatttggaactctagtttcgaatcttgggatagttttagataaaaatgaattgatagatagagattcgtttgatttggaagtccttagaactcttatgctattatgctctcgtagtacttctcgaatatcttcttttttatattgtttaacctataaaaaactatcgtataataaccttaaagagatttttaggtttattatttcaagaattgtttaagatgcaaaacaatctcgtcaataaaacttttacaactaaaagaaagaaattattgttgcctgtcttggcattagttctttatatattcaatattactccagttggtttccctgacaaaattggaactagagaatacctttcgttattagtattctttccttatttttgcaaatacattaatagatcaagtgtatacaaaacaataattattgctaactattcgcagattctgatttctataataagtatagtcatcaaccagactacagatttttggtatgttcaatttgcgattagaaatatactatatataaatggcgcattgctttgtgtgtctcttcttcccaaacgctcaagtatcgatttattaatgtttttagtttgcgttgcaattgttatcaataatcttatcgcagcattaggtttttttgattctggtataatggaagcgataactagctttcaaaatttaggcgatgaaggtagaattgcgaatactgttgcttttggaaatcgaatgctcggtttgggtaagggaaattattttatgggaggagtaattagtgggtttgccataatactattgttttatctttatgtaagaaaaaagataacaggattttttgcatatccattgattttatttgtctttattacggggacgtatattgcaagaactacaatcgttggattaggaataggtctgttcttttttgttaagaatgtaaggataagtaagattattacattattatcttttactttactgatggtatttggaataataaaaatgggattttttgaaaacataaatacttcacatgcatttgaagtttttacattattttttagtgatggagagtcgaaaagtttgaatcatatgttgtcaatgtatgaaagaacttttgatttgaaaacattttttttaggtgatggcctttcaaaacaagatggagcatattatatggaaacagatattggatatttaaggaatattttttattttggtattataggaactatatttgggtatttctattatgaaactaagattatcaatctactccataaaacaaaaattatttctaaaagatttgcattcttgttgttttcatatctaattattttgaattttaagggggtacctgactataattttctcttatttattttcttagcatactatataaggaacgaaaaagtgataagaaatgaaactgcttcatgtcatttcatctcttgagatagggggggctcaacgcttgatttcggatcttcttcccattcaaaagcaacaaggtttagatgtaacacttcttgtattgaggagtgaggaaacagactttacaaagaaagttcgagatgcaggtattcctatcatatcgctgaacgtaaagagtttccgcaatccaatgattgcacacaaaatgcgtaagattatgaagcattatgaagtggtgcatgctcatttggttcactcgctctatctttgctctttggctgctagaggtttgaaggtgaaattggtttatacagaacactcaacttcaaataatcgaagaggtaaatggttcataagacctatagaaaaaataatctatgcccgttatacaaagttggttggtattagccaacagactcaggacgcgcttcaggaatggcttcagtcaaaagacgaacgttttgtggtaattaataatggagtggatactaagcattttgttgccatcaagagacctgttatcccaaagtcattgattatggtgagtcgttttgcttcttccaaagatcaggaaaccgttattcgtgctatggaaacaatcgataaagatgttatacttcggttcgtaggagatggtgagaatcttgagcactgtaagcaagtcgctaatgattgcagtgttgcagatagagtacaatttcttggatctcgttcggatgtagctgaactaattgcagaatcgtatataggtatacagtcttcaaactgggaaggttttgggttgacagcagtggaattgatggcttgtggtaagccggtaattgctactaatgttgaggggctaaagcaggttgttgagggggcaggtaaggtgttttctaaaggaaatgcaaatgaacttgcggaaaaagttaatttacttttagctgatgtaaatctctattgcgacatatcaagaaaatgcattagtcgagctgctcaatatgatattcatttgatggcagactcatataaaaaattgtatatccatttgattaactaactagttgagtaagggaaggtgaaagtctctctcattgcttaaccagaatatagggaaaacacgtgaactccaataaactctttatagtagtaaatgtagattggttcttcctgtctcatcgactgcctgtggctttagcggctcaggaggcgggatggaatgtgactattatcacagctgatacaggtaagttgaaagacattgaggcaaaaggtttgaaggtgattaacctgccgatgaaccgcagtggtatgaatatcttcgaagaactgaaaacgctcaacttccttcgtaaactgtacaaacgtgaaaaaccggatgtggtgcatcatgtgggtatgaagacaattctttggggtacgctggcggctaagttctcgaaagtgaatggtgtggtgaatgctataagtggacttggtgggttctttgcggaggagaaccaaggactgatgtctaaagttgttctgaatgtgctcaagttcagccacaaccttggacagattaggagtgagaaggaagaggttggaaatcgcttgctttgtatcttccaaaacgatgatgactgggaactgtatgtgaagcatgggattattcgtcgtgaacaaggacgtttcatcaaaggttccggggtcagtctggatgagttttgctatactccagagccaaaggaaggcaagctgaaggttgtcttgactgcacgtatgattgtagagaagggaattttcctattgactgaagctgcggagagattgcgctcaaagtataaggataatgtggagtttctgttagtgggtggtttggatgatcatcccggagctattacccaagagcaattggattcggtttgtgacggtaagtatatccagtggttgggttacagaacggatgtttgtgagctcttgaagtcatgtcatattgtggcatttccttcatactatatggagggacttcccaagtcgcttattgaggcagatgctattggacgtccggtaattacaagtaattctgtaggctgcaaggaaacagtgattgatggtgaaacaggattcctgattcaaccgaaggatgtggatgcgcttacggaggagctggatttgttgctttcgaataaggaacttcgtgtgaagatgggtaaggctgcacgcaaatattcggaggagtactttgatatcaaaattgttatccaaagacatttatctatctatgatgaacttatgaaataatttcgactacaggcttgaggataagtggatttcttttctgaacagaaatatttcgaattgaacgaatgaagaatatattgataactggcgctggtagctatgtgggcgaaagcgttaggaggtatatattagctaaagattcatcgtatcagattgatgcggtggacacggtgggcgacaactggaagaaggttgattatacaaagtatgatgtagtcttccatgtggcgggtattgcacatgtaaatgcagatccgaagatggagccactttattataaggtgaatcgtgacttgacgattgaagtggcgaaacatgcgaaagctgcgggtgtgaagcagttcattttcatgtcgagccagattgtatttcacgagagccggtcgctcaaggctgaagtcttgacaacagaaacaaaaccggctccgaatgggttctatggcgactcgaagttgcaagctgagaatggactgcatgagttggaatcagaagaatttaaggtgtgtatattgcgaccttgtatgatttatggtccgaatgcgaaggggaattttccacgtttggcgaagttggcttgcaagactccggtgtttcctgagtggcacaataagcgttcgatgctctatattgacaatctggctgagttcgtgaagcaggcgattgagcgcgagttggaaggtacgttctatccgcaaaaccgggagttagctgatacggtagagattatccgtttctttgcaaaagaggtaggtcacaaggtgtggattactcgtttgtttaatccttttatttggttgggaagttttatcttgcagcctatcaataaaatgtttgcaacatactactatgatcccaagatgagtaagatggagtttgattatcagttggtgagctttgaagagtctttgaaaaaggttgcagacagtttgaagtagtaaaataaaattgtatttatgtattatctgatagttttagttctgttattcgtaacagaacttttttattttaagatagccgacaaatgtaacatcatcgacaagccaaacgaacgcagctcgcatacacgcataactttgagaggtggcggcatcatcttttatttcggcgcgttggcttatttcttgacgagcggttgggaatatccctgctttatgctggctttgacactggtaactttcatcagcttcgtagatgatgtaaaatccattagccagctgacgcggctgttcttccatttttctgcaatggcgttgatgttttatcagtggggattgttttctttgtcttggtggtggcttgttttggcgttgatagtttgtacgggaattatcaatgcgtataattttatggacgggataaacggcataacaggaggttattctttggtggtattggctgcattggcttatatcaatcaggaaatcgttccttttgttgagaaggattttatttatacggttatctgttccgtgcttgtcttttgctttttcaatttccgcaagaaggcggaatgctttgcgggcgatgtaggtgcggtaagtattgccttcatcgttctcttcctgatagggaaactggtcatccgtaccggagatttcagttggatggttctattggctgtttatggagtggatagtgtattgaccattattcatcgcttgatgcttcatgagaatatcggcttgccgcatcgtaagcatatgtatcagattatggcgaatgagcttaaagttcctcatgtgatagtttcttctatttacatgggggtacaaactgctataatcgtaggatatataatatgtttgaattatggttactggtatctgctatgcgttattcttttgcttagtcttatttatatctgtttcatgaagagattctttgttcagcatcaattatcttataattaatactttatcacttttctcagaaaaactactcccaagcaccttttttctttggctgcacagtttttaatcctcacctttgcatcgttgatcaacgaaacgtgtgaataagaaaacgaatttaaatctctaaagaaaaaaagtatgagtgtaattttcaggacggtggagagaccgtcggaccccagggttgaaaactctcccaagaagtattatccgcagttggtgacattggggcaaagcgtggatttggcgtttattgcacagaagatgcaggaccgctcttctctgtctatcggtgacatcaagagtacgatgcagaactttgtggaaaagctgaaagagcagttgctggaaggaaagacggttaatatagccgggctgggtgtctttatactggcagccaaatcgaaaggtgaggaaaaggctgatgacgtgacagccaagagtgtggagagcgtccgtatctgttttcaggcgaatagggaactgaagatatcgaaggctgctacccgtgctggagaaaggctggatttggtgagtttggatgattatcttaaggggaagacttctacagatggcggctccggttcggaaggaggaggctcggattcggatggagaccaaggtgagaatccactgggataatagtagctatgaattattaatcagataatggataatctttatgaagaaaacgtggaatgtgattttgaaacttattattgccgtagcgagtgctgtggcaggtgtgattggtggacagacaatgatgttttagtccgataggatttgataaataaaaaatgagaagagctgctggcaggaaatctgtcggcagctctttttttaatccttgtatgcttcttcgtgtacccccgctacagcccgtccgctggggtcgttctttccttggaaagagacgtcccatgccagcgcttcggcggtggagcatgccacactgggtacgctgggaacactccggaccgcgctttcactggggaaatgctcttcgaagatggtacggtaataatactcttccttgttttgtggggtgtgtatcgggaaacgttcggctgcacgtgccatctgttcgtcgctgacggcagcggcagtgacggctttcagcgtatcaatccaactgtagcccacaccgtcggagaactgttctttctgccgccaggcaacgttctgagggagcatgtcggcaaaggcttcgcggactactttcttttctatctccttgccggggcacatcttgactgccggattgatgcgcatggcaatatccaggaattctttgtcgaggaaggggacacgtccttccactccccaggctgcaaggcttttgttggcacggaggcagtcgtacagatgcagtttggagagcttgcgcacggtttcttcgtgaaaggcttgcggggtgggcgccttgtggaagtaaaggtaaccgccgaacacctcgtccgcaccttcgccgctgagtaccatcttgatgcccatgcttttgatgacacgtgccagcagatacatgggggtggaggcgcggacagtggttatgtcgtaagtctcaatgaaatagatgacgtcgcggacagcatcgaggccttcctgaacggtatagtttatctcgtgatgcacggtaccgatatgacgggccacttcgcgggctttaatcaagtcgggagcacccttcaagccgacggcgaaggaatggagctgcggccaccaggcatctgccttgttgtctgtctcgatgcgtttggcggcatatttcttggcgatggcagagatgacggaagaatcgagtccgccactgagcaggacaccgtaggggacgtcggacatcaactggcgctgtacggcggcttcgagggcatcgtgcacggcagtgacttgtgtgccgtaggctgttcggcctatcgaagccggcgcagcgttgcgttcggcggcaggagtgtagttgtccttcacagcggcatagtccatccagtcgcgggtgtaccagcggtgcatcttgccctcgcggccacggtagtagtggccgggaaggaaaggctcatactcgtcgcagaaaccctcaagggctttcagctcactgccgaagtagatgtgtccatccttgtcgcgtcctatataaagggggattacgccgatggggtcgcgggcgatgaggtaatcgtccgtttcttcatcatagagggcgaaggcgaagatgccgttcagctcttcgaggaagcggacgcctttgtctttgtaaagggcaaggatgacttcgcagtcggaaccggtctggaaggcgtattttccggcatagcgggcacggatgtcgcgatggttgtaaatctcgccattgacggcaagcacctgtttgcggtcgggtgaatacaagggttgtccaccggattccgggtcgacaatggagaggcgttcgtgggcgaggatggcggagccgcctacgtagataccactccagtccggtccgcgatgacggattttctgcgccatccgtagcgctttgtttctcaattcaggagtttgcgactgtatgttgaagattcctgctattccacacatgagaattaaaaattaaaggttaaaaattaaagaaagggaaatcatttcttgttttcttttagaggttcgaggtaacggtctatctctgttgccactcgtcgtccgtcggccaaggcacgtactacgaggctggcgccgtgggcggcatcgcctgccacgaatacgttctctgcaaacttcggttgctcgggcttgaggaaacccatggcaagaagcaccatatcggcttcgatgacctctttcttacccgtagatttcatggtagggcggttaccgtctgttgccggaagccactccacttcttccacttccacaccgcataccttgccattcttcccgatgaaccgggtagaggcgagggaccatcgacgggtacagccttcttcgtggctgctggtggttttcagtacgacgggccattgcggccagggagtatccgggttgtgtcctatgggcggttggggcataatttcaatctgggttacgctgacggctccctggcgaatgctggtgcctatacagtcagacccggtatcgccgccgccgatgacgagtacccgtttgccgcgggcgttgacgagctggtctttcgggaaggtatctccatccagaatatggttctgctgtgccagcatgtcgagggcaaagtagatgcctttcagctccctgcccggaatggagaggtcgcgggcggtgggcgtaccggtacaaatggcgtaggcatcgaatccggcaggcagtttctgcacatcgacatggactcccatcttgaacaagataccttcggcctcgaggattttcatgcggcggtcgatgacggctttgtccagcttgaagttggggatgccatagcgcagcagtcctcccggcatcggtttgctgtcgaatagggtaacttcgtaacctttggcgttcagccgtacggcaacgctcaatccggcagggccggcgccgatgacggctactttctttccgttgcgttcgggctggaggggggtgatgtagccctcgcgaaaagcagcctcggcaatggcggcttcattctcgcggatagtgaccggttcgttgcacgagagtttcagtacgcacgacttctcgcaaagggcagggcagatgcgtcccgtaaattccggaaaatcattcgtactgttcagtatttgataggcttcgcgccatttgccccggtagagcgcgtcttggaattccgggtctttattgcccagcggacatgcccagtggcagaagggtacaccgcagtccatacagcgcgaggcctggagcttgcggtcgtggctgttcagtgtctgttccacttggctgaagtctgtgatacgttcgtgtatcggacggtaacccgcctcttggcgggggatattgaggaatgcttttggatctcccatgatgaacaaattaaaaagttaaagaattaaagaatgaaaggggaatttcctcagtctttcattatttcattattaattcgcgattcaataatcgcgttgcatttctgcaatcttctgttgcaatttctgcatctgctcctcttgcagcacttttttgtattcgatagggactacctgaatgaactggtcggcatagcgtggccagtcatcgagcatggtgcgtgccagtttggaaccggtgtacaggtagtgctggcggatgagctcgtgcagttccttgcggtaggaggcctcttcgatgagactcagttctaccatttccatgttgcagaaatagtcgaagttgccgtcccggttccatacgtaggccacaccgccggacatgcctgcggcaaagttgcgtcccgtctgtccgagtactaccacgcgcccgccggtcatatactcgcagcagtggtcgcctacaccctccactacggctgtggcaccggagttgcggacggcaaagcgctcgcctgcacggccgttgatgtaaacttcaccgcttgtggcgccataaagcagggtgttgcctgcaatcgtgtttttctccgcctcgaagttgctccgtactgggggcaggactgcgatgcgtccgccactcagacctttgcccagataatcgttggcctcgccttccagcttgaagttgacacccgggacaaggaatgccccgaaactctgcccggcggagcctttgaacttcacgttcagcgtatgttcgggcaaccctttttctccgtattttgcggcaatgacaccagagagcatggcgccgcaggcacggtcggtattggcgatggtgtactccagcgagatttccttctggttctctacggcttcggcggcggcatgtagcatctctacatctttcacatggtcgatgccatgctgttggtcggtgacgtggtggatggcggcttcgttgtctacgcgtgccagtagtttgtcgaagcttatcaactgatgtttcctgattccgtcatccggcttgcggacgataaggtctgtgcgtccaatgatgtcatccaggcgttccacaccgatttccgccaggtattcgcgtacttcctgcgccaggaacgtgaagaagttcaccagatactcgctgcgtccgcggaagcgtttgcgcagttctccgttctgtgtcgccacccctacggggcaggtgttctggtgacatttgcgcatcattacgcaacccagtacaatcagggcactggtggcgaaaccgaattcttcggctccgagcattgccatcagtatgatgtcgcggcctgttttgagctgtccgtccacttgcagcatcacttgtccgcgcaggccgttcagcaccagtgtctgctgcgtttcgctcaagccgagttcgggcgagatgccggcatagcggatggatgatgcaggagaggctcccgtaccgccctctgcacccgagatgactatcaaatcggcctttgcctttgccacaccggcggcaatggtgcccacaccgctttctgccaccagcttcacgctgatttttgcccgtgggttcacgttctttaggtcgaagatgagctgtgccaggtcttcgatggagtaaatgtcgtggtggggtgggggggaaatcagcgagatgcccggaatggagtggcgtgtcttggcaatcacttcatccactttgaagcccggcagctgcccaccttcgcccggcttggcgccttgggcaatctttatctgtatttcgtccgcattcaccagatattctgcggtgacaccgaaacgtcctgaggccacctgcttgatggcgctgcgcagactggtgccgtcttcgcgcggcatgaagcgtgcccggtcttcgcctccttcgcccgtattgctccggccatgcagcttgttcatggcaatagccatggcttcgtgggcttcgcggctgatggagccgtaggacatggcgccggtgacaaagcgctgtacgatgttctctaccggttccacccggtctatgctgataggagcgcggcggaagtcgaggaaatcgcgcaggaagatgggagattccttgctgtctaccatggcagtgaactccttgaatttcttatagcttcccaggcgtgtggcaagttgcagtgtgctgatggtttccgggttccaggcgtgcttctcaccatccttgcggaaggcatacagtccgcggttcggcaatagctccgcttcccccttctttttaagaacctccatcccttccttgtggaaggcgatggcgtcgcgtgccacttcatccaggcgtatgcctccgatgcgtgaactcagtccgccaaagtaggcattgctcaactcctcgctcagtcctacggcctcgaaaattttcgcgccccggtaagaacggatggtgctgatgcccatcttgctcataatcttgaacaagcctttgcagacggacttgatatatttcttttcggcagtggcgtagtcgagctgtatttccttttcgttcaccagtttgtcgatgacggcaaaagccatatacggattcagtgcgctggctccgaagcccagcagcagtgcggcgtgcatcacttcgcggatttcgccgctttctacaatcagtgccgtctgcacccgtttgcccacggagataagatggtggtgtaccgccgacacggcaagcagtgacggaatggcggcatgggcggcgtctacgtcgcggtcggaaagcacgatgtagttcactccttcgttgacggattcttctgcctgcttgcagagggttgccaatgcttcctgcaatccctggcacccttttgtcacttcgaagagcaggggcagtttcacggtcttgaagcctttgtaccggatgttgcagagaatatccagctgggcgttgttcaggatgggatggttcaacctcaccatcttgcaatggttttcgctgggtgtcagtatgttcatgcctacggctccgatgtattcggtcagcgacattaccagttcttcgcgtatcgggtcgataggagggttggtgacttgggcaaactgctggcggaaatagttgtacagtagttgcggcttgtccgagagtactgccagcggggtgtcattgcccatggagttgatgggttcggcaccggtggtacacatcgggacaatcagccgttccacgtcttctttggagtagccgaagatgcgcagcatgctgtcgtagttctccacgctatgggagactttgcgaccgcttttcagttcgtccagctcgatgcggttgccggccagccaagtgcggtatggtttggcttcggcaagttgtttcttcagttcgccgtcataatatatttcgcctttctcggtgtctataagcagtatcttgcccggttgcaggcgtcctttttccttgatgtctcccggctcgaaatccatcacgccgacttcgctggccactaccatcatgccgccctgcgtaatcaggtagcgtgcagggcgcagtccgttcctgtcgagcatgccgcctgcatagcgcccgtcgctgaaaagcagtgccgccggtccgtcccacggctccatcaggatggagtggtattcatagaaagctttcaaatcttcgctgatgggattcttttcgttgaaggattccggtacgagcatggccatggcgtgcggcaggctcaggcccgacatgatgagaaactcgagcacattgtccagtgaggcactgtcgctcatgcccggttgcacgatggggcgtatctcccggatgtctcccagggcgggagaggagagtacactctcacgggcttccatccagccgcggttgccgcggatggtattgatttcgccgttgtgtgccagcaggcggaaaggctgtgccagtccccaggtggggaaagtgttggtgctgaaacgggagtgcaccaatgccagcccgctggtgaagtagctgttggtgaggtcggggaagtagttgcgcaactgcaaagaagagagcatgcccttgtagacgatgttcttcgtagagagcgagacgatgtagaaatcctcgcgggtggggatgtccgacttgcgtattctgttctctatccttttccttattatatagagtttgcggtcggcggtttcgctttccgtaaatccggtgatgaaaatttgcttgatgtccggttcgttggcaagagccgcttctcccaatatttcggggcaagtgggcacgttgcgcagatgcatcagggtcaatccctccttttcaatctcttcgataatgacgctcaagatgacagcctggtcttttccgtctttgggaaggaaaagcaggccggtgccgtattttcctttctcgggaacgggaatgccctgcaacagaatgaattcgtgcggtatctgcagcatgatgccggcaccgtctccggttttgttgtccgccccttccgctccacggtggcgcatgttttccagtaccttcaatgccgattctaccagttcatgtgattttcctccctggatattgaccagcatgcctactccgcaggcatcgtgctcgtgggatgcctcatacaagcccaactgtttgggctgtcgctggtaatcctctacttttgttttgttgttaaaaagttcttgtttcatgattataagctttctttattgctgcataatattgtttgtggtttcaaaatgttcggcaaatatatgttattaattgcaaaatgctaatatgtattcctgccttctttcttgcaaaattcctgcgatagaagatgaagttatgaattgatagaaaacaccctctgttttcttttaatcctaaatcaaaatcagacggtttgatttggatttataaattaagccttttgcttttaaaataatactttctttaactttttgatgtaaaaacaacttttttctattcttttgataaataaatagtgaaaagattaactttatgttcttaagaatatgtatatttgcagcgcaaaatcaaatactgatacattatgtgtggaatagtaggctatataggtcaaaggaaagcctaccccattcttatcaagggtctgaagcggttggagtaccgtggatatgatagtgcaggggtagcattaatcagtgataaccgacagttgaacgtgtacaaagcgaaaggtaaggtttcggaacttgaaactttcgttgctcaaaaagatatttccggtaacattggtattgcacatacacgttgggctactcatggagaaccttgttccgtcaatgcccatccccattattcctcttccgaacgcctcgccctcatccataacggcattattgaaaactacgccgtccttaaagaaaaacttcaagccaaaggttatgtatttaaaagcagcactgataccgaggtgctggtacagctcattgaatacattcaggtgacaaaccatattgacctgctgacggcggtgcaacttgccttgcaggaagtgattggggcgtatgccattgcggtgctcgacaaggacaatccggatgggataatcgctgcacgcaagagcagtccgctggtggtgggcatcggtgaaggagagtttttcctggcttcggatgccacgccgattgtggaatatacggacaaggtggtgtatctggaagacgaagagattgccctcatccgtcggggagagaagctgaaggttgttaacctgaagaatgtggaatgtccgcacgaggtaaagacggtagcgctcaatctcggccagctggagaagggaggctatccgcacttcatgctgaaggaaatcttcgaacagcccggctgcattcacgactgcatgcgcgggcgtatcaatgtggagggtacgaacgtggttctttctgcagtgattgattataaggaacgtctgctggcggccaaacgcttcgtcatcgtggcatgcggtacgtcatggcatgccgccctcatcggcaagcatttgattgaaagcttctgccgtattccggtagaggtggagtatgccagtgagttccgttaccgcgacccggtgattgacagcaacgatgtggtgattgccatctcgcaaagcggagaaacggccgatacgctggccgccgtggagcttgccaaaagctgtggggcatttatatacggcatctgcaatgccgtcggttccagcattccccgtgccacgcacacgggttcctatatccacgtgggaccggaaataggggtggcatccaccaaagccttcacggggcaggtaacggtgcttaccatgctggccctgacacttgccaaagagaaaaagacgatggacgaagggcaatacctggcaattgtcaaggagctggggcatattcccgacaagatggaagaggtcttgaaattgaacgaccgcatagcggaactttccaagatattcacctatgcacacaactttatctatctgggacgcggatacagttatcccgtagccttggaaggcgccttgaagttgaaggagatttcgtatatccatgccgaaggctatcctgccgccgaaatgaagcacggccccattgctctggtggatgccgaaatgccggtagtggtcattgccacccggaatgggctttatgaaaaggtgctgagcaatatccaggaaataaaggcgcgtaaaggcagggttatcgccattgtgacaaagggagatacggtcatcagtaaaatagccgacacttgtatcgagcttcccgaaacaatggagtgccttgatccgttaataactacggtacctttgcaactgcttgcctatcacattgccgtgtgcaagggaatggatgtggaccagccgaggaaccttgctaagtcggtgactgtagaatgaggacatgtacaatttaccatttacaatgtacaatggggctgcgcttgggaggggtaaatgtaaatggtaattgtatgctataataaggaaaagaaaattgtacacttaaaattgtacattgtaaatggtaaatagtaaataaatagatggaacaactgaagcatgaatgcggcgtcgccatgatacgcctgctgaaacctttggagtactatgaagagaagtacggaacatggatgtacggactcaacaagctctatctcctgatggagaaacaacacaaccgtgggcaagaaggtgccggactggcctgcgtgaaactggaagccagtcccggcgaggaatatatgttccgtgagcgtgctctcggctcgggcgccattaccgaaatcttcggtacggtacagggccacttcaaggacttgaccaaggaacagctgcatgatgcggactatgccaagcgtgtgctgccctttgcaggggaggtctatatgggacacctgcgttactccactaccggaaagtccggcatctcgtacgtgcacccgttcctccggagaaacaactggcgtgccaagaatcttgccctctgcggcaacttcaacatgacgaatgtggatgaaatcttcgcacgcattaccgccatcggccagcatccgcgcaaatatgccgatacctacatcatgctggagcagttgggacatcgcctcgaccgcgaagtggagcgcctcttcaaccttgccgaagcggaagggctggcaggcatggacatcacccgttatatagaaaaccacatcgaccttgccaacgtactgcgcacttcgagcaaggagtgggacgggggatacgtgatgtgcggacttaccggcagcggagagacttttgccgtacgcgacccatggggcatccgtacagccttctggtatcaggacgacgagatagcggtgcttgccagcgaacgtcccgtgatacagacagcccttaatgttcctgtcgaatccatcaaggagctgcaacccggacaagccatgtttatcaacaaggccggcaaggtgcgcaccgtgcaaatcaacaagccgcgcgaggtgaaaccttgttccttcgagcgcatctacttcagccggggcagtgatgtggacatttaccgggaacgtaaactgctgggtgagaaacttgtacccaacatattgaaagccatcgacaacgatgtggaccataccgtcttctccttcatccccaatacggcggaagtcgccttctacggtatgttgcagggattggacgactacctcaacgaggagaaggtgcagcagattgccgccttggggcatagtcccagccacgacgaactggagcatatcttgtcgcggcgcatacggagcgagaaggtagccatcaaggacatcaagctgcgtaccttcattgccgaaggaaacagccggaacgaccttgccgcccatgtgtacgacatcacttacggaagccttgtcccgggagtggataatctggtcatcatcgacgactcgatagtgcgtggaaccaccctgaagcagagcatcatcggcatccttgaccgtctggagccaaagaagatagtcattgtaagctcttcaccgcaggtacgctatcccgactactacggcatcgatatggctaagatgagtgaattcattgccttcaaggctgctgtggaactgctgaaggagcgtgagatgcgcgatgtaattgccgccgcctaccgcaagtccaaggagcaggtaggcctgcccaaagaacagatggtgaattacgtgaaggagatttatgctcctttcactgatgaggaaatctctgccaagatggtggagcttcttactccgaaagggacgaaagccaaagtgcagattgtctaccagcctctcgaggggctgcatgaggcctgccccaagcatccgggtgactggtacttcagcggcgattatcctacgccgggcggtgtgaagctgctgaacaaggcatttattgattatatagaacaagtttatcaattttaattgaatcaatgagaaatgtaactctaatcctcgacgacgggagccgcttccacggcaagtcgttcggctttgaaaaaccggtagcgggagaggtggtcttcaacacagccatgacgggttatcccgaaagcctgaccgacccttcgtatgccggacagctgatgacgctcacctatccgttggtgggcaattacggtgtgccgccttttactctcgaaccgaatgggcttgccacttttatggagagcgagcatatccatgctgaagccattattgtaagcgattatagcgaaaattatagccattggaatgcggtggaaagtctcggtgactggctgaaacgcgaacagattccgggcatcacgggcatcgatacccgcgaactgacaaaggtgcttcgcgagcatggggtgatgatgggacgtatcgcctttgatgatgaatcggatgaaatgcctgaggcctcttatgccgatgtgaattatgtggataaagttagctgcaaggaggttatccgttacaacgaaggaaccggtaagaagaaagtgctccttgtggattgcggcgtcaagcataacatcatccgctgcctgctgaaacgtgacgtggaagtgattcgcgttccctgggactatgattatactgggatggagttcgacgggttgttcatctccaacggccctggcgaccccgatacctgcgatgctgccgtgcagcatatccgcaaggcaatgcagaacgagaaactgcccatcttcggcatctgtatgggaaaccagttgctttccaaagctgggggcgccaagatatacaaattgaaatacggtcaccgcagccataaccaaccggtgcgtatggtgggtacggaacgttgcttcatcacctcacagaatcatgggtatgccgtagacaacaacacgctgacagaagactgggaaccgcttttcatcaatatgaacgatggttctaatgaaggaatccgccacaaatgcaatccctggttctccgcacagtttcatcccgaagctgccagcgggccgacggatacggagtttctttttgataactttgtgaagttgctttagtaagagaattttatcaagaatggttgcgttcgtaatctcttgataatcagtatgtaaaagacggtataatgagtcccgtactgaatgtcattcagtcccagagtgaatacctttcagtcctatactgaatgccattcaattagtgactgattgtgtaaggtaagagaaagataaggttttattactactattacatttttaataaacagatatgcaaatgaaagaaaacaatataaagaaagtcttgctgcttggttccggcgcactgaaaatcggtgaagcaggagaatttgattactccggttcgcaggcgctcaaggcattgaaggaggaaggcatctacacggttctcatcaatccgaacattgccacggtgcagacctcggaaggagttgccgaccagatttacttcctgcccgtcactccttacttcgtggagaaggtgatagagaaggagcgcccggacggcatcatgcttgcttttggcgggcagacggcactgaactgcggtgtctccctctataaagacaagattttcgagaagtacggcgtgacggttctcggcactcccgtgcaggccatcattgacacggaggaccgtgaaatctttgtgcagaaactgaatgagattgatgtaaagaccatcaagagcgaagctgtggagaatgcggcagatgcccgtcgcgcagcccgggaactgggatatccggtcattgtccgtgccgcatacgcgcttggcggactgggttcgggcttctgcgacaatgaagaagagctgaatgtgctggtggagaaagccttctccttctccccgcaggtgttggtggaaaaatcgctgaagggatggaaggaagtggaatacgaggtggtgcgcgaccgcttcgacaactgcatcacggtctgcaacatggagaacttcgaccccctgggcatccatacgggtgagtccatcgttattgccccgtcacagacgttgagcaatacggactatcataaattgcgtgaactcgctatccgcattatccgtcacatcggcattgtgggagagtgtaacgtgcagtatgcctacgacccgatgagcgaggactaccgggtaatcgaggtgaacgcacgcttgagccgttcctctgcacttgcctctaaagcaacgggttatccgttggcgtttgtagcggcaaaactcggcttgggctatggcttgttcgacttgaacaactctgtgacaaagactacaagcgctttcttcgaacccgccctggactatgtggtctgcaagataccgcgttgggatttgggcaagttccacggggtggacaaagagctgggttcaagcatgaagtcggtaggcgaggtgatggctatcggccgtactttcgaggaagccatccagaaggggcttcgcatgataggccagggcatgcacggcttcgtagagaacaaggaactggtgattgccgatttggacaaggctctgcgcgaaccgacggacaagcgtatctttgtcatctccaaagccttccgtgccgggtatacggtggaccaggtgcacgaattgaccaagatagaccgttggttcctggagaagttgatgaacatcatggataccagcagggaactgcactcttttatggctgatggagagttgccaatgattcccgtggacttattgcgtaaagccaaagtacaaggcttctctgatttccagatagcccgtgccctcggcttggaacaagcaatggacggcgaagaagccatccttgccgtccgcaatttccgcaagagtgcaggcattctgcccgtagtgaagcagatagatacccttgccgccgaatatcccgcacagaccaactatctctacctaacgtatagtggcacggcaaatgatgtccgttacctcggcgaccacaagtccatcgtcgtattgggctccggcgcctaccgcatcggttcttccgtagagttcgactggtgcggcgtgcaggccctgaacaccattcgccaggaaggctaccgcagtgtcatgataaactacaaccccgaaaccgtgtctacggactatgacatgtgcgaccgtctttacttcgacgagctcaccttcgagcgcgtgatggatattctcgaactggagaatccccacggggtgattgtctctaccggtggtcagataccgaataaccttgccctgcgcctcgatgcgcagaaggtacctattctcggcacaagcgccaggagcatcgacaatgccgaggaccgtgacaagttctccgccatgctcgaccgcattggtgtagaccaacccgaatggcgggcgctgacctccctggaggacatcaacgcctttgtggataaggtgggcttcccggtattggtccgtccttcctacgtattgtccggcgctgcgatgaacgtctgttccaaccgggaggagctggaacgcttcctgaagctggcggcgaatgtcagcaagaaacatcccgtagtggtgagccagttcatcgagcatgccaaggaggtggagatggatgctgtggcgcaagatggagagattatcgcgtacgccatcagtgagcatatcgagtttgccggagtgcattccggtgacgccactatccagttcccgccacaaaagttgtatgtggagacggtgcgccgcatcaagcgcatcagccgcgagattgcccgtgagctgaacatctccggtccgttcaatatccagtatctggcacgcgagaacgacatcaaggtgattgagtgcaacctccgtgccagccgttcgttcccgtttgtcagcaaggtgctgaagataaaccttattgaacttgccacgaaggtgatgctcggcattccggtacagaagccggacaagaatctgttcgatttggattatgtaggcatcaaggcgagccagttctccttcaaccgtctgcagaaggccgacccggtactgggggtggatatggcaagtacgggcgaggtgggttgcatcggcagcgatacttcctgcgccattctcaaggcgatgctctccgtgggatatcgtattccagagaaaaatatcctgctttctaccggtactccgaagcagaaagtggacatgctttctgccgcgcgtatgcttcagaagaaggggtataagatatttgccacgggtggttccagcaatttccttacggagaacggtgtggagaatacgcgcgtctactggcccagcgaacccgaacgccagccgcaggcactcgacatgctgcaccgcaaggagatagacatggtggtcaatattccgaagaacctcaccgcaggcgagttggataacggctacaagatacgccgtgccgccatcgacctcaatattccgttgataacgaatgcccgtctggcaagtgcgttcatcaatgcattctgcacgatgacgccggatgatttggctatcaagtcgtgggcggagtacaaatgataatttaatttgctatctttgctgaaaactaagttcgatggaaacaattttgacccaatactatcaatctccttatggcgagttgctcctcggctctttcggcgataaactctgcctatgcgactggatgctgaacgagaaacgtagagtaaccgttgataagcgcatacggcaggcgctgcatgccgattatgaggaaggcacttcggaagtgattgcaagggcaatcattcagttggatgagtattttgcctgtaagcggaccatattcgatgttccactgcttgcagtcggaacagaattccagcggacggtgtggcaggagttgcagaacatcccttacggaaaaacagtgtcctacggcgagctttcacgaaagctgggcaatccgaaagccgtacgtgcgctggcggctgccaatggggcaaatgccctctccatactcatcccctgccatcgtgtggtgggcagcaaccatacgctgataggctatgccggtggactggcagccaaacaagggatgctggcattggaagcggactcttgcgacggaccgtcaggctcccgtataggacagctgttttgaggtcaggtttgtttctggtattccgccggtgtcatccccgtcatacgtttgaagaacttcgagaagaacgacggattgggaaagttcagttcgtctgatatttgaaacaccagtagattacggtgtttcagcaaaagtggctgatgtgtgcccattcctcgttgttgcatgaaaggcggattccgtttcgtgtataagcttccgaaagaatggaattctgtagcacgggcagaaaattggcagtgggcatgatgacttggaattcgtagtcgggactgacttccgagcatgatgcgtacaatccttcaatgggcgcaatggattacgcgtatcaatccgctgcgctattttgtagaggtaatgcgtaccatctatctccgtggcggcggatttgccgaactgctgccgcagttgggagccttgttggtctttgcattggtcttcaatctgtgggcggtaaaaagttataggaaaagcagttaactgattgtcctatattagcatcccattgggctctttttcttgaaaaagggctacaccatttgccttggatagctacacccttttgtgtttaaggctacaccatgaggaggaaaaggtgtagcccttttattatggataataaaagctgttttttgtgcggaaaaagagtacaagtagtgatatgtatctaatgatgaaaaatatctgttgtgcttagtaattgattgattaatagtggtatggatgtgagaagaaaggtgttttttaaacgttcgtttaatgttcgcaaagataaggtgtatttttgaatctcgcaaaatgtttaataaaaatattctataaatttctttttagtgagtataatactttgtcagtaagcctgttgcattgtatttctctaacttcttccttttactaatttttaagtaatcttccctctttaattttcttaaatattgacgttcaaaaaacgaacgtctattgaacgctttttgcttgcaatagattcgtttacagcattttacctgttaggtaatgaatgactgcaaaaaatctgttgacaagaagggcataaagcttgtcgtattctacataaagtgtccgcaagtgattgaattccaagtgtatgcaaggaatttaaagccccaggagaacacccttgtctgaacaaaagcataaaaatgggaatagagaaagaggtcgaaatctggtatgctatgcgtgccacctaccgcagagaaccggatgccatgcatctgctcaagaaagaaaacttgggctgtttcattcctatgcaatacaagatatgtataaaaaaaaggaaaaaagtccgtgctctggttccggtcgttcataatctgctttttgtccatgcccgtccttccgatgtgcagcgtgtcaagtctcaagtcacttatctgcaatatatcaccgatacccgcagtgggcagaagattattgtcccagacggtcagatgcagcgtttcattgccgtatccggcacttacgatgatcatcttctttattttcaaccggatgaattgaacttgtccaaaggtaccaaagtccggattaccggcggtgaatttgaggggcaagagggtatatttctgaaggtgaaaggcgcacgtgaccgtcgcgtggttatcgaaatacaaggtgtcatagctgttgccatggccactatccaccccgatcttatagaagtaatcggctgaactttaatttttaattcttaattctataattgcttatgtctctttccgaagaagcaatcactcttcagcgtgctgcgcacgaactgatgtatttgggtatggacggtagtcccgtctatagcgatgacttgtcacggcggaacggtgaggtctaccgtcttaccatggctttgtaccggtcgggtgtaaaaggcactaccatcgacgagcaggcaaatgtctgtcttgcccttcttatgggttacagcgcctcttttgtcgaccatggcgaaaagcagcggcatgtccagaaagtgctggactgttgttgggatgtgctcgatgcccttcccgcttccttactgaagctccgtctgcttaccgcctgctacggtgaagtgttcgacgagtctttggccgacgagggccgttccatcatcgcctcctgggattccttatcacttactcccgaacagcaggaagcggttgatgagtttcagaatgtgacagacaatccctatccgtgggaatatatcgatgaataaaacttttcattataatgcttaacaataaatccgtattgattaccggaggaacgggttccttcggaaagaagtttgtggaaaccatcctccgtgattatccgcaagtaaagaaaatcattatttactcccgcgatgagctgaagcaatttgagctgaaacagaaatatcccggtcataagtatccgcaactgcgtttctttatcggtgatgtccgtgacctcgaacgtctgacgcgggcttgcgaaggagtggacgtgattatccatgcagccgccatcaagcaggtggataccgctgaatacaatcccgaagagtgcatcaaaaccaatgtacacggtgcgcagaatgtgataaaggctgctcttgccaccggtgtacagcatgtggtggccctttctaccgacaaggcttgtgcccccatcaatctttatggcgccaccaagctcacttccgacaagctgtttactgccgccaacaatatcagcggttccaagaacatcaggttctccgtagtccgttatggcaatgtgatgggttcccgcggttccgtaatccctttctttatcaacaagcgtgacaacggggcgaaggaacttcccataaccgatttgcgcatgacccgtttcaacatttcactggaagccggtgtcgctttggtcatgtatgccatcggacatcacctgggtggtgaaatctttattcctaagattccttcctatcatatccaggacgtggctaccgccattgcacccaatctgccgcaggtggaagtgggcatccgtccgggagagaagctgcacgaggagatgattactgtaaccgatgctcttgatacaatcgatttgggcagatattatgtcattcttccttccgtatctttcaagcacagtcgcgaagagttcatcagacatcacaatgcagtacccgttcccgacggtttccactacagcagtgacaacaatacggagtgggagacagtagagactatgcgcgagaatataaagaaatacgttgaccctaatttcgaggtgaaatgataagcaagcctattccatacggtcgtcagcatatcacagatgaggatatccgggcagtcatcgataccctgaaaagcgattacctgacacaaggtcccaaaatcagggaatttgaaacgaaatttgccgaatatgtaggtgcacaatatgccgtagcggtgaacaatgccacttcggggcttcatcttgcagctaccgcactgaatgtaaagccgggcgacaaggtgattgtcactcccatgacctttgctgccagtgccaactgcatccgctattgtggcggcgaggtggtattctgtgatattgacaaggatacttacctcatggatatccgtaaactcgaagccatgcttaaggctgctccccgcggtacttacaaaggtattgttccggttgattttgcaggctatcctttggatctggaagagttcagaaagcttgccgacgagtacggcttgtggattatagaggatgcctgccatgctcccggcggctatttcatggacagtaaaggcaagaaacaacattgtggtaacggttgttttgccgactgtgccgtattctctttccatcccgtgaaacatatcgctacgggtgagggaggcatggtgaccaccaacagcaaggagctctatgacaagctttgtctttaccgtacgcatggcattacgaaagaccctgccttattgcacgagcatcatggtggctggtattacgagatgcaggagttagggtataattaccgtctgactgattttcaggctgccttgggtatttctcagctggagcgtgcgaaagcaggtcttgaacgtcgtcatgaaatcgtaagacgctataatgaagcgttttccggaatagatggtatcaagactccgttcaatactgccgatgtctatcatgcttatcacctttatatcattcaagtagctgaccgcttgggtctttataattatctgcacgagaacaatgtctatgcgcaggttcattatgctccgcttcatctgatgccttactatcagcagtggggcaataggaaaggcgatttacctatagtagaagagtattacgaacattgtctgagtcttccgatgtatcccacgctgacggacgaggaacaggagtatgtgattgaaaaggttatagaatttgtagcgaaatgaaaaatatagcaatcattcctgcacgtggcggcagtaaacgtattccgcgtaagaatatcaagccctttatgggtaaacctattattgcatattccatagaggcagctttacaaagcggtctttttgatgaggtgatggtttctaccgatgatgaagagattgctgagatagcttgtaaatatggtgctcaagttccttttatgcggagtgccgagatgtcaaatgactatgccggtactgatgatgtaattcttgaagtactgaggaagtataaagagcaaggcaggaagtttgaaacggtttgttgcatttattcaacggctcctttcgtcactcccgaaagactccgggaagcatacggaaaaatgaattcggagatagattccgtcttcacttgtgtggcttattcctatcccatacagcgcagccttcacatcgtggatggaaaaattagtatggtttatcccgaatacaaaaatacacgttcccaagatttagaaccgatttatcacgatgccggtcagttctatttctctcgcactgctccctttgtggagagccggactttttggggtgagaatacagccgggttggtactttccgaacttgaagtgcaggaccttgatacactgactgactgggcattggcagagatgaagtatgagttgcttcataaataactttcgtgtatggttttaaagggagtgtaggtagaaaaagattctgaatgtttttagttttgatatttatccctatctttgtatgtagtaaaaacaaagaaatatgaagacaacgtctgaatacattactcttttgcgtaaatatatggctgaaaatgcttctaaatacggcattatgcgtatgggaatattcggctctgtagcgcgtggtgaacaaacggttgagagtgatgtggatgtttgtgtagaattgcagacacccaatatgttcagtttggttcacattaaagaagagcttcaacacctgtttggctgtgcagtggatattgtgaggctacgtgaagatatggatggaatattgaaacagaacataatagaggaaggcgtttatgcataaaagggaaatggttgaagccatgttgggtaagatagagcaagcgattgagcgaatcttggataattctcgtcctatagattcttatcattactaccttgtatctcccggagggatggaacgccttgaaagtacctgcatgcttctgatggctataggtgaaggacttaaaggtattgataaacttacagaaaaactgctatttgctaaatatccggaagttgattggaaaggtgcaatgggaatgagagatatcatagcacatcattactttgaccttgatgcagcagttgtttatgatgtggtgaagaattatcttcctttcatgctggcaactataaagaagattagaaaagaattgtaattctttaattcatttcatttcttgaaaaaaatctatttccgtgccgacgcaagcgctaccatcggctacggccactttatccgtactctggctttggccgatatgctgaaggacgattttgattgtaccttctttacttgccatcccacctcatatcaggtaagtgagatggagaaagtgtgtccttttgtcaccttgcaagaggaagcgcattatgatgagttcctttctagtcttcaaggtgatgaaattgtggtgctcgacaattatttcttcactaccgattaccagcgtgccatcaagcaaaaagggtgccgcctggtgtgtgtggatgatatgcacgacaagcactatgtggctgatgttgtgattaaccatggtcagaccaatcctgcacttttcgacgtggaattttacaccaggctctgtttgggatttgattgggcactgttgcgcaagccgttcttagaggcggcaaaaaggaaaagtatttcttcagatagaatagagaaagtggctgtatgtttcggaggaagtgacattcatgatataactggttattttgtgaatcaggtacttcgactctgtactgtgaacagtattacggcagtagtaggagatgcttacactcctcattcatcgtgtgtgcaggacagtcgccttgtttatcgttcgcgccttacggcacaagaaatggcagaccttttctgcgactccgatttagtgatttgttctgccagttcggtttgtatagaagcattggcatgtggtgctaaagttgcggcgggatggtatgtagacaatcaaaaggagttttatgatttgctcatttcaaatggttggatcatagggttagggaatgtaaggcaaccgtctgttgatttgtgtaatgtgagctttttgcgattaagcaataccagtgtgaataattgtgttcagaggcgttatatttcatttttccgaaacttagcggataactgctatttacgtgaagttcgttctatggatagggatttgctttataagtgggtaaatgaccccatagtcaggcagagcgcatttaatacagatgagattaattatgaggagcattgtaattggtttaccagatgtttgcaaaaggaagatgtgaagatttatattttaatagagaacggtatgccagtgggacaagtgaggctgaatattgaaaagggtgaagctctgattgattattccattgcatcggaatatcggggtagaggtttaggctatgtcattatagaattaataagtgagaaagttaaatgcatgaagaatgttaattctttggttgctcatgtaaaggcggcaaatgtatcctcccaaaaggtttttctcaaaaacggttttcttgagtgtagagacagtttgatttctgacgatattttgatatataagttattgattaatgaggatattaataactaaacattattttagagagtagaactagatggaaaatattttaatcgtttctgaaaagagttggaataaagagttggttagttatctccagtcaacaatgcctcaatatgctttttacttaatatctcaaaaagaggatttcacagttgaacggattggttcaatatcaccggttaaaatatttattccgcattggtcttatataattccttctgctatttttgaacgatatgaatgtatcgtattccacatgactgatttaccctatggacgtgggggaagcccattgcaaaatcttattgttcggggactgacggcgacaaaactttcagctctccgtgtagaagtgggattagataccggaccggtctatttaaaaatggatttgtctttatcgggaactgccgaagaaatttttgtcagggtcaataagcttgttggaaagatgatagttgaaattattcaaaataatctgcagccggtgccacaagagggagaccccgttgtctttaaaagacgaaagcctgaacagagcgatatgagtggactggaaaaattggaggagattttcgattatattcgtatgctggatgctgatggctatcctcatgcctatattgaaaaaggagagttcagatatgagtttacacgtgcgtccatcaaagcggatggtagtattgtggctgacgtaaaaataacaaagaagtaatcatgaataagacatttattatagccgaactatcggcaaatcataatcatgataagcaggtggctcttgacactattcgtgcggcaaagcggtgcggtgcggatgccgtgaagatacagacctatacggcagataccatgactattgacagtaaccaagaatggttcaaaattcatggtactatttggaatggagaaaatttgtatcatttgtatcaaaaggcatatactccatgggaatggcatgaagaaatttttcatgtggcaaaagaagaggggttagtttgtttttctaccccttttgacaaaagtgctgttgactttctggaaaccttggataatccgatatataaaattgcctctttcgagattaccgatatagaattgataaaatatgctgcatctaaaggtaagcctatgattatttctaccggtattgctacggtgaatgatgtagagcttgccttgcagacatgtagaagtgtaggaaatgagcaggtgactttattgaaatgtacgtctgcttatccggcccagatttcagatgccaatctgtctgtaattgcagatatgaggaaacgtttccaagttccggtgggattatctgaccatacgatgggaacaaccgtttctgtggcttccgttgctgtgggggccaccgtgatagaaaagcattttatcatggatcgtaaaattggaggacctgatgcctcattttcgatggaacccgatgagtttgctttaatggtgaagcaggtcagggaggttgaagatgctatagggcatgtgatttatcctacagatacaacaatgataaaaggacgtgagttttgtcgttctttatttgttgtgaacagtatgaaagccggtgatgttttcacggaaaataatgttcgttcgatacgtccggggaatgggctggagcctaaatatttagacgaagtattaggtaaaaaggctgctcatgacattgaaagaggtactcccttgagctttaatgatatattagaataattttttatggctatgtttaccaataaacgtatcatggttgttgccgcccatcccgatgatgaactgctgggcctaggcgctaccatgcacaaactagtcaagacacaaggagtacagacccgggtcatcattatgggagaggggattacttcacgctcagatacccgtgacacggaacagtggaaggaagtcttggaaaggcatcatcagaatgtggagacggcgcggcagttgataggctatcacagcgtgcaggcatataatttttccgacaatcgttttgacagccatgcactgcttgatatcgtaaaggtagtggagcatgagaaggaacagtttcgtccggactttatctttacccaccatggtggcgaccttaatattgaccatcagatgacttttcaagcagtgatgactgccacacgccctatggaggacgaaccggtgaaggctatttttacattcgagaccccatcagccagtgagtggcaggctacttgcgacccacgccatttcacagccaatttctatatggagatttcggaggatgatttgaaagcaaaatgtgctgccatggcagcctatgagtttgagagccgtgcttttccgcatccgcgctcttcggaggcattgaaagcccttgcccggtttcgcggctataccgtaggcaaacacttggccgaggcatttcagatagtgcggatgatagaatgaagaagggagccttttagagccccctatactccctttccgcatcgaaacacggacaagctttcgtcggattcaaatcatggtgccccacaatcagcgcccgtggaaagatacgcttcaactcacgtagcagtgccagtaacgaagccttctgttccaatgtacgggtatcggcaggaaaacttgcagcgtctagtcctccttcataacagatgccgatagaatggcggttgtgattgaggcaatgcgcacctattttttccaacgggcgaccgcggtgtatttcgccgttgcgggtcagatagaaatgatagccgatgtcacggaagccgcggtggtggatgtggtcgcggcggcaatcctcaaagcccagggccacgccttgaggcgtggctgagcaatgaacaatgagcagggtaatcgtacgcatggctatttgcaagcgcccagacctaaagctcccgctatggcggtagctacggtgatgattactttgaggacaatgccccatacggattttgactttttgtcttcactcatgatgactggtaattgataattagtaatttgtaattattctcatcctaacggattctcgccctgattgccgtcacttcctccggaaccgccgtcggaaccactgccatcgggagcttttccgcctacggtgtacagggaagattccttcagctgtccatccaggttgatttgggcattactcagttcgccggtggcacgggcgcggagcttcagccccttcacgttgttggccagcgagaagtcggcagcggattgcgcccctttcttgctgacgattcctacggagaagatggcaaggtcatccagtttcacgttcttgccgtccagaatcaattctttagtgcaggaaaccatgtctgccagtactcccttgatgacaccactcgaatagggggtgttgtgattggacatgtgcttggccaatttttcgatgtcgaaggttgcttcgattacggggcgtgcataccagaggcctttcagtgggctgtcttcgcccgtcacttgatactttttgtaacgaatcatacaattaaaatttagaagttaaaggataaaaacatttgctgtgttgaactcaacgatgcaaagataaggctgtggatacgggcgtttgtcggtttttgcaggttctcgtctgtttgggtctgttttagtcggttatttacgcttgtaagtttgataatatcatgatttatagttacttttgatgaaatataaatcgtaactgtcaactatggattcttttgtcatacgtacatacgggcgtaccgaattggcccaaatctattgtcccaatctttgtccggaggctgccttccgcaaactgaaacactggatagacctttgtcccgatttgcgtgacggactttccgctttgggcggttcttcccgttcccgctcttatacgcctgcccaagtgcggctgatagtggctgcacttggagagccttaaacctgaggttggatggcgtaaaggtcaggccgggaatcgtaaaggtgaggttggtacacttggtacagaggttcatccatcctttcgcctcacacacatacgcgtgcgtgaagcgaagtgaatgtcagacttttggtttccggtagtttcccttgccatctacattttctaccagcccgtgtttctgcatgcgtttgagccaggtggaggcggtttccgatttgatgcccatctctccggctttctgcaggaaagaggcccgtgtgaattcttcttccatgctgtctaccagcgcatcccggtcggcattgccgcggcttgtcacttcggtgttgggcaggaaggagaggatatgggtggtatgccggtaaaggctttcggccagtgagagtacggcatgaaagtcatcggaagcaatgaggagatcccatcggctgacaatgtggtctttcagattgtctgtggctgtgtgagggtcgggcgacacgtaaggcgaggcggtgatttccccttgttccattgcgcggagcatggccactacttccatgatgcggcagatgttgatggccagacgtgccacgctgcttgacatctcgtttccgttggccagtccggagcgtacgaaaagccgggagaagagtcggttgaattcatctttctgtccgtccgtaaggtgaagggtgaatattccgttcatgacaatggttttcagtttgtccttccattccatgcccagcgccttgaaggtatcttcaagatcgctgtcattgcggtcgaactggttttgccaatgatgtatggcaggcatgtagtagaatacttggcgggaaaagagcccgttctcagcagtgggaatcagtggtttcacttgtgagggggtgcctgacagaagtacggaaagataagttttctttacctctcggtattcgtggtcggtgcggcggttgtaggacagtcggtcgtggtcgaaggctttgcgcatggtgtcgctccagtgtccgtattccgaaccgatggcggtggagatggtgtcggcttcgctttcgcatatcagtccggtaccgtcggagtccatcaggttttgcaggatgccggttccggtgttgttgcccgagatgaggaacatcttgttgagaggcattacgggagtctccgtttttccacgttccttgcccagtgtgtcgtattttgctttttcgcggcggtaacatgccatactttcgtctacctgctcacgtatttcatcgtgaatgggctcggcaagcaggcgtaccaaggagagcactcctttgccggatgcaggtagggctactacaaaggtttgcaggcagggggacatcatttttcctccgtaggaacatcggacgtgttttcccatactggcacccaatacggtgatggcacccagtagcagtacatcgtattgggcgagggaggttccgcagctcatgatgcgattcaggggataaggccagtggaggtgttcgtcgaaagtgggtaatggagacagtggttcaatgcccgatgtggactcttcctcgcgtgcgcgtgtgtgtgaggtagaagagaggggtgaactttgtgtaccaagtgtaccaatggcgggtgcggcttcatgctgaatcttcacgccgcaaagctcggccagatgaaaggcggttcccagatgcacgtcgttacggccggtcttcagggcattgctgaagagcttgtcggctgcccgttggtcgtacttggacgacaggctgcacagacttaaaaaatcatgccgtcctgcttctccgcagtcggtggcaatggcaaatgccagttgtatatactcttgataggttggagcaatgtctgctcctgcatttctgactgcttcggccagaaggtgcaatgaagatagtggttccatcggatttggtaatttataattagtaatttgtagtcggtgatttgcaatgactcataattcgaagttcacaacttttctgagcagtgctttcgggtcatggcagaggaaacaagcacgtacgaggtctttccccgaagtgtccactccttttccgggttgtgtgttttcggcgtcatacatgcagtggacgtagttcatggcccattgtattccttctgcaggattctgtccgtgaagacagggaacaaacgcttttacgccccgtccggtgggactgacgaataccagcgcagggcatagataggggtcatcgaatagttgttgtcgtaagttttccgtttcttctgcggattcaaggtggtcgatatcgactacaaccaggccggaggattccgtgaggcagtcgcttcgtcgtcgggtgaatacgccgcagggagtgacgtagggtagtgtctgttgtttgaggaatcgtgcggtagtttcgtctccttgtgctgcggcatttcttatggcgagtgtcagttcggcaagtctttggtcggaggtgataagacggtgtacttcgtcaatgctcattgtcttgaatggggtgagtgtggcactttttacggtttttccggtgttttcgtcttttttcggcgatatgggcggcatgaaaagtgacattttgaatagattttccattttgttgttttaaagattttgtgcgaagttagggctcttttctcattaaatattttctgtatatggaaaatattttaaatgtgagaaacctaaaataacgtttaataacatgtacttttttaattctgataacataatacaagacgacgatgaatataaacagtgaccaccctatactgggtgctttatttgagaaatggcgtaaagagaaagacttgaatattaatactcttgccaaagaagcccatatttgtacaactacgtatggaaaaataaaaaagggctggatgtgagattaagtgcttatcagtcacttttttattactactccatggatttggaggatgatgaaatcaggcagatggtgaatgagtggctggaggaatggctgaaggtgagaaaaagggagtaatttatgtttctaatcagtatcttaaagaaagcatttggttttggtgtgatgcccaaattggcttcattagtaaaccttttgcttttgcctttaataactccttttcttaccccttttgattatggcatttggggagtgattacctcttattccggactatttattactatagctcctttgggacttaatctgtttcttaccaatagttattatgaatattctaaccattggagggtattatggggaagagttatatgttatttctatctttcaggtatattactgagtattgtctatatttgtgttataatgggaatgttgtcagaagtttgtattcaaaaaaggtttctgattgctatgattagttgtgtacctcttcttctttttggaaatactgtgattgcacagcatctctatcctttgaaaggaactccgaagccattggtttatcgtactttgttaggtagtatctgtggtatgactgtctcgtttgtatctatttatttttttaaggctggctattggggctttctttttggtgtagctgtcacagctattgtatcatttaccttattttgtcccttacttttcaaaaaagaaggcataaaacctattatagaccgaaagtggaaaaaattagtggatatgttgaagttgtcatggccgctcattcctcatgctcttggctttgtattgctctcttcttcttcgcgtattataatgaatctctatcaagtatccttggaagatattggattgttttcaaatggatatatgatgggcgattatattactattattaccacttcgttagtcgttgcactggttccgcagttgcaaaaaacttatcgggataaaaggtttggtgattataggagtctctattatttttgtcaatttacaaccttgactgccgtttttacagtagctatttggatgccggatatttatcgagtcgttattcgtaacgagagtttccaatcatgcagtgccattgcaagtattatatgttttgccaatgtattgttacctttctataattttacttccaatgtggctttcataaagaaagactcaaagcaacttttatggcttatttttatgccgggagcagtgaatatttttctttccattattttgattccaatattggggtatgtatcagtggtatattctacgttggtgtcttattggacaatagctattattccattttttgtaccttattttcataaaaacacgaaggtttggatgggtaaattgaatagaatcatcgttatcctattgatagtgcttttagcggtagtggtggcgcaatatttgtcacaaacgttgtggtggattaagattatggtaatgattcctattgttttagtctatttctttatgttgaacaaatttcaaattaaaaagatatttcaatgaatgtaagcgttgtgttaccatctttcaacagagctcgtctgttgcccataactattcctacttattttcaggaggatgtgagtgaagtgatattggttgatgattgttcttcagacaatacagctgaagtggtgaaggagttgcaaacaagatttcccactttacgttatttccgtaatgaagtaaactcgaagcaaccttacacacaaaatgttgctattagcaaagttcagtcagagtatatttattttggtgacgatgattcggtgctttatcccggttctatccgtaacttgctgaatgtaatgagagagaaaaatgccgatattgtgggaggaagagcattggcgcttttctttcctgaacaaatcgatgaactggatgagtttttgtcacattatcgcaatcgaatcgctactgaggctaatcagattgttgatttatccactttgtccacaaactttacatatacagtgaaagagccgattagggtcccattttgtcatgcttcttgtctttgtaagacccaagtagcgcgcgaaatgcagtttgatgtgaaaatagaaggaaatgcctatcgtgaagagacagactttttgattcgggctactttggctggatataccatttattataccagttcggccaaccaaataaatctgccttcagcgatgtgttccggaggagcacgcagtaagaatcatcgacattgggctgaaaatgccattcgcaacaatgattatttcattgacaagaattatgatagtatgcagaaaatgtttagtctgcctcgtaccaaagatgaaatgaaagcactgtttagggtgcagataaaaaagcaggtacgccaaaagcatatcatggattttttggaaaggataggattgtttaaaataatctatcacataaaacataaatttgactgatgaaaatattgatttttgcaggtgtttcgcccaatacatttgtgtatatgatggacgaggccgagttatattaccgattggggcatgaggtttatttcgtgtattgcgatccgcaagcggaaatatgttgggagaatatgaaacgcaaccccatgaagtgtaaattgtgtagttgttatactacgcgtatgcgaaagaaactttccgagggtatacaccaaatctctttatgtagtgttttaacagagaaaataaaggtagaggctaaaaactttcatcctcaatacaaatctttgtcagagataaaagcacttaaatataatggtgtatcagtaggtatgtcgagtctttccaactatatctcacacacacgcaactgcaaccctaaactggatggtgtgttccgtgcctattttgatgagttgttacgttctaccgttcgacgcactttaatggtagatagaatcattactgatgtacagcctgataaggtgttgttgttcaatggccgtgctaatgatgcacgtcccgaatgggagataagccaattgcacaatattcctttcgtttcgtgtgaatcaatctgcgtgttccatcacaaataccttaaaagatatttttgtgggaatattcctcacagcattattttaaatacagagatgatttataatacttggaatcagtctgtgctgtctgaagctgaaaaagaacatgttggaaatatgtttttcatacaaagaaagacgggtacttatgcgggtgataaaaattacatagctaatcagaacaaagcaaaactgcccgacaattgggatgaaggctatcgaaatatcgtgattttcaatagttcggaagatgaatttgcagcagtgggtgatgagtatgataaagctaggctattcccaacacagttggatgcgattgtaaatatagccgaattcttaaagaacaaccccaaagtgagagtttatttacgtattcatcccaatctaacgaatgtgccctacaagtatcatacagacttgctgaaattaggcgagaaatatcctaacatgactgttatcccgggcggaagcagtttaagtacttatgcgctgatagatagggcagacgtagtagtggtgtggggctctactaccggtgccgaagctgtatatcatggtaagccggtgatattgttgggtggagcagtatatcgcgagctgggtattacctataatcccgagaatgaagaagagctgcatcgtctgctgcttcaatccgttctcccgcccaaggatagaaccaatgcaatcaagatgggattttattacttgcaatatctttcaccggcctctacgttttggaagtacaattttgagacttatagatttcatctcggctcgtttaaacattcatgtttgctttatgataaccaaaagctattgggttccagattactctattatttggtaactaaaagcttcattggtgtttatagtaaattgttcaagaaaaagattttgaatttacctactgcagaagcttaactgtatatatgggtgcaagtacaagtcagtcattaccctatgtacttgttgctttgtgttttattgctattattgcatggaacacaaggcaacggtgcagaggtattgataccgacaatgtagataccttttttggggggatcatttacttcttgtttattggccttcgtcacgaggtgggatacgattgggaagcatacgatgcattttttcatgattgtcatacagattttgatagttttgtagcacgtttggaaaattcaaatgctgagccattgttccagtattacatgtttttcgtaaaaaacagtgtatgggacaatcttagtttttttatgaccctatccaccctaattgatttggtggtgatatgttggttgttccggcggtattcgtctttttttatgctttcaatgcttatatactttgcattgtttctggattcggtaaatgtgatgcgcaacatgaagagtatctcgtttttctacctttccattcctttcttgatacaacgcaaggcattgccttattttatattgaatctgataggctttggatttcacacgagttccattgtctattttccactctatttcattcttacaaagaagtatcataaatacgtatattggggtatcttcttagtgggaaactttatggttctatcgcatattaatcttttttccaatcttttgattcaaggtgcatctatgataggggggcgtgttttgagtagtacggaggagtatatggtaaagagtatgttcaataattattcagccgtttctatcggctatctggaacggatgtgcagcggaatattgttactactgttttatgataaactgaatgctttggggaagaatatgacattgttctacaatctgtttttctgtatgctgttttgcaggctctttcttgcggaattcgatacgctacccgtacgcttcagctatttgtttatgtcatcttattgcattctctatcccgcaatctacaaagaactgaatatgaggtggaagatagtttttctggctgttgtgtgtctgtatgctgttatcagagtgttccaattgggacaagatgaacactatctatatcacaatgtattgtttggctgattatgagtaaaaagatattgtgtgtcagtttgggatatgaagggggatgcgtgtactatgccaaccaactgctcaaccactttcctactgataaaatagatgtatggatagctgcttcaaccgaagaacccttttgcggaaaagcgaagaagataaaagtctataagggattaataggacagctttggtcgtggactttctttctgccttattatttattgcttcttctgctaaagatttggcggggcagatatgatagggtgttggtgtttggacctcacaattgggatacagtctttgtgtctctatgtaagtggtgcaaggtacccacttttttagttatacatgatggagtgatgcatgtaggcgagacttcggtaattcatcaaaagatgatggatgtggcaatgaagaatgctgctcattgggtgttcttgtctgagtttgtgcgccaaagggtggaagtacatataggcgtgcaaaaaccttccattattatacctcacggagtaattgtttatggtgataataaaaccaaaattgaagtattgcccaagagatataacttattgatgataggtcgaatcaattattataaaggtgttgatttgttggcagacgcattacctttgatagactacgacagaataggaacaatcactttggcgggaaaatttgatgaatgtatctctactttaaaatttgataacaacttgtatgtaaggatagtcaataaatacttgacgaatgacgagtttgataagtttgtgaatgagaatcacttactgctgatgccttatttagaagcatcgcaaagcggcgttgctgctgtttcattgggatataacattcctgcaatcgcaacgcaggtgggaggaattcccgaacagttacctgccgatacggcttactttctggaaaaggcttcgcctgaagctttggctgaagcaattaatgcagccactgccaatgccgaagaatatctttataaaaaacaacatttacaatctttggcagatggtttgcaatgggagcacttggctgaagtgttgtatcaatacgtatccaacaaataatttaaatgaaaattgcattacaacttttgaacacattgaagcggggaggggctgaaaatgtggcacttaactatgcttctgccttgagcgaaatgggcgtgtcttcttgctttatagccaaaagccacagtgctgaatatgaggcgatgattcgcaatcagaaccatgacatagagaataggcttaccggtgacttgatagccggggctgactacatatttattcatagtaatataaatcttctgcggctgataaagtacaaaattgcagctaagctaaaaggtaaaaaagtaatttacttgcagcacctcttcttctgtgaacggaagttttttattctctcgcttctcattaattggatatgcacagatttctttttgataactcctcgtacagaacagttggtaaagaaatatatccgcatacccgttcatacttttataaacttttatattcaaagatatgagaaaaaagattattctactattcgtcaaacggtaagagaggaactgcatattgccgatgatgatttgattattatgttttctgctatcttcaagccaggcaagggattggcagattgcttgaaaatggcttcgctgatgagcaatgagcccaacgtgaaattcttgattgcaggcgagggagaagaacaatacttgatagatgaatataggggcaacaacattattgctgtgggatgtgtaaatgatgtagaacgttatttaatatcttcagatatttatttattttcttcctttcttcaagaaatgttgcctatggctttggtggaggcaataaatgccgacttgtccatattggcatacgacaccataatcaatcgctttttattatcaaatagtacttttgagagcttagacgatatgataaaagctgttgaagaacggagggtgccacgcggatttaagcattatgataaagcctatgcattggggcaatttcgaaatatactaaaactgtcttgaacttatgtttagcaagcaaaatgcggatgaattgcaaagtagggttatagcttttttgcgttttcctctcatagtgggagttgtgtttattcataactatagaccttctattattgtaggcaatgaggtaatggggagtgaaacacacatgcctacctattcttttataggtcaattgttctcacaatatataggttggatttctgtgcctttgtttttcttcttttcaggttttctcttcttctacaaagctgattattctctgcaaacatacatttacaagataaaacgtagaataagtactttgctgataccttatttattttggaatgcctcttttttgatttgtttttttgcggtatctcaccttcctctaacgagacaatggtttcaatttcctaataatgccgggctggattattatttgtcttcgttttggggaatacttgatgataagaagacgatgacatatcctatagcttatcaattttggttcataagagatttaatggtactgtctttattctctccagttctttattgtctgcttagccgttttaaaggtcttcttatttggcttattgctgtattctggctttgcggctattcattgccctatatcggtataagaggtttaagcacagaagctttattctttttctcattaggtgcagtctttagtatctacaagcgtaactttgtaaatatagttagaatatatggatattatccatatattttctacttactaatggtggctgttcattatgcttttatggtccaaggacatgatgttcaatggctatttaaattaataaaaatagcaggcattcttagtactcttaatttgtctgctgcaatagtggctaagcataattttagaagcacaacttttttagcttctgccagcttttttgtttttgcaatacacgatccttggttgttatcgaacattcgcaagttgttgtatgtcactttgcatccggcaagtgacttcgcaatggttgttgtctatttctttaatattttgttgacagttacgattgcattggctctttactattgcttgaaaaagatttctcccaagtttactgcaattattactggaggaaggtaaagggaatcctaagttacggcaacaattcgaaataagcttaagggaattttaattcaaaaccaatatacgaaagatggcgaagataactcacatttttaaaacattctatccggatgaaccggacggtggtatccaagaagtgattcatcaacttggtctgatgtcgatgaagcatggatatgaagtggaagtaatatccctttcaaaaaagccgggagtctgtgactatgatggaataaagtgcatttcttataagacgaatatccgtctttcttcaatgcctatgagtgtcggtttgatgaagaatttttcaaggataataaagaatacagatattatacatctgcattatccttacccttttgcggaacttcttacgctgtttcataaaacgagtaagcctatcgtgataacttttcatgcacctatagaagggcggggagtgctgatgaatggttatgcaccttttgtgaaaaggttatttaaaaaagcgagtgtcattgtgcccaccagtcctaatctggcttcgaccgagtctatcttaaatgtctgcaaggataaaattcatccgataggattatgggtttcagacgagagatttaatgagcatcatccggttgaagaagagtttgcccggcaagtgaatgaatatgggcagtttgccttgttcgtgggagtgcttcgtacatacaaagggctacattatttgcttgatgcagctaaaaaggtaaacaaaaatatcctgattgcaggtcgtggccctctttttaaggaactcaaccggagaattagagatgaggacatcaataatgttcatttgttgggctatcaatctaatgagcatgttgcgtatttattcaagaaatgttcgttcgtagtgctgccttccattactcgtggcgagtgctttggagtggttcttctggaagcgtgtcattatgggaaagcgatgatttcaacggaactggggacaggcaccagttgggtgaatacaaatgagactgggtttgttatcgcaccgcgagatgctgatgtcttagctgaaaaaatgaattatctgtttgacaattcggaacaaagcagaatattgggagcacatgcgcaaaaacgtgccaatgaactattcagtgcaaattcttgtgggggagcttatttggagatctatgataaactattgaaatagtagctactatcagtggaagttacacttaaaagtacaaataggtgggagataattagaactttttagaatcattggtatcattgtaggaggaagattggaacaatgaataaaattaagccatataaagaacaatattcaataatgaagaaagctaccgaacctatggttacttacacgaacaatagaaagagttcaaatgtcattgcggatgcgcgtgatgatatacgatgtgttattttcagtgaggagttttaaatagacctcaacctcgtatatataaaggtcttgtttgaatgaaagtcgtgtttatttccgaaatagaggaggatttgtattagcttataaaggtgcttgttgagaaggaatgcttgggtgcttatccttctacaattttgtaagcagtcaaaaaatggctattgattgcaacctctatcttcgctgcgaacaaaaattttagaatttatgtatagcagtgaagatcttgaaaggttttactttcaataccagaccgaggctttgcctcatggagaatctctccaatcgttttgcgttaagaacaaagttccttataacatctttcagaaatggtacaaggatacccgtaaaaaagtagttgaagtccaggttgatggtgctcctgcaattggtcatgaggaaaaatccagggctagtgatcaacctcaaccggtatcaccaagcagaaatgatcacccggttcgtatttgggttgggattcgtatcagcaatggcttgcatttgtcccaaaagaatttaagctaccaggatttggttcgtatggtagagcagttggaggggttatgttgagtgttaccggtctgaatcatttttattatgtccgtgattttaccgatatgcgttgtaaacaca

SEQ ID NO: 4428 - DNA, 166132 bp, Unknown
  gut microbiota DNA sequence
ttaaaaaacacctgtgtgcatataactcattcgtttatagtatcttatctgtaagataagtgtaccagaacaaatttggaataaaaggaatactaaaatccgttatattttatggtattcacttgtaaatgattgaatttcagtttgatgcgagaaattcaaagccccggaagaatatccttctataagaaaaacaggagaatggagcaggagaaagagaccgaaatttggcatgccatgcgtgccacctaccgcagagagctggatgctatccgcctgctcgaaaaggagaaattaggctgtttcgtccctatgagatacgaaactgttgtcaagcggggaaagaaaatccgtgttcaagttcccgttatacgcaatctggtctttgtccatgcacgtccttcagaggtgaagcgtgtcaagtctctggtcacctatctgcaatacatcaacgaccgttgcaccggcagcaaaatcattgttcccgacgagcaaatgaaacgcttcattgccgttgccggcagttacagcgaccatcttctctacttcaagcccgaggaggtgaatctgaagaaaggcaccaaggtgcgtatcacgggcggtgaattcgaagggcaggagggtatcttcttgaaagtgaaaggtgcacgcgaccgtcgtgttgtcatcgaggtgcagggtgttatcgttgtggccatggccaccatccatcccgaccttatcgaagtaatcagctgactttaatcgttttaatttttaattcttaattctttaatagtctatgtctctttccgaacaagcggtcactctccagtgcctcgcacacgaactgatgtatttaggtacggacggcagtccggtgtatagtgacgacttgtcacgtcgtaatggcgaagtctatcgcctggctacggcattgtatgcctcgcgcacaaaaggtgccaatccggaagaaacggccaacatctacctcgcgctcttgatgggttacaacacctctttcatcgaccacggtgagaagcaggaacacatacagcaggtgctggacctctgctgggacatcctcgacgcgcttcccccgtcgctgctgaaactgcgtctgctcaccgcctgctacggcgaggtgttcgaccaaccgctggccgacgaagcacaagccattatcaattcctgggattctgccacgctttccgtcgaacagcaggaggcgattgccgaatttcgcaatgtgatggataatccgtatccgtgggagtacgtgtgattgaaaaatagggagccttttacagccccctatactccttttctgcatcgaaacacggacaatccttttgcggattcaaatcatggtgccccacaatcagtgcgtgtggaaagacccgtttcaactctcgcagcagtgccagcaacgaagccttctgttccagcgtgcgggtatcggcaggacaacttgcggcatccagccccccttcatagcagatgccgatggagtggcggttgtgatggaggcaatgtgcaccgattttctccaacgggcgaccgcggtgaatctcgccgtcacgggtgacgtagaaatgatacccgatatccttgaacccacggtgacggatgtggtctctccggcaatcttcaaagcccaggctcacgccctgaggcgtggccgagcaatgaacaacaaacagtgtaacggtacgcatacgctacttgcaggaactgaaacctaaggcccccgcaatagcggttgccacagtgatgattactttgaggacaatgccccacacggattttgattttttcgtttctcccatagtgattagtaattaataatttgtaattattttcaccccagcggattctctccctggtccccgtccgaacctccgcccggattaccgccaccgccttcggtggtacctccgtcgggattgtagactgccgcctccttcatctggccttccaggttgatctgtgcgttgctcaactcccccgtggcacgggcacggagcttcagacccttcacattgtccgccagcgtgaagtcggcagccgatgccgcccctttcctgctgacaatgcctacggagaagatggcgaggtcgtccagctttacattcttgccgtcaaggataagctccttgatgcacgaaatcatgtcggtaaggacacccttgacgacaccggcggagtagggggtgttgtggtttgccatgtgctttgccagacgttcggtgtcatacgtctcttcgatgacgggacgcgcataccagaggcctttcagtgggctgttctcgcccgtcatttgatactttttgtaacgaatcataaacaattgaaatttaaaagttaaaaattaaaatcggatgttctcgggttgaattcaacaatgcaaagataagggggtgcccataggcatttacgggttatcgtaggttggtgtcggttatggtcggttatctccggttatttaccttccagggtttgaacatgtcgtgttttatggctatatttgtaagaaataaatcaagatacaagaaccatgaactcttttgtaatccgtacctacgggcgtaccgaactggccctgctctatagtccccatctttgccccgacgccgctttccgtaaactgcggcagtggattgacctctatccgggtctgcgtgagaatcttctgttacaaggcggatccgcccgctcgcgcagctacacacccgcccaggtggggctgatagtggctgcgctgggcgaaccctgaagctagggtttgcggacacagagtggaggtttacgaacacagtatagaggtttactctgtgccttggtgtttaaagggtgtaaggtgcaaaagtgcaccgccttccttacacacacacgcacacacatacgtgtgtatgcgcgaggtgcggccggtgtcatgcttgcggtttccgatagacacccttgtcatctgtcttctccaccagtccgttcttgcagagccttttcagccagctggtggcagtctcgaacttgatgcccatctcttctgccttctgcagataggaggagcgggtgaactcttcgcccatgcagcctatcagctcgtcacggtcggcattgccgcggctgacgacttcgttgttgggcaggaaggagagtatgtgggtgctgtgtcggtaaaggctttcggctagtgccagcacggcatggaagtcatcgggagtgatggtgaggccccacagactgacgatgcggtccttgatattgtctgcggcggtaccggggtcgggcgagacgcagggagaggaagtgattgccccccgctcttgtgcgcgaagcatggccaccacctccattatgcggcagatgttgatggcgagacgcgccacgctgccggacatctcgttgccgttggcaagtccggagcggacgaagagggaggagaagatacggttgaattcatccttctgtccgtccgtgaggcgcagggtgaagatgccgttcataacaatctcctcccgcttctctttccactccctgcccaaggccctgaaggtctcctcgaggtcgtggtcgtctttgtcgaactggctctgccagcggtgtatggcgggcatgtagtagaacagttcgcgggagaatagtccgttctcggaactgggaatcagtggttttacttgtgccggagtgccggaaagcagtacggagaggtaggtcttcttcacttcgaggtattcctggttggtgcgtcggttgtaggagaggcggtcgtggtcgaaggccttgcgcatggtgtcgctccagtgtccgtattccgagccgatggcggcggagatggtgtccgcctcgctttcgcatatcagtccggtgccgtcggagtcgatgatattttgcaggatgccggttccggtgttgttaccggagataaggaacatcttgttgagcggcatttcgggtatttcggctttgccgcgctctttgcccatggcgtcgtatgcggctttttcgcggcggtagctcttcatgctttcagtgacggcctggcgtatttcgtcgtggatgggttcggccagcagccgcaccagcgagaggatgcctttgcctgctgccggcagcgccacgacgaaggtctgcaggctgggagacaccatcttgcctccgtaggagctgcgtacgttgcgccccatgccggcccccagtacggtgagggcgcccaagagcagcacgtcgcgctgcgcaggtgaagtgcccgccttcaaaatctcctccaggggataaggccagccggagtgcccgtcgaaggtgggcagcgagacgcgcgggtcgctgcccggcatttcggaattttcttcctccttacacgtacacgtgtgtgtgtgaggagaaggttgcacctttgcacctgcacctttttgcgaagcagtgtctttttgagcgaatgtagtgtatgtgtcggacggaacatcggaacgtagctttacgccgcacagctcggccaggtggaaggcggtgcccaggtggacgttgttccgtccgttacgcagggcgttactgaagagcttgtcggcggcacgtcggtcgtacttgggcgataggctgcacaaggtcaggaaatcctgccgtccgacctctccacaatctgtggcaatggcaaaggcaagttggatgtactcttgataggttggggctatgtcggctccggcacctctgacggcttcggtcagcagatgcaatgaagataatgattccattgttttagtaattagtaatttataatttcatcagcgccccctcatcgtggcagaggaagcacgcccgtaccacgtcctttcccgacgtgtccaccccttgtccgggttgcgtgttttcggcgtcgtacatgcagtggacgtagttcatggcccattgtatcccctcggcaggattttgtccgtgcgggcagggaacgaatgcctttaccccccttccggtggggctgacgaataccagggcgggacagagataagggtcatcgaacagtctttgccgcagggcttcggcttcggcgagggattggaggtggtccacatccactaccaccagtccggaggtctccgtcaggcagtcgctccgtcggcgggtgaatacgccgcagggggtaacgtaggggaggttctcttgcttcagtcgtcggcaggcttgtgtgtcgccgctttctacagccatgcgcacttgcccggtaagttgctttagttgttcgtttgtggtgatgattttgtaaacttcttgtaagtcagttgttttgtagggagtcagtgttgcaggcttcactacttttcccgtctcatcgtccttcaccggtgatatgggtgcgaggaagagagacattctgaattcattcattattgctttttgttttaaaatttccggtgaagttagacactctttttcgtaaggtattacacctctactgtaaccttgatacactatttgtgttatttttaattatattaaacttaaaattatgaattgtttgattgaacattcgctggactcccttctgtggggagagaaaatcgagtatgcacgcatgcagctgcacatcacgcaaaaggggctttgcgcagccgtacacatgagcctcagtacgtatcagaagattaaaaaagggctggtataagacacgaccgtgtcctgaaactccttgattatctgcaagaagccatgacggaagaagaattccgcgagttttggatggggatggcgggaggatagaaaaactactcaaaatcttcgataaagtacatagaattctattaaataagaactgaatttatgcaagttattatattggctgccggattgggccgccgcttgggagagttgacaagcaataacactaaatgtatggtaaaggtcaatgggatacgtctcattgaccgcctactggaacaattatcgcagctctccttgcaacgtatagtactggttattggttacgaaggcaagaagttgcgtgactatctcggtaccagctatggtgatatacctttggtatatgtggagaatcccatatacgaccaaaccaacaatatttattcactggctcttgctaagaaagaattggctgaagatgatacactgctggtggagtcggatatgatattctgtgtggatatattcaagcggatgatagaggataaccgtcccaatctggccgccgtagccaaatttgagagttggatggacggtacggtagttctgctggataaggatgaaaacatagtgaactttattcctaaatcggcattcgattttaatgacattagccgttattacaaaacggtcaatgtatataagttcagcaaaggtttttccaaagaaaaatacatcccttttctggaagcctatagcaaagcaatgggaaataatgagtattatgaatccgtgctccgcgtgctggccatgctggacaaaaccggcttgaaaggaataccactcaaagaaacggaaaagtggtatgaggtggatgatatacaggatttggatattgccgaaaccctatttgctgagtccggagataaactgcctcgctatcaacagcgttatggcggttactggcgttttcctcatctactggatttctgctatctggtaaacccgttctttcctccggaaaagatgaaaaacgaactgcgtgccaactttgatacattgctcactgaatatccatcgggaatgaatgtgaatgcactgttgatgggcaaatatttcaatatcagacaacaatatgtttgtgtgggcaacggggcagccgaactgataaaaagcctgatggaacacttgaagggaaacgttggagtgatttatcctacatttgaggagtatcccaatcggaaagaaacgatgaacatcgtagcctatattccgcagaacaaggatttctcctatacaagtgaagacatccgccactttttcggaaataaggatttggaagccttgttaattatcaatccggataatccctcgggaaatttattatcaaaagacgaagtgatggttctcttggaatggagtagggaacgtggcattcgtcttattattgatgagtctttcctcgattttgcccgtagtggagaaaatatatcgttactcaacaacccgatgttggcggataatcctcatttggttgtcattaagagtatctctaagtcgtacggggttccgggactgcgtcttggaatggcagcgacttcggacatggagctgataaataaaatgcggaaggatgtttctatctggaatatcaactcatttgcagagttctacatgcagatttatggaaagtatgaaaaggattatcaaaaggcttgccgggacttcattgctgaacgcgaacattttttccggactcttcaagatattgattttcttcgtgtgattccctcggaagcaaattactttttgtgtgaagtaatagggcgttttacatcccacgacttgacggatatactcctgaaagaacataatatcctaataaaggattgcgggacaaagaaggcatttcaaggaggaaattacgtgaggatagcggtgaggggaagagcggataacgagagactggtggaagcgatgaaaagattgtgaaaaagtggaaaatactggcagaaacaggtaagacgccttttttggacgcttacgggataggaatagtatatccaaaagtactttatctacaaaaatatgaaatacgaaattaaaatctgtgacgaagaattcttagttaatcgtgctcaggaattctcggatttatgtgtgaaagcatttgaagagcataaggacagggatatccaaatgcccccttgttctatgactccttcaaaatggctggaatgtataaaaggctgtatttgtttttatattgaagacaacaatacaattatagccttcaaacttgtctgccctaatcacaatactaaaattgcagaaggaagaatcagtgccatcgctcctcaatataaaggtcaacattttggttataggctatctactgtatgtatggaaaaactacaagagatggggatgaatatctatgtaactggtacaagtatcaaagcaacacatgttattgcctttcacaagagttatggatgcaaggtggttggaatggcatcgtggcccaagacaaactattattcggtgtgctttcaaagggctctacgtcctgaatttgagataagcgatgaggaagccgaaagaagatttaaacgttcagcttggctctgcaaattgagatataacgaagatgggagcagaactgcatgtggagtggttttgtcttgtctcccacctgcattaataagatgtattaaacgattatttgtatagtaccggttgtatattacaagcattttttgaattctataactacacgaaaatataaatatatgatgaaaagaatactaaagaaggtattacccatatcttggtgcatcaagttgcataacttgcttttatatgtagaagcttgtttttttcgtatgttttgtggtaaagacacacaatgtactgctcattctctgcgttgtgaatcagacaaacattcaagaaactatcggtatgacgtattaggaggcaatatccctatatgctgcgcttcacatttagtggaattgatgttttggatagacaaggttttgcgatgccatggggtttcttatcatataaattacggaactctattgggagctgtcagacatcaaggaggcattatcccttgggatacagatgtggatattagtattgataagaatgatatgagtcatatttataatatactgacctcacaagcgcaagaaagcgggactccttatcgcatagcgatagaatatacagaactctatggagatgtgataaaaatgtttttttcacagacaaatactttgcatgtggatttgttctgttatacaataaacggaaatgaagtggactaccatgatttcaaggctgctaaagatgaaatattcccattgcgagaagtctctttttatggtagaaaagtttatgctcccaatactttgtctccactgaatatttattatggaacagactggaacaaacattattatgcacaatgggggttgtttacgaacaaaagaatgctgacagaagagaagcggactcctgcaataattgattataacttgattcatgaatattgaaatcaatggaaaagggtaggcagtctgtttctttagtcaagaactccatctataagggattactgaatattttcaacttgattgttcccatagtaactattccttatatatatagagtgctttcgccggaggctatggggaattttgaatatgccaatactttgttctgttatttcaatctttgtggagcattgggtatatatacttatggcataagggagataagtcgcataagagatgacagcgagaaagtgaatgaaatttattcgtccttattttccattggaatatttagtaatcttttcgtatgtggtatttttgtagcattagcatttggtgtctttcatgatacaccgctgtttcgcttaatgctggttttcagtttgagtataatagctaatattttttatacagaatggataaatgaggcattcgaagacttccgcttcattactataaaaacagctatcatacgtttgctctatgttgctgcaatttttcttgtaatcaaaacaccggatgatttatggaaatatgctgctttgattgtagtttccaactttttaaattatatatgtagctttatttattctaaacggtacactcatttcaaattactctctatccgtttttctcggtacgatttgcagaaatatcttcctgctttattctttatattaattttgaagaatagcaatatgttttatactgtactggaccgcataatgttaggtagctttgaaggcagtcaaagcgtagcctattattctgtggggcagcggataatggagatgatacgtgctttattgattacaataacctatgtgtctttaccccggctttcttattatctaagtaatgatgtctcgctctatcgggataatttgcaaaaattggttcgtgtgggctttttactgtctttacccttgtctgtgggtttatgcttgttgggcaaagatattgtgacattatttgccggtgagcaatatcttgcagccgtttatccacttagtgtgtttgctgtccgaatagtcactcttttaatagagaatattacagcgacacagatattgtttctgcacaacagagaaaaaatagtagtaattatcaatattgtatggggaataggaaatttagtttgcaattatttcttgtttcgttggggtgtactttcccctatgacagcaatactttcgactttatgtatggaatttggggtgcttgttactgaattctattatataaagcgatatttacatattcaagttttgatattctgtaaacagaccttacgatatttcttttttgcattattgtttgtccctgtaacatacggaattaaacactactcaacaaatgaatggttaagttttgcgctttctatcattagttgcataatgctatatagcttgtgtcttcatctatcgaaagatgagatttttcaaacgatagttcaaaaagttaagaatatagttgtctctccgtttatgttgcgtagttaatcggacttgacctttaagacttttctgtgatattaattgaataaacatactaaaacaatgaaagatttcagctttatctatcgattggcagatagattccatgcaaataaggtattacgtttcctatttttgaagccgtatagaaaatataaatatcatgtatctttatataaaaagaaagcatttcatgagcgtgctcatacggtattgacactcttttatgaggcattgaaagatattgattgtttatgttggcttgattttggtactctaatcggagctgtccgtgaaaacggttttattgcacacgatgatgatattgatgtgggtatgtttctaaaagatcgccccaagaatttagagaaacatctggcaagacatggcttcaaaagaagtcgccatattatggtagatgatggtcaagaagctttggaggaaacttatacattgcaaggagtttctattgatattttctattttcatctatcagaatatggcaataagatgtattgttatgaatttgtgacagatccagatagattgccacgtgagtttatggatgaggtgggaggtttttggactatgaaagatacgtttccatatcaagggtttagtaatcacagtttcttaggacttacagtgaaaattccatcgaattatgatgaacatctgaaagcacattatgggaattatatggaacctgattctgattgggattcatttttcaaagcacaaaatacagcattaatgaaagataaaataggtacattaatttggaaataagattccaaaaggctggaaaaatgagaacatacatcatcaatttaaagcgttctgtagatagacgaatctacatggaaggacaatgccgaaaacttccatttttgaatgtagagtatattaatgctgtggacgggaggaacatgagtccggacgaacggacagcagcgtttgatgaaaaggaatttgagaagcgctactcggtaaaagtccgtccgggcgaaataggctgtacgctcagccaccagaaatgctataagaagattgtggaggaacgtcttccgtatgcccttatattggaagatgatatttctttgtctgtggatattaaagccgcattggaaaaaataggagagatgatgcagacagacattcctacggttgttttattgtcggggtggtattggtatggcaatataactcatctggaaggagagtacaagctggctaatgtgtatgatgctttcttgactcactcgtatgtgataaacctcgctgcggcaaagcttttgatagagacacgcccttatatcactgcggatgactggtattacatccgtcataaaggtgtgaaactgcaagctgttttaccacacctgataaatcagctatgggatggtgatttgacaaccactgtcaatgtagagccaggcagaaataaaagtctgaaatggaaattactcaatttaccacgtttgtcaacaatgaagtttttaaagtttataggacattttgaagaagcataatatgattaaggtatccgttatcattccggtttataatgtagaaaaatatatagagcattgtgcacgttctttaatggaacaaacattaatggatatagaatatatttttgtagatgattgtactcccgatcacagtatggaaattcttcaacgggttctgacagattatcctgaacggctggaaaacatacggataattcatcacacacagaattccggttcagcagctgtaagaaatacgggattacagatagcccaaggagagtatatcatacattgtgacagtgacgattgggttgaaccggatatgtataaggcaatgtatgccaaagctaaagaaacggatgcggacattgtagttacagatttttattatgaatgcgcagaccacacttctattcaagagcaaaactatccggacaatcctttgttttgtgtaaaaaaaatgttggctggagagttacactgtggtacttggaataaattggtcagaaaagcaatttatgtagagaataatatatcttttcctgatggtgtgaatatgtgggaggatgtattgacaaccatctcgctttgcttccattctgcgaaaattgtgtatttgcctaaagcttattatcattatgtacagttcaatgcaaactcatatacgcaacgtatgtctgaaaaatctctccgaaaccagatagaagcaataaaaaggcttgaaatctttttatacgataatgatttagaagaactgaatcatgagctgtgttatatgaaattgactgtaagactatgtctgttgttaaatagcaaaggggaacaacaaaaaaaatggagtgatttatatccggaagcaaatgcttgtatattgacctataaagaaatgtccggttattggcgtatcgcattgaaactcgcatcttggaggatgctttttgcgtttaatgtgatggcttacgggagtagatggataaagatttgtttggctaaagtttatgcttgaatttaaaaagatagttactctgaaagagatagcatgtgtggctactgtattttgctatgttttttcattttatataatcggtcccatcaccagttctgtcattatagccgtcccttttctttatctttacctgcatgacaaggcttatttccatcaagatgtttactcggtacgtactttatcatttcttaccctcattatttttgcaggattagcatatagtgctttacatgtcacttttgactattcttatgtgaaaacaatgttcggacagatgattcatttatcaatgggtatcgttattgtgaccgagttgagaagacgctatcatataactgcttttgacattgagaaatatattgtatatgcatttttcgtacagtccattatagaaatagtagcttcggttacccctccttttgcctcggctttgctgcctttcaatagggcttatgaattgcaaacaaatgaagcgggaagacggggactggcattggcagcgggaaccgggtggagtttggggcttgcctttggattgctatatattatttatgtaaaaagatatttgttggatggaatcaatgtatataaaatcataacaggggttgttcttttggcaggaacaatgtttgccggcaggactggctttgtcggtgcactgtttggtgtcattctgttttttctaaatgccaatcgtggaggaatttacaagatacttataataataaagatacttctgtttatagtggttacttgtctattattttatattttattccctgctatatccatacacttggtcgagaatgtgtttcccttcgctttcgagcccttttataagctattttataatgatgagttttctaccggttctacggatcgattgcaagaaatgtgggaggtaactattactcctatagaagtgctaatcggtaccggatattttacagatccattgactggttcctattataaacatatagacatcggcgttatgcgtaatttgttttattggggtattgtaggatatatggtgctgattttatatcaactttttcttttgagcccgataaaagtaatatctgaggataaaaagtataagtggaatgtaacaatatacagattgtgtttaactacttatttatttttgatggaatttaaagccatgactatcggctttaataagatggctgtttccatcgtatttttattgggctatttttattattgcgaatatcaggaacagaaacatgaatccttcttctctcgaagaagataattaataactgtgttcgtcaaaatagggactaatctttattctttctcatgaatctccttatttcaattattatcccatgctataatagcgagcgtttcattgctcctactgttgagatgctgatccggcaaaatatatcagactgtgagttgatattggtaaacgatggttcgaaagacaatacgttatccatcttgcaacaatatgaagcaacttatgaaaatatccgtgtgatagaccaacctaatcaaggggtatctgttgcccgcaataatggtatgcttgcagcacgaggtaagtatatctattttttggatagcgatgatacactgaccgatggaaccctcagctattttaagcaagtggtgacggaacattccgattgcaaaatgtttctatttggttatgaaacgcgtagaaatggtatattatgcaagagctatgtattccctaaatttaatgggttgactctctccggacctatattacaacataatttcttgtcaaagaaattatgttgtcatatatgcagttgcatatatgacaaggcttttatattagaaaacgaattaacactgaaaccgggactcaaaataggagaagatgtactttttcttatgcaattaatgttcaaggttgataaagtatattactcggcaagactctcttttatttaccagatacgggatgattcggtaatgcagggatataaatcatatagcaatgctcaatacgaagcgtatacggaacaacgaaattttttacttcccattgcaaaccaagataattctatccgtaaatacataaatttctttttactattttcttacgtttccaatttgcggtattatttatgttccaatgtgaagagcaaagaactgaatgcgcgtttcatctctgatggaactattcgttataggaaaaattttatagggaacattccctacgggattgttatgaaaatggtgatgtttgtacccgtcagattaatcttaaaattactgaaatagtgatgtttgatattgtacatgtgtcataaaacacaagtatctgaaaaagtcgaatttataaaattatttttgatggtttcaattattattcctacttataattcttctttttttatttcccaagctatcgagtccgtattggtacaaacatataaggattgggaagcattagtaattgatgattgttccacagatgattcggccaatatcataaagtcttattgtcagaaagatgagcgtattaagtatttaaaaacagaatatgcttcaggctctcctacattaccacggaatattggaataaagaattcgcagggacgctatattgcttttttagatagtgatgatatatggttacccaataagttagaaacacaattgcatctgtttagtgacaataaaacagccattgtctattctaattatgaaaagattgcagaaaatggacaacgtaatagccgaattgtagtagcgccttttacaatggattatcaacatctacttttaggaaatgtaataggttgcttgactgcaatttacgatacggaaaaagttggaaaagtatatttttcagattatccgcatgaagattatataatgtggctctctatattgaagaaaggatatatagctcggaatacgaatacagtgactgcattatatcgtgtaagatataactctgtttcatcaaataaactaaaagtaatttcatggcaatgggaaatttatagaagtgtggaaaagttaggatattggaaatctgtacttttttttattagttatgcctataaagcatttaggaaatcgttagtttaaataagtcttgattttcacactgcttaagaatcatctgtttaaataatattttagggatattttatagtctctgccttacttgataatcgttgcataaagtacatctaagaggttttaaagtgttttcgactacccgctaaagaattaactattaagtattgtaaatcatatatggaaattattgaaaacgacagccatttcatccccgatggcatgaatggcttcgaacgcaatgtaaagcgtataatggactgctttcttgcattttgtgcccttatcgtattctcacctctgttcctgttctgctacattgccgtgaagcgcgaggacggaggaccggctattttcaagcaagaacgtataggtagattcgggcgtcctttctacatctataaattccgtagcatgacgacggatgccgagaagcatggtcctgccttgtacaacaccggtggtgaccatcgactgaccaagataggacgtttcctgcgcgaccatcatttggacgaacttccccagttgtggaacgtgtttcgcggtgacatggcttttatcggtcctcgtcccgagcggaaattctatatagaccagattatggaaaaagatccccgataccgttatctctatcagatccgtccgggagtgacttcgtatgccaccctttacaatggctataccaatacgttggagaagatgctccgccgtttgcggtatgacttgttttacctggagcaccgctcttggggatttgacttcaagatactttttatgacgttcatgaggataacgtttgggaagaaattctaagaaatagtttataattgaacattgatgaaagaaagatatggacgtaaactataaaattattgatacccggcgtattatggattatatatcttcttgcccggaggctgttctcgtagaggatataatccgtcactctggtgctgataagttacgtgtctatcccgctctattcgagttggagcaaagcggatggctggaagtgacggagagggaggaactgggcgcccccatgatggtgcgtcagcaaagataatgacaggtaacagcggttactgttttaggcggcagccgggattgcttcgaaagaggtggttccggctgcttttgttcactgcttgatgcttcatgaaaatatagtaaattgcattttggtttctgagaacatgaagcacttggaaaaaaatcttatctttgcacgcgaataaataaatatcttataccaaaatgaatacacagactacttatcttgcctcgaaaccgcattatgagattcttgacggacttcgtggcgtggcggctgtcatggttattatcttccatctttttgaagcacatgcaggcggcagtcatcttactcaaattatcaatcatggctatctggcagtggatttctttttcatgctttccggttttgttatcggttatgcttatgatgaccgttggaaccggatgaccgtgggcactttcttcaaacgccgtatcattcgcctgcatcctatggtgattatgggaagcattgtgggcgctgcctttttctattttcaggagtcgccttgttttccacctatcgagaatacgtccgttggaaccatgctgctggtaatgttactgggctgtactttgcttccccttccgctgaagtttgacattcgtggctggacggaaatgcatccgttgaatggcccggcgtggtcgctctattatgaatatatcggtaatattctgtatgcgttgtttgtacgcaagttcaataaggtggccctgtcggtgctggtatttgtggcagggtgttttacggtataccgttgtctgactgctcctgccggcgatattgtgggtggttgggccttgaactgggaacagcagtatgtgggtatggtccggctgatgtatccgtttttcggcggattacttctgtcacgcctcggctggctgatacggcttgaaaagcgtgctttctggtggtgcagcctgctgattgtggtggttctttccattccccgtatcggaggtgaggacggctactggatgaacgggctttacgaggctttctgcattatctgcgtcttcccggtcattgtttcaatgggagcgggcggcaaggtgaccggtaagcgctctactgccgtatgcaagttcctgggagacatttcctatccgatttatattacccattatccattggtatatacttatacggcttgggtatgcaacaataacgctacaatggtggaaggtatcccttatatgatacttactttcgtgggagccgttgtccttgcttatgcttgtttgaaactctatgatgaaccggtgcgcaggtggttgacagaccgttttctgaaagggaaaaagaaatagttccgcatagctatggatataaaaaatctcccgttgcattatcttgtgcagcgggagattttctttttaatggtcgggcgttattttacgtcgatgaatttcttggccttttctttttctgcttctgtaaacttaggcaatgtaatgttcaacacgccgttttctacatgggcaccaatcttttccttatcgacatcgtccggaagaatcatggtttgctggaacttggtgtatgagaattcgcggcgcaagtagcggccttccttcttttcgtccttgttgttctcttccttgctttctgttttcttttccatgctgatgaccaggttgttttcttcgtcgatgtgaacgttgaagtcttcttttgtcataccgggagcagccaattcaactttgtactcttttgctgtttcgaatacattgatggcaggggcggtggcatttgcttttaccatccaatcattgtcaaagaaatcattaaaaatactcggtaaccaattttggtttcttcttacaggcatcatagttatagtctcctattgtttaagttaaacatgctatttagttttgaactccggttctttgtcttcgggtgtctgccttttgggcttttcaccgtccgtttcttgaaccgtcgttcgctaactatattgcaaaccttatgccaaccggtttttgttgactctattgactatttgtcattaaaaatctgacttatttgcttgtttaatgccattttgctatcttatttatttaaaattgatagatttttagactaatttaaaacgcattctccaacgcttggcttcttcgttccaatcgtggctgatgattttgaaggttccgatttctgatgtgttttctacatgtactccaatgcagagacattcgtcgtaatcgcctactttcacgacacgtaccgtttccgaagcatcatcgggcaggcgttccaagtcgaagcgtccttgagcttcctcttgcgtaatgaattctgttgtgatgggcagctgtcgggcgattacctcgtttacgacctcttccagcttctttatttcttcttccgtggggcaggcggcaagacggtagtccagcttgcttttcttccgttctatgtgtgctgatatggagcggccgcaaccgaataaccttatcatggtttggttgatgatgtgctccgttgtatgcataggtgcgattgacacatcctgaaacttgggacttggtttatttatttctatatttgtttccatattaattgatattgatgtaattaacagcgcaaagataatgaataatatggataagaaggtactaatctattgtcgtgttagtacgcaacaacagacaactgatagacaaaaagaggaattgttgaagtttgcagcagaaaaccattggaacgttgaagaagaggatattttcatagatgttattagtggttttaaaaagagagagttccgtcctgaatatgtgaagatgcttgaaagagtcgaatatggggatattgatataattttattctctgaattttctcgtcttgcaagaaatgctacggagttattagaacaaatcaaattgtttatagataaaggtattaacttgtattttgataaacaaaaattgtgggtaagagatagtaataaagatgtaggtagtattattttattgcatgtgcttgctgttatgtcaagctatgagatagaattgtttgttgaacgttcattaagtggcaagataacaaaagttcaagcaggtcatggaggtggggatgaacgtgcgtatggttatatgcacaatgaaaataaacagattgttataaatcctatcgaaagtaagattgttgcccgtatttttgaaatgtatgttggtggatattcttcaattcaaatatcagagatattgaatgctgagaaagtacctgctccatacgtaaggaaattgaatgagtacaagaagaatagagaagcaaaaggattggaggtgaaagagtacaaatttgatacagataatttaaaatggcgtatttctacaataaacagacttatgcacaatgagttatataaaggaaatcgtagaataacattttataaaccagaccctaccaatccacttccgttatccgaaaggcaagatagagagattgtttatgaatattcggaacatgtggaaagtctgcgaattgtatcagacgagttgtttcagcaagcccaagataaactttccaaagcgcattataataagaataatgcagtcaggcatgagaatttattgaaacatttaatggtatgtggcgaatgcggtgctaatttttctgtagggaaatcaaatgaaacatctaaaaattatatcagtggtggacgtacttacaaatgttatggtagagtgaatcgtaaagataaaccacgaacatgcacgaatggggcagaacttcgacaatggaaattggatggacttgttttacagttgtcaattcaaatgtttgctgagattaatattcagcagaccaatattttaaagatagaaaatttagggaaagaaatcgaagagttggttcaaataaaatcatcaaagaatacagaattggttgaagcggagaatctttataaaaagacacttaaacgtcttattgcgattgaagacgatgaggttgcaaagaatttgatttcagatgcaaaacataaatatgatgaaactaaaaacgtgttgaacaaaactatggataaattgtcacgagaaatcacaacaaagagaattactattgataatttgaagcgtttgaatgccaatcctttgttgattaataaaatggatgagattaggaaaaatagggatttggtaaagactatggttgatgaatatattgataaaattactatatttcgtttacatgaactttggttattggtcgtagtatcttataaaggaggtgaggagatgtggggaacaattaaatgcgctcgttataaaaaggaggagatgttttatgatgaattgcattgtcattatggtgttgaatttcaggggtggttacttaataatacggaacattgtttttcgtatgataaaagtacacgtattattacttatcatggtggaagtaaaatatatgtggagtttaaatcaggtgagtatgattatgatacatttaatcaaatgatacaagcaacaggatggatgggatgtttccctttttatgcttatgaagatagtggtaaagatttaagcgtaccttctaatgaagattttggaaaatctttacaagaaaacagaactgattggaaagcacacaatgacaaggtcttggaacgtttattatccaagtcataaataataatattcctaccaccgtaacccctcactcagggggaggattttgtagtcccccccttatagtttgtaacgggtggatttctatagtggaatcctatcctgctattgccgaaatagggttatacagatataagccaacagtatttttagttgattgattattttttatattggttggaatgttgttttctttacaccattcatataatttactttttcctacttttaaattcagttctttaaaagttgatagattttcttttagggatttggaacaatcataatataagccaattaattcattattgattttcccttttaccatatttcgtacagtcttagctgaaagattgtatttaatgcaatattgagggtttattatccattttcttttttctgtctgctgttgtttaattattgttgagtatttgtcaatgttttcattgtatacattttctgcgatatcatataattcttgtttgcttattgggtccttgctgttgttgatgtagtagtatagttcgttggctaaacagtgcagtaaatgttcaaattcaatttgtgggtacatatatttgcgtactatagcatttaaaaagagtttttttctacgcccgttcccgtctttaattttacatactctgttggagtaaacacaattaccattatcaagttttgttttttccttgaaccaatatcttttgatacagcaatagttttcaggtattgtaatatatggaatatcttcattggcttcttccaaattattttcaaagaatggatatttttctctgtatttttctattaagtctttatgggaaaggttccaaaaattggtaatatattcatggtcctttatttcaacaacaactttatctctcttttccatttgtaactgtatattgtatggtgttggcttttcttttatactgttagaaatggaaatgtcatcataactataaatgataagattgtttataagtttacaatttgcgtagctccctaaataaaattggtagattgctctattatgattatctaattctatatttgttataatattatcatatagtatctgatattgattttgatttagtggtgtattgaaaatgtatagaagtctatatctgtttcctttagtaatatgtgaaaatgtggtatacgcaatgcttggctgatatttcaatgttactaataattcattgaatgataataatgtattatcaatatcgaatactattatgttagtatgtaaagccctttctttcttcttataaccaaagagggattttatttccttgtcgatatatgtgcaagagaatatatatccttgttttataaattgctccaattcagaaatagtaacttccttttcttcaaaggatattttgttgtagtctttactggtaggtttttctgtgtaaccattgacggaaatcatcagtttaaaagagaatttttcatttttgtacatgttaaggttgatattattgtgtgacttgtacgtgtcacttatttaggatgttaaggtttgatagttgaacaaaggaagcaatgcaaccttaacaaaccattacttccaagtatgcctactttcaactatataatataagtatattttgtttatgcaaatatacgactttctaatatctattaccaccttttaataagaaattttgcctgaaaagccctcaaaaagtacaagtatggtataaagtgtcttattattatctgatttttgcgaggtattatcaatttattgtaatacaatgtgttatatgaaatataagtgactggatatatatccgaatgttaggtagcacactgtttgctatttattttttgcccctattccccgatttagacaaaagggttccttttcgaatgatgcactttgagttttgaaaagttttttcgttggataatccgtaatttcgtaaagaaccgtaggaaatcccaagtatatcaggcgaaaaatattcaaaaacattggctatgcttccgaaatagtggtgggtgtcgttctcttttatataaagatgaattactgtccgttctttcttctctttttcttccataatgcaatagtttttttgcaaaaatagtaattgtgtgacataaaatgaataaatgtcatatttttaactatttctagtgtaaataaattgcatgtattaaatatatgtcatatctttgcgctgtgattaaaacgaagacgatatgaaacggtataataaaagacaagtgatgaaagatgctcatagactttacaataacgattttcaacgcaggggacgttcttggtcggagtgtcttagagcagcttggagttgggaacgggatgcagtcaaagttttcgaagaaaaagcagcaaggcttgatgcaatgatagccgcaagttggaaagcgcacaacgaaagaaaagaagccaagacaaatgagaattggtataaaggaattgattcagaaactctttcttatgcaatgggatatggaagaggtaacaatttctattgtggtgactaattaaaagagttttttaatattcactaatataacttttgaatataagttgattgtcaatgctttaataataaatgggttcgtgttagattcaaaaacaatagatttcaattaaaaaagaatattatgagcttaaaaaatagttatgttacttctgactatatggaatgggattcaatgttatcgctagttcacaaactatatagggataaggaatatcgtttgtcattgttaataggctgtggtagcttctttgggttacgtatatcagacattctcgctcttacatggtctatgttattagatgatgaaaagtttgttatcattgaaaagaagacaggtaagagacgggaaataaaagtcaattccaatttccaaaagcatattgcagactgtttcaaggctttggatatagtagataaagatgaaaaatgttttgttagtcgaaaaaaaacagtgtatagtacgcaacgaattaatgtgttatttaaatcaataaaaattaaatatggattgaagatagaacatttttccacccactcgatgagaaaaacatttggtaggaaggttgtagagaccgctggggaaaactcggaatttgctcttatcaaactatcggaattatttaatcatgccgatattcaaacgacaaggcgttatttaggattaagaacagaagagttgttagaaacgtatgatatgctcagtttttaaatctgtattttttaaaatccaaatccgatattaagataaaatcccagtttgttagtcctattggagtaacatataaatccctctataggtcccaatggactatcgtagccatatccaatacttgtcccatatatttttttgccttgaaggaaattggaaaactgattttgatggatggcataatttcctgataaggtaaggtattgcttttcgtgaaatttatgtcttacttggatttgtgcatttcccaataattttagggtggattctgtatgagtcagccctgaaaaaggtatttgttgctcgtaatgtggattatatccttctccaccgataacattgctgtacataaacggaataccatcattgaaaataaatcttccgtatattgtcggtataataaatgtatttagtgtgattggaaatatcttggtgacttgggcagcaagtgatgagtatgcagtgttagtatgcaaattggtatatattgtataagaaatattagttttcaaacctttagtaggaaaatatcttttgtctaaagtttcatatttcaattttgtatgataattaagaaataaattctttcgtttcattagtgttgcatcttcacttaccaatgttctataataccgatggtaatctaatgaagctccaacttccatttgaagatttcttgaaggtataatagagtaaatcagactgctagtattccgtataaaggttggattagatattttgtgtccatgactgtataaaaatatatcattgtaaccaatttgatttgaaagtgttatccattgtggttttgatataggaagatgatattgggttctgagaaaagattgttttcctcctcttgccactatttcggctttcccgattttctgtttattcaaattgatattaagaatcactgctgcaatatcctcgctatcgaatcttagtccaattcttagttgattatcattgcttggagcatattgcggataaaacaaggggaatttggttttattgttttttttattatttactatgcctaccctattcttgattgataataatgtgttgtaattggcttttgcggcattttctcctcttataatgagagtgtctattgcggcttttgtaaaacttgcagcattatagttttctacatcaacttttatataagcatctatatccttagtactttcatcaagcgatgattgacaaatcattaacataagctgattggctatccctgcaatggaatgcaagttatccgcatctgataattcagattgtacatcaatgccaataataatatctgctcccatagctttgacaacatcaattggtagattgtctttaaatcctccgtcaattaaaactttttgtcctgaatatatcggtgaaaaaacaacgggaacagccatacttgcacgcattgcctctgaaagtttgccaaagcggatgacctctttttgattttttaccatatctgtggcaatacatgcaaaaggaattggaaggctatcgaaattagttacattttgatagccttctgtaagttgatgtaataactgtgatatgttcttcccttttattatacctccattctttccactattgttgataggaaatgatataaggtatttactgtcatcggatttaaacggaaaaggaatttctttgcgtgaaactttatcggtaagtaggtctatccagtctgtttgtttcactattgtttctaattgttcggatgtataacctatagaatataatccgccaataatagctccgatgcttgttcctgcaatataatcaataggtatatttaattcttcaagagcctttattactccaatatgcgcaacccctttagcaccaccaccacttaaaacgatacctaccttttttcgtggtgatgtgtagactaaagagaatggtaatattaataaaataagtgcaagtgcaattttattcataggaataatgaagccgcatttaatagttatacttgtgtgtaactactcaatttaaagttgtttattctattgattaaatatttatggatgttggaaaggtaacactaccgttcaaaacaatactctttgaacccgatttgcatttataatccttaaatacaagtgtaactctgaaattttccaaatcccatttttcaattgtaacagtaccagaaacatactctttttcagaggaataccattcttcaagttttactaaagcaattgacattttgcaacccttggttacatctttccccgttgttagctcttcacgatagtcaatgttaccttgaatataaaaatcggatgttgcatcatttacccaaaattcaaacatactattcgctattgctttaccttcgagatttgtaatcttgacagcacttccatttactgttagtgttgatgtgaattctgttttttcattatcatcatcgcttgaacagcttgttacgaaaattgccattaataaaatggtcaataaaaaaatggttttctttttcatttttcttttttttagttaaacacttcttgtataattgagactgcaaagataatacacgtacatgtacgctcaaaatatttctgcaataatctttcctttacaaatttaaataattagcatatatgactaatatagaagaatttgtaatacaaaaggtaaaggcaatgaggatggaaagaaagtggtcacaagtagaattggcagattacatgaatctttcccctagttttattgcagatattgaaaaccccaaacgaagggcaaaatacaatctcaatcatttgaatgtattggctaaagtgtttagttgttctccgaaagactttttacccaatgctccattgaatgacgagtaataaatgctagtacaatcttatgcttatattcacaaatcttgatagtgaattttgttggattacatttgatatctgatatgatttagggtatatttctttgagaagcaaaaaatctcttcagaaaagaaaattattgattgggaatgattagttttgcatattgtttttgattataaaaaaatatgcatatgattgattttagaaagaaaatagcagtcggtactgcaattgtcaaaactaaccctattgaaatatatgatactcttgaccgtgcaagtgataagaatgcattgcggccagcgcaattagctgtattagaagactggtggaataattataaagataaaaaagatgttatattaaaattacatacaggacaagggaaaacattgcttgggttgcttattttgcagtctaagttaaacttaaaccaaggaccagttctttacttatgtccaacgtataatttggtaacacaaacatgtgaacaagctacacaatttggtatcaaatattgtactattggagcagataaaaatattccaatggatttttatgattcaaaatctattttaataacttcagtgcacaaattatttaatggattaacaaaatttggcttacgtaatcgctctgaatcggtaggtagtattgttctagatgattctcatgcatgtattgatgctattcaaaaggcttttacgattattataaaaaaagatgaagatggttatgaaaaagttctttctatttttgaaaacgagctagagaaacaaggattagggactttggaagatattaggttaggaaatcatgattcttttttgttggttccctattgggcttggcaagagaaagtaggtgagatggttaggcttttagctggtttacaagagaatttgaatgtgaaatttgcttggaatcttatcaaagatatagtaaaagattgccaatgttacatttcaggaagccatatcgaaatatctccttattgtaatccaatagaacaatttggaacattttcaagagctgctcatcgggtattaatgtctgctactactaatgatgattccttttttattaaaggattaggacttgataaagatgcgataaaagctccactgcaataccataaggaagcatggtctggtgaaaaaatgatattaattccttcgatgtttgatgaatccttaactcgttctagaataatagaagagtttgcacgacctttgaaaaatagaaagtatggtgtcatatctttagttccaagttttgcacattcagaatcttggaaagctcataatgcgagaatatctacagcgctgactatagatgaagatataagtgttttgaaaagtggaaattatgactttacaaatgtattagttaatagatatgatgggattgatttagctgataataattgtcgtattttgattattgattcaaagccatatgcagaaagtctttctgacagatatcaagagatgacacgtgttgatagtgaagctattcttattaaaattgcacaaaaaatagaacaaggattgggaagaggagtaagaggagaaagggattattgtgtcattatccttactggtgcagagctaattaacattattcaaaacaagcgaactaggagtttcttttcatcccaaacccaaactcagattcaaataggattggatataacaaagtactctaaagaagatgcttcattagatgataaaatgaaactgttgaacagcttaataatgcaatgtataaatagagatgaaggttggaagtatttttatataagtagaatgaatgatgcaccagttgtatctaaagaagaaagagttttgaatatactacaattagagaaggaagctgagttacagtataagtatggagagtgtcaaaaggctgttgatataattcaaagacttatagacacatatattaacgataatagcgaaaaaggatggtatatgcaagaaatggcacgctatttatattcaaaaaacaaagtagattcaaacaagaagcagattattgctcacaagttgaataattatttgttgaagccgcgtgaggggatggatttagttaacattagctttgtgaatcagaatcgaataaataatattatttcttgggtaaggcagtttgataatcatgatttattgatgatacaattagaggagactctcggaaatctccaatttggaattaaagcggacacttttgaaaggtctttgaatgaattagggcacattcttggttttatagtagagagacctgataaacaacgtggtgagggacctgataacttatggtgtgtgagggataatgattatatactttttgaatgtaaaaatgaagttaaagaacaaaggggggaaattaataaaactgagatggggcaaataaataattcttgcttatggtttgaaagagtatatcatgcagaatatattcctatattaattgcccccacaaataaagtgacttcggcaggcggatttcataaagcccaattagctattatgaaaaagaagcaattgcatagtctgatagataatacaagactgttttttaaagggatacgagaattagacattaacggtttatctcatgtggaaattcaaaagttattagatgcgaatcatttatctattgatgatttaaaaagcacttacgcggaaaagcctattcaaaaatagaaaactattttttttaggttattagccatcaaagtaatgaatgtgatttgtatatcaatattcacaaagaatagaaatgaatattaagaatgtatgcagattgctgattattagttgtttataggggctctgtgtgaaaacgtaatttgcaggcattcacttttatagtatattgtatatttgtgaatattaacttcctaataggtgttgataatactgaccttatttcctttattggcttatattttctaagcgagttgcgtaaaacaagtgcgtaaaagagtgcgtaaattgatttgcgtaagataagtgcgcaattatgattttttagtatatgatttaatgctctgtattatagttgattaattaaggatgtgttcatttcgactatatgcataggagggtactcctgcttgttgtggtcattgagatgaggttgttgttccatgtataatttcaatagttgatatataatttgatattttatcgtttgaggttggccagcacttcttctttcaagatgctgtatatatgtatgtctgtatattctccagaagccagcagttctccgcaacgttctgttccctcatggatgaaaccgaggcgaaccggtaccgcgttactggctgcattgcccacggcacagcgaatttgtatccgctttatctctttttcttgtacggcccacagacacagcttgcggacactttcagtaatgatgccccggtgctggtattccggcagtagccaatagccgagttctgtacggtggttgtcgaaatcggagaaatggaaacctatcagtccgcagatttcatgctgctggttccaaataccgaatataggttcatttcgttcggcaggagcagatagtacctgacgtaaaaaagcttcttcatcagctgttgtgcgcatattatccacaaatggcagccatgttcttaagtaatcccggtgtgtgtcgatggcatggtagatggctgcggcatcttctattctgatttcctgcagataaatgtccggaaggatggggaaggaaatgggagaggagaggatatgcacgtcccttgattgggaaagctgtatcctttccctgatttttccccaggcatgtgtatcgaacagacagctttcacgcatggtgtgatacatctccttgaaccgggacatggggatagtgaagctcaataagtccgcttcgaagtatgggcggacggaggggtcgaagaatcccaggaaagtgcgtttcccttgtttccggttttcaatgatggtttgggtaatgacggagcaacagccggagccgaatggggctgccacggcatccgatgcattgttgtcgaagaaggtccatgtcgccagtccggatagaatgtcgggagttggcaggaacagcagtccttccacttcatcaaaggaaggtatcttgtctatgcgggcaaaatgcagataggttttgtcagttctggaaatctgtagctcattgacaaaatctaccaccatttcgggagtcttcttgtatttctctttcaaggagacaaaacccgggacgcgctcgggcatttctgtaaatccggtatagaacttgcctcctccgcaggtgattgtttcgttgctgagactgacggttttgccgtctctgacttgtttcatgcatttgaagagacaaccggttactttctctgtagatgcccccattcggtctgaataccaaaaggcgatggggagttcggcgtgttggccgaaagcttcctgataattggcaataaatgtgtgtatattcatgatgctcggatgatattatgatatggtctttctttggattttccgtaaaggtaattcaatattttgattcttttgcttgcagtatgcctttttatcactctgctttcgagcttttaatgatagtagaataggtttttatggtattttaattacttttgcatgaggattctcaaaaagtattgcctttaactaatcggaaagccggatgaaaaatataatcatattcttgtgtctttgtaccatctgtatgtgccgccttcatgctgcagacagcagccgggcggattctttgctgctgaaactggaccaggcgataaaggagcgtcccatatatatggagcagaaggagctgaaactggtggaattgaaaagacagttgcatcggcagataccggatgaagaacgttttgccattcttggcacattgctggatgagtaccgttcgttcaatacggattctgcattgcacatggccgaggaaagggaacagatagccatacgtcttggaaaccgggaatacatagacaatgcccgcatgaataaagcagatgttttgggaatgaccggtatgtataaggaagttatggatttgatgcggaatatccatatagaccggttaccggtggatatccatccatattattaccatatctaccgtacggtctatggccttatggccgattatgccgtgacggcatatgaaaagaagctttatacggagcttacggacaaatatcgtgattcgttgctgttggtcaataaagataatcttctgatacataccttgattcagtccgaccagtataatgtacgcaatgaatatgacaaggccatccgtttgctgacggattatctggcgctgcagaaggactatgaacacgacgttgcgatttgtgcctatactttatcagagtcttaccggctgaaaggggacaaagagaaggaaaaggaatacctgattgtatctgctatggcggatatgaaaaccgctgtccgtgaatatatctctttacgcaagctcgccgtactgctttaccaggaaggagacatcgagcgtgcctattcttatgtaaagatatgtatggaagatgcagccgcctgcaatgcccggttgcgcaagctggagattctggaaatctttcctatcattaatgatgcttaccagcaaaagacggagaagcagcaggagcagatgaaatgggcactggtatctatcagcctgctttcactttttctgttgcttgccatattttatgtatacaagcagatgaagaaagtggctgccgcccgcagggaagtgattgacgccaacaaacggttgaaggagctgaatgatgagcttcacctttccaatgcacaactcaaggaggccaaccacagcattgccgaaaactcctatctgaaggaggagtatatcggccgttatatggaccagtgctcggtctatttggaaaagatggacaattaccgccggtcgctgggaaagattgccgctaccggaaatgtggaggaactctacaagaacatcaagtcttctaaattcatagagggggaattaaaggaattctataccaactttgataataccttcctgcagctgtttcctacttttgtagaagacttcaatgccctgcttgccgatgatgagcaaatatccttgaaagccggcgaacggatgaatacagagttgcgcatctttgcattgatacgtttgggtattactgacagcgtgaagatagcccagttccttcgatattctgttaccaccatttataactatcgtacgaaggttcgcaacaaggctgccggtgaccgcgacttgttggaacaggaagtgatgacaattggcaagtcgaagaactgagaataggggttttgaagcttggaagtgtctcttttacgcttatattttcactacttttttagttgggcaataattttatatattattggtatatagtggtttaagcctttttgaatgatgtaaaccactacttttttactctttcctccactattggcttctcttatctgatacatttgcattgttcctcttcggaaagagtgacacatgtgatttatgtttttattattaactttaaattcttatattatgcaaaagtacaaaatgccaatcagcaggctacggatgatggtttgtctgataggaatgttacttccgatgtgcatgttcgcacagcaaattacagtacaaggtgtagtgaaagaccagaccggtgaaacggttattggcgccagtgtaatggaaaaaggaaccacaaatgggacaataaccggtattgacggtgatttctctttgaacatgtctccgaacggtactcttgtcgtttcatttgtaggctataagactcaagaggtgcaggtgaagggacagaaacagcttcaggtagttttgtctgaagatgccgaaatgctggatgaagtggtggtgatagggtatggcaccatgaagaaaagcgaccttacaggagcagtgtcctccatcggtaacaaggatatcaaggattcccccgtatccaatttgggacaagccatccagggaaaaatctcaggtgtgcagattgtagatgccggtaaaccgggagacaatgtatccatcaagattcgtggtttgggttctatcaacaactgcgacccgctggtcgtgattgacggagtgcctaccgacttgggcttgtcttccttaaatatggccgatgtggaacgtttggatgtattgaaggatgcttcggccacagccatctacggttcccggggagctaatggagttgtgatgattaccaccaaacgcggtacggaaggaaaaggaaaacttgctgtatctgccaattactctttccagaatgctacgaacgtaccttctttattgaacgcggcgcagtatgccgagttgagtaatgacatgatggtgaacagtggacgcaatcctaatccggaatgggccaatccttctgaattgggtgcaggtaccgactggatggatgaattgctccgtacgggtgtgatgcagaactatacggtaagttattccggcggtaacgagaaatcccattattatgtgtccggtggttttctggatcagtccggtatcgtgaagagtgtgaattaccgtcgcttcacattccagtccaacagtgatgcgcaagtcttgaaatggttgaagttctccaataacattacgttcagtgccgatacgaagaagtcgggcagctataatataggtgatgcgctgaaagcgctccccatttatccggtgaagaatgaagatggcagttggagtggtcctgatggtaactcggaatggtatggcagcacgcgcaaccccattggaccgacggaactgaacaagagtcagactgatggatataacttcctggccaacctgacggcagaacttacttttaccaaatggcttaagtttaaaagtactttcggctatgatgccaaattctggttcatagacaactttacccccaagtataactggaaacccactcccacagaggagacttcacgttataagagcgataacaagtcgttcacttatttgtgggacaactatttcctattcgaccatacttttgcagaaaaacatcgtgtgggattgatggccggtatgtctgcccaatggaacaccaacgactacctgaatgcgcagaagaatgtgtttatgttcgacaatgtgcacgaaatggataatggcgaggaaatgtatgccatcggtggaaacgagacagagtgggcattgctctcttacatggcacgtgtcaactactcttacgaagaccgctatttgctgactgcaaccattcgtcgtgacggttccagccgtttcggtaagaaacatcgctggggtactttcccttccgtatctgtggcatggcgtgcctctcaggaaaagtggtttccaaaaaacgactatatcaatgacctgaaagtgcgtgcgggatacggtgtgaccggtagccaggcaagtgttggaaactacagctatctggcatcctacaatactagtgtatatcctttcggcatttcgagcggcaatcagacagcgctggtttcttctactctcgccaacccgtatatccattgggaagaggtggcacaaaccaacatcggttttgatgcctcactgttcaattcacgcgttatgttctcgttcgatgcttatctgaaggagacgagagacatgctggtaaaggcgtctatccccatcacatcgggatttgaagatactacaaccacgtataccaatgccggaaaagtacgtaatcaaggtattgaaatgagtctgcataccatcaatcttaccggtgaactgggatgggaaacgaacctgaccgccacttacaacaagaataaaattaaggatttgaacagcgacgttccttattacattaaccaaatcaataactcctatgtaacgatgctgacaaaggactatcccattaatgtcttctacggctatgttacggacggaatcttccagaaccagtctgaagtgaatacacatgccgtgcagccgggagctgagccgggtgatatccgtttcagggatttgaacaacgatggtgtcatcaatgatagtgaccgtaccgtcatcggtaacccgaacccaagttggctgttctccatgaacaatagcctttcctataagggtttcgaactttctgttttcttacaaggtatagccggaaataagatatacaatgccaacaatatcgacaataccggtatggcagctgcctataaccagactaccgacgtactgaagcgttggcaaggagaggggaccagcaattcgatgccgcgtgccgtgttcggcgaccccaatcagaatacacgcgtgtcggaccgctttgtggagaatggttcttatctgcgtttgaagaatatcacactttcatacactttcccgaagcagtggttacagaaagcccagattgagaatgcacgcctttccctatcttgtgagaatgtggctaccatcaccggatattccggtttcgaccctgaagtgggtattaacggaatagaccagaaccgttaccccatttcccgtacgttcagcttaggattaaactttaacttttaatgattgactcggatatgaaaaagataacaaatttactatatatgctggcagtattgctgctggcttcctgcagcgactttctggacaagtctcctaaaaatacggttgacccggaaacgacggtgaccgatgatgtggccattgctctgaccaatgcctgctatcgcacccttcagtcttccaatatgtacaaccagcgtatctggacactggatattgtggcgggtaacagtctggtgggtgccggtggcggtaccgacggccttgaaacgatacaagcttctaacttcataacgcagagcgacaatggcatggcattgtacatgtggcgttctccctgggtggggataggacaatgcaacattgtgttgaatagtcttctggaggctgaagccgtgtcagagaaaatcaagaaccgctgtctgggagaggcttattttctccgtgcacattattactatgtattggtacgtctgtacggtggtgttccactgcgtttggctccttataatccgggagaaccgacagacattgcacgcgctacagtcgaagagacttatgcccagataatttccgattgtaagaatgcggttgacctgcttcctgccaagtcttcttacgacgacgagaacgtgggacgtgcctgcaaagatgcagctttggccatgttggcagatatttatctgacgctggctcctaatcatacggaatattatcaggaggtgtctgatttgtgtgatgagataacaaatttggggtatgacctttcttcctgcaagtatgaggacaatttcgatgcattggtcaataacgggccggaatctttgttcgaggtccagtattcgggcaatacggaatatgatttttggggaaacaatccgcagtcttcctggctttctactttcatgggtccccgtaattcggactttgttgccggcagttatggctggaaccagcctacagaagaatttgtgggtcaatatgagagcggtgacaaacgtaaggatttgaccgtgctttatgccggatgtccggattttgacggtaaggcttacaaaagctcttattccaatacgggatacaatgtacgcaagtttctggtgtcgaaaacggtttctccggaatacaataccaatcctgccaacttcgtgatttatcgttatgcggacgtcctgctgaagaaggccgaagctttgaatgaaatgggacgccctgaccaggctgccgtgcctttgaatattgtacgtaagcgtgccggactgccggaggtttcgggcttgtcacaggaaaccatgcgtgaaaagattatccatgagcgccgcatggaactagctttcgaagggcatcgctggttcgacatgattcgtgtcaacaatggagagtatgccattaaattcctgcattccattggaaagagcaacgtgaacaagaaccgcttgctgttccctattccgcagacggagatggatgctaataccttaatggtgcagaacccgggttattaattaatttaatcagaagaatatgaagaaatatatttcacaccttgtatttgccttactgggctgtgcagccttatctgcttgtgtagatgatgattacatggaattggataaaggacagaatgaacttgtactgacggccagcaagacggaagttgttttgaatgagcaggcacatgccgatgatgccctggagctttcctggactacgggaaccaattatgggacgggtaataaaatttcttatacgctggaattggccaagaccggcagtgattttgcagattcttatgtagctgtggagaatgccgtacaagaatactcatggaaaaagagcgtggaggaattgaatgacatcctgcgcaaccattttggggcaactgccggggagaacatttcgttggaagcgcgcttgacagctactgtaacggaacgggacgaaaaacaggtgtctaccactgctttcagtgttacagcctataaaccgctcacatccaccctttatctgataggtagtgccactccgggcggctggagtgccgatgatgcgacagagatgacccgcaaggacaatggtatctttacatggacgggccggcttgtggccggtgaatttaagttcatcacgaccttaggctcattcctgccctcttacaacaaaggaacagatggattgctggttcttcgtagcagtgatgaccagccggatgaaccttttgttgtcgaagaagaccataattacatcgtcgaggccaatctgtttaccggtgttcttacattgacccagacagagacgttggcacctgcctacgaccagctttattttgtgggtaacgctacggattggggattcgtgaagatgaaacaagatgtgctcgacccatacttgttccgcttcggcaagttctttgaagtgggcaaaggaggggaattcaagttcggaacctccgatggaagttgggagaacatgtataaggccaagaatgccgatgctgcttataccgatacagaagtggtgtttgtgaaagggttcgacccggacaataaatgggtgctgaaagacggggaatgcggcaaggcctacaagatttgcatggatatccgtagtggtaaggaacgcatgatgatgagcgaatttactccgtatgagatgatttatatggtaggtgatgctactccggccggttggacgattggtgatgctacgccgatgcagacaacggataatccgtatgtgtttacttggaaaggtacgctgaatgccggtgagttgaaatttacttgtgataagcaggaagattggaatggagcctggttcatgccggctgtagcagacaaacagcctgcaggagaaacagaaccgatgcttttccttgataaatcagacgaagcgttcaaagcgcaatatctggacgtgatggtaggcggcatcgaccagaagtggaagattacgacagcaggttcctatctgattactttgaatcagctggaagagacaatttcaatcgtgaaacaataggtatctacaatagatgaagaagatagtttatacaacactggtagccttgctgctggttgcatgcagcaaggagagtgatgataccggcagcggtaccggtggaggcggagagagtggaggggttacggaagtaaccccagtcacctcggacttgacggtcaacctcactaccgacaaggcatgttaccggccgggcgagagtgtttcttttacagctgacgcccttcctgccggagctaaaatccgctaccggacaatggacaaggttgtatcggagcaggctgctgccggtactacttggacttggactgctccggcaaccgattataccggttatctggtggatgtgtaccgtacgaaagagaatggaacagaggttattcttggtactattgccgtagatgtatccagtgactggacacgttttccacgttatggtttcgttgccacttttgatgcttcgaaaaagatggatggagtgatagagaaggagatggctttcctgaaccgttgccacattaacggagtacagtttcaggattggcacaacaagcatcattggccgttgggcggtacgcgtgagcatctggacgaggtctataaggacattgccaaccgggaggtctataccgaggtagtggagaagtatatctctacacaacacagcctgggcatgaagtccatgttttacaatctatgtttcggagctttggacgatgccgtttccgacggggtaaaggaagaatggtacatattcaagaacacgggacgcatggataaggattcgcatgacttgccctccagttggaaaagtaatatcttcctgctcaatcccgccaatacggaatggcaggcatatattgcccagaaaaacgatgatgtttatgccaatctggactttgacggttatcagatagaccaactgggaaaccggggtgaccgctatgactatgatggcaataaggtaaatctgcctaagggatatgcctcgttcatcgaagccatgaaacagaagcatccggacaagcgtttggtgatgaatgccgtctccagctatggagcttcccagatagctggtacgggtaaagtggatttcctttataatgaagtatggggcgatgaggcaggcttcaaggatctgcacaccattatcaaagcgaacgaccagtatggcaaccatgccttgaaaacggtgtttgccgcatatatgaactatgacaaggcaggtagcagtaccggtgagttcaatacaccgggtgtgctgctgacggatgctgtgatatttgctttgggaggctctcatttggaattgggtgaccacatgctatgccgcgagtactttccaagcacggctttgcagatgaacgatgtactgaaaacagccatgattcgttattatgactttatgacggcttatcagaacctgcttcgtgataaagatacggaggcggagatttccgtttctctgaactgtacggatgctgcgcggaatctttctctgaatgcatggccgccgcagaagtctgccatcactgtatatgccaagaatgtaaatggcaggcaagtcattcatctgctcaacttcctcaatgcggataacttaagctggagggatttgaacggaacaatgcccgaaccgcgtctggtgtccgacgtgccgttgaagatgaatgtttccggtaaagtgaacaagatatgggttgcatcgcccgatttccatgccggtgcttcgcaggaactgtcattcgaacagaaggacggcacggttacctttatcttgcccttgctgaagtactggagcatgcttgtgatggaataagagtatccaataaaggaacaaacagattatagtaatgaagaaatatatatttttattttttgccgtctgtgcattttcagtatatgcgaatgcacagaaccgcaccggagactgcacttcctataccagtgacgaccggagtgtgaccttctatttaaatgacagttctgccatacaattacgtctgtgtagccagtctacggtacgtatatggttttctcccgacggtagtttccagcggaataatccttcctttgccgtcgtcaatgaggacctggaggatgtcggtaccgtccatgtggacgaacagaatgcctgctacgagatttttacccctaaactccgtatccgggtaaacaagtctccgtttaacttacagatattcgacaagtatcagaaactgctgttcagtgattatgccgataaggggcatatcagtaacgggcagcgcaaattggaatacaagaccctccgtcgtgacgaacacttcttcggcttgggagaaaagaccggcaagctggaccgtcgcggcgaagcctacaagatgtggaacagtgacaagccttgttatagtgccgttgaggacccgctctacaagagtattccgttctttatgagcagttatcgttatggtattttcctggacaatacgtataaaaccgaatttaagtttggtacggaaagccgcgattactacagtttcgaggctcctgggggagagatgatttattatttcatcttcgggaaggattataaggaaatcatgaaacaatatgtcgacctaacgggaaaacccataatgcctcctaaatgggcattgggctttgcacaatgccggggactgctgacgagcgagaaattgtcttatgaaatagctgaaggctatcgtaagcgtggaattccttgtgatgttatttaccaggacataggctggacacagtatttgcaggattttgagtggcggaaagggaactacgagaatccgaaaaagatgcttgcagacctcaaggatatgggcttcaaggtggtggtttcgcaagatccggtcatttcacaagccaataagcggcaatgggaggaagccgataggttagggtatctggtaaaggactccaccaacggcaggagttatgacatgccctggccctggggtggtaattgtggagtagtggacttcacccttcctgctgtggcagactggtggggagcttatcagcagaagcccattgatgatggcattgccggtttctggactgatatgggtgaacctgcctggagcaatgaggagcagacggaacgcctggtgatgaaacaccatttgggcatgcatgatgagattcacaatgtttatggtcttacgtgggataaggtggtgaaggagcagtttgaaaaacggaatcctaaccgtcgcgtatttcagatgacacgtgccgcttttgcgggcttgcaacgctatactttcggctggaccggtgactgtggaaacggtgatgacgtgacgcagggctggggacagatggccaatcagattccggtactgttgtctgccggtttgggaattattccttttactacttgtgacattaccggttattgcggagatatagaggattatcctgcgatggctgaactttatacgcggtggatacagatgggcgctttcaatcccctgagccgcattcatcatgagggcaacgtggctgtggagccgtggctgttcggcgaagaggccgagaagaatgccaaggcagccatcgaattgaagtatcgtcttttgccttatatctatacgtatgcccgcgaagcacacgaaacggggttgcctctcatgcgaccgatgtttctggaatatccggcagatatggaaacgttctcaacggatgcccagttcatgtttggcagcgaactgctggttgctccggtggtaaagaaaggagcgcgaaacaagaatgtgtatcttcctgaaggaacttggattgactacaacaacaaacacacagcatatagcggtgagcaatggatgacggtggatgctcccctcaatactattcctatgtttgtaaagcagggaagtatcatgcctcaaatgccggtcatgaactatacggatgagaaaccggtctatccggttacgtttgagatatttcctgctgcagcgggcagtgaaactaccttctcgctttatgaagatgcaggaactgatttaggatatttgcgtggagagttcatgcgcactcctattacttgccagactaccgacacaggctatacgctgaaagtaggtacacggaccggtgagaaatatagcttacccggccaacgaaatctgatgttctgcatctatacggaacagatgccgaaaacagctttgctggacggtcagaaaatcaagaaaacgaatgtcggaaagctggaagaaaatcgggagacagagtttacgataactgcctggtgtcccgacaagaagcaggggacctgcctgctgaggttgccggatgatggaaaggaacatatcattgagtttatctattaacacaaaaaacatatcattattatgaagaaatttgtacttagcgcggctttgcttttttctgccctggcggggaatgctgaaggcatttcatccccttcgggcatggtgaagctggattttgaactgacaaaagacgggagaccagcctatcaggtggattataaaggggctcctgtcatcaatcccagtacgttgggattggaactgaaaggagctaccagcctgatggatggtttcaaagtagtaaggacttctacttccactttcgatgaaacctggcaaccggtgtggggggaaacaaaagatatccgcaaccactacaacgaattgctggtagaacttgaacaaccgtctaccactcgttttatgaatatccgttttcgggtatatgatgacggcgtgggattccgttatgagtttccgcaacagaagaatctggtttattttgtgataaaggaagagcattcccggtttgccatgaccggcgaccatactgcctggtggattccgggagattatgatacccaggaatatgattacacggagtccaaactctctgaaatccgtggactgctgcagggagctgtgagtgacaatgcatcacaaactgtcttttcgccgacgggtgtccagacttccatacagcttaaaacagctgatggagtgtaccttaacctgcacgaggcagccttggtagactactcttgcatgcatctcaacctggatgacaagaacctcgtttttgaatcctggctgactccggatgcccaaggaaataaagggtatatgcagtctccctgccatactccctggcgtacggtcatagtcagtgatgatgcccgcgagatactggcctccaatttgattctcaatctgaatgagccttgcaagtatgacgatacctcctggattaagccggtgaaatatgtcggcgtatggtgggaaatgattgcagggggaaagccctgggcatatacttttgacctcccttctgtgaaactggatgatacggactattccaaggtgaaaccgaacggcattcatccggccaacacggctaatgtgaagaagtacatagactttgctgccgaacacggttttgaccaggtattggtggagggttggaatacgggttgggaagactggttcggtaattccaaggattatgttttcgatttcgtgactccttatcccgattttgacatcaagtatctgaatgaatatgcccattccaagggcgtccgtctgatgatgcaccatgaaacatcggcttccgtccgtaactatgagcggcacatggaagctgcctaccgtctgatgaataaatatggatataattcggtaaagagtggctacgtaggcaatatgattccccgtggcgagcatcactatggacaatggatgaacaaccattacctatacgccgtgaccgaagctgccaaacacaagataatggtcaatgcccatgaagcggtacgtccgactggtttatgccgtacctatcccaatctgataggcaatgaatctgcccgaggcacggagtacgaggcttttgctggtaacaagcccttccacacaacggtacttccgtttacccgtttgcagggtggtccgatggactatacgcccggtatctttgaaatggacatcaataagttgaatccgaacagccatacgcatgccaatactaccttgacgcgtcagctggcactttatgtcactatgtacagccctctacaaatggctgccgaccttcctgagaattatgagcgtttcatggatgctttccagttcatcaaagatgtggctgtggattgggacgacagccgctatctggaagctgagccgggacgttacatcactgttgcccgtaaggcaaaaggtacgaatgactggtttatcggttgtaccagcagtgagcacggacatgcttcaactctgaaactggacttcctggatgcagacaagcagtatattgcaaccgtctatgccgatgcaaaagatgccgattataaaacaaatccgcaagcttatgttatccgtaaaggtatcgtttctcccaaaacggtcttgaaactgaaagctgcttccggtggtggctatgccatcagcatcatggaggtgaaagataaatctgtattgaagggactgaagaggctttccgggaatatctgatttacgggcataaaaaaaggagtaccgctgtactccaacctttgttaaccttaaatctaatactatgaaaaacacattgcaaagatacgtacttttgataaatctgcaaattatccaactaaaaaagtatgttttataacacttattagccgtttattcctttgcttctatttttgttaacaaaaaggatgcgaatgtgtcaaaagcacatgaagacttttataatgttataatattaggcgcggattacgcggaataatgcggattcaataaactaaatccgtgaaatctgcgtcatccgcgcctaaaataaagcgttaaagaaggttttgacacattccccttacccttttacttcctgatacataaatcttttaatgctcttctttgccgttttctcgaactcctcgaagtgtatcttgacttttgttatctggcagtaggccggtaattgcagattcaattcattccgattgtcctccataaccttttcgatgtccgattgttccataccatgggcgaatgcatcgtcaaaatccggatagataagagccacgagcttgtctttctgcaatacgatcagtgattcggacacatagggcatgttgttcagtttgctttcaatctcctcggggtagatgttctgaccactggctgtgagcaacatgtttttgctgcgtccgcggacagtgacatatccttcggtatccatcgttgcaaggtcgccggtgtgcagccagccgtttacatcgatgatttgggaagtcgcttcggcatttttgtaatagcccagcatcagattggcacctttacagattatttctcctgccacgttctgagggtcgggagagtctatctttacttccatgcggctggttgccttgccacaagaggccagtttcaatgtttcccagcggctggaacaaatgatggggccgcattccgtcattccgtatgcaatggtataggggaagcctatctgcttcaggaagcgttccacttcggcattgaacggtgctcctccgatgattatttcatcgaaattactgccgaatacttccattgcctttttgcgcatgtcggccttgattttatcgttgacaatgggcatccgcaacagcagcttgcctattttattgtctatccggggcaggatgtccttcttgataatcttctctacgataagcggtacacacgaaatgatccgtggcctgatttcggagaatgactgtgcaataatcttgggagacggcatacgggtaaggaaatacagatgggcgcctgcggaaaaaccgtatagaaaatcgtacaccataccaaatacatgtcccagaggcaacatggatacaatatggtcgcccggacgtacaggaagcatctcatggcaatatgcaacattggaccaaaggctgcgatagggaagcatgacccctttggaatatcccgtcgtgcccgaagtatagttgatgacagccagttcttcgggggattcctccttgcggtaactgatatgctcggggcggaaattcttggggaaacgtgtgccatagaggacgttgcgatgttcgaaagcctccatcagctgctcgttgcggcaaaccaccggagtgaagtccgtcagcagtacgatacccatcagcaggggcattgcctcttcattgaggttttcccatgcccggtcgccgacaaacagcagcttggcttcggaatggttgacgatgttgtggatattgtcggctttgaactcatgcagaatgggaacgatgacagctccataggtaaccgtcgccagaaaagcgactgcccagtgtgcactgttacgtccgcaaacggcaatcttgtcaccgggcctgatgccggcgctttccaatacgatatggaatttggctattttccgtgctacatctttgtattgcagtgtaattcctttgtagtctgtcagggcgttgcgatcccagtttttaataatgctttgttctatataatcgatgaacccttgttcttgttccattcagctgttgcacactttagttaaaactgcgcaaagataggtcttatagtgatgcaaagcaaatagtttccacttttttcttgccctgaaacggatagaaacttatctgtaattcttattccttgctattttccgaaataagaagcagcttgtcaccggcatgaagttttaatgttccgttcggaatgaggtactcatcgccacgttttacaatcatcaccagtgtgcctttgggcaggttcatgtctttcagggtgtctgcctgctccagcatttcttgtgtaatggtcatgtcgtgcaggttggagtcaatctcttcgggcagttcaactccgaaatcatttccggtcttttccagcggggtggagaggcccagcagccgggctacccaggagactgtggtaccctggatgatcagtgagacgatggttatgaaaaatacgatgttgaagatgacatgggcaccgggcacattagccaccacgggataggtggcaaagataatgggtactgcgccacgtaatcctacccacgatacgaatagccgtgacttgagggtgattctcttgccaaaaggcagcaggcagagaaaaacactgagagggcgtcccacgacaatcatgaagacgccgatgagcaatgccacgactgcaacttccagcatctcatgggggttgacaagcagaccgaggcagaggaacatgatgatttggaaaagccaggtcagtccatccataaaagtataaatctctttccggtgcatgattttgttattgcctaccatcattccggcgatatacacggccaggtaaccgttgcctttcagcaggtcggtgatggagaaggtgaagaatacaaaggacagcaacaggataggatagagtgcttggttgtctatattcagccggttcagcataaggatggccagctttccgaggaaataaccggttgcggcaccgacaatgaactgtatggcaaaagagcccaatatctggggaactcccattccggaggactggatgaattgaatcagcacgattgtcagcatatatgccatcgggtcgttactaccgctttccagttccagcatggggcgcagattatgcttcaggttcattttttgtgaacgcagaatggcgaatacagaggctgagtcggtagatgacatggtggatgcaagcaaaagggaggttatcaatggcaggtggatgttggtccagctcatgccggacagccaccagataaataatccggtaaagagggccgtgagcagcactcctgcagttgacaaaacaatgccgggagtcaatatgggctttatctccgtaaacttggtgtccatgccaccggagaacagaatgatgctgagtgcaaccatgccgatgaactgtgcttccttggcgttgtggaactgcaatcccaatccgtcactgccgaacagcataccgacgacaaggaaaagcaataacgcaggcactccgaaacggtagccggtcttgccgacaatgatgctgacgaaaagtaatatggaacctataagtagtatgtttcctgctgtaaatatcataaattctatgctatatagtttgaaatgtgatgtttcttatgtctaatagtacaaagatatgcaatgtgtttaacaaatacaaatctaaaatagttcaattgaattttaaaataaaggtggtttctttaccaggcaataaggataaatttccgccggaaagcctcattatttgccgggaaatactcaatccaataccgcttccgccctctttggtcgtaaagaaggggataaatatgtgttcggcaatgtcattgggaatggcaggtccgttgttggaaatttctatcagtatggcttccgcttcgttgcagtaggcacgtatgttgatatgtccttctttatctgtatttttatccgattcgatggcttgtatggcatttttcagtaggttgatgaccacttgtgataccaggttttcatcggcatatagaataaggtcgcttggcgcgatgtccgtatgaaaggtgacccggacatcggggtgctggtgacgggcgagttcgaccatccgctcgataaagctttttacgtagaacaaggatggttcgggggtgggaatacgggtgaatttccggtatgattccacaaaagagagcaggcccttgcctgtactgctgatagtctgcaggccgtttctgatttcttctttggaaacttgcgcttcggtcagtcccagcagtgtatcgctcagggaggttatgggagtgacggcattcattatttcgtgcgtcagtacgcgggtaagcctaatccaggaatctatttccttttcatccagctcgttgttgatgtcgttcaaggcgaggatgcgcagatgttctttacggactgtgatgtcgctgacgcggacagacatgttgacagtgcctcgctcgttgttgaaaggcatttgcaatttgtctcccgggcggcaattggcaagaagggacgaaagacgcggatccacgcggttcagctggctgacgtgggtaaagacattgaggcccagcaaacggagggcttcgctgtttttctgatatacggcaccattgtcgttcaggacaaggataccggtattcacgcagtccaggatgagttcgtagtatttttcttgctgggctgtttcacttttcacattataaagtatatgggcaacccggttcaatgcacggttcacgagtcgtgcgtcggcagtgttttccgtttcggagaagtggatggcattgtcgttgttttcgatggcgtcgagcatgaaaagcactttccgcacatgatggcggtatagcttctgctgccagtacaaggctatgggaagcagcgcggtacagagcgcgccccaaaatacgtctacagtccacatcacccctgcaaggagtgctactgccagactgacggcaacgcggaatgaataattaaaggccatacttcttcattttgttgtacaacgtctggcgggtgatacccagttgtgcggcgacggcagagagatttccgctacatttgtcgagcgtcttccgtatcatctgcatttccatttcttcgagcgtggatgcggctgcttcgggagtgccggttcgccgtgccagctggaacagttctgcaggaagggtttcgttgtcacagatgataatggctttttcgatggcatgttccagttcgcggatattgccgtaccaggggtggagcgtaagcttctcgcaggcgccgtccgtcagcttgacggggggcttgtcatattgcttgcagaagcgggcgatgaaaagttctgcaagggggatgatgtcttcgggccgctcgcgcaacgagggtatctcgaggtgtatcgtattgatgcggtacagcaagtcctcgcggaattcgccttttgccaccatctcgggcagattgcggtttgtggcgcaaatcagccgtatgtctacgggaatgggagtgttgctgcctacacggacaatgctgcggcgttggatggcggtcagcagtttggcttgcaggtggtaggggagattgcctatttcatcgagaaagagggtgctgcggctggctgcttcgaacttgccggcacggtcggcatgggcatcggtgaaagagcctttcacgtggccgaacagttcgctttcgaaaaggctttcggtgactgcacccatatccacacttaccatctcctgccggttgcgcggtgaaagggagtgaatttcgcgtgccagcatctctttaccggtaccgttctcgcccgtaataaggatattggcatcggtagaggccactttttccaccaagaggcgaagttgctgcatggcggggctgtttccccaatacatgttgcgggtatctgcaaacaggtggctgctttctgccgtacgtccggcatttgggccgttggccggagattttgtttcagaagctgatacggcattcagtaaggtttccaccagtttctgattgttccagggtttcacgacgaagtctgtggctccttccttgattccccgtacggcaaggtcaatgtcggcataagcggtaaacagcactacgggcagggtgggacatagcttctttatttcatggagccagtatagtccctcgttgccggtgttgatgcccgaggtgaagttcatgtcaagaagaaccacttgccatgacttttcccgcaatacgctgggcagggttacgggagagggaagtgtgattatcccttcaaaatatggctttaacaaaagctgcaaggcggtaagtacgcctcggttatcatcgacaatcaggatgtttccgtttttttttgccataaactatttctgttttctgcaggcaaagttaatgatttatctgtattatatgctttattctatatttttgcttactaagaattaatcgtccgacagctgttgaattatcgtccaacagttatcggacgataattcaacagctgtcggacgataatataacgattatgggacgaatagatttaagtaagatagaaattagtttgtagcaacttcagtaagagctcatggcggtactgaaaaaatttatagcagttgcagtttgatgccaaatgacaagctcagataatccttgggtttcagatacttgttggtgaaggcgctgactacatataggtcacatgtacttatttcatagaagaaagtgatttctttggccgtgaaccgtcgttgcgggtcgatgtcgtaagtgatgcgctgtcctaagaatgcatggatgcgtaccttagaggagaaaccataatatcctttagggtagcgttccggttcattgacccagaattcatcgccgaataccgtgttcagatacataccgcaagccagcggttctacagaaaaacggctctgttttatttgcaggctccagggaaggtagttctgcttgacggtgaatgtcagcttggtacgtttggagtcatatttgggcaatactccgaagaatacgtctgtttcccattggtttcttctgccgtaatcccatccggtaccgaatgacagcaaccccatattgccggcaaactgaattttggtgtgcgtcggaatcaaggcctcccaatgcctgcggtagcggtgtacgcggcggtcataacggttctctctggtctggctttcaatgacggcatccggttgcaggtccatccatacggtatcgtgttctatgatgaagatggtatctctctcttgtgaaaaagcagaaaaagagcataccgacaagaagacgacggcgcatgccaggtgattaataatatgccacttcgcgttcatatccgtcgggggttatggtgaatatatagtaattgcggttcttcatgcagtcgctcatgtaatacattatcccatcttcaaagaggtctttctcgaagcgatggtgttcgtgtgcggatgtacagaactgcagtccgggaaattccttgatgtaacgctggaatacgtgtgccacattattgttgaactcgttgcagaacgggcgtatgtgcatggacacaacggttttatcgaattcctcttcacggtcgcgtatctgtgcggcaagaaactcgaagtcgggaatggggcgggagtagtcaaattcgatggcgttggtattcaggcagacaaactttacccgtcctgcaatgaaggagaaattggggtctccgaatattgcacgataagtctcttcgcccgtgcccaggcagtcgtgattgccgagaagtaccacatagggtatcttgagtttgttcataatgtcccgttgccaaaggaactcgtctgttacaccgaagtcactgacgtctccgccatgaatgacgaaatctatgtcgtcccgcttgttgaggtggcttacaaagtcgtcggtctcgtcataccagcgctgggagtcccccattgttacgaatcggattgttgtcttgttctggcagttctgctctatttgggcaatgttgtgggcattgacatcggtttcaccgctgatgtgtacatcgtaagggtgataatctatcatgtcgcagccggctataagcaggcataggaatgaaggatataagagtttggggaatttcatgtgcaggtgcttcattttacgtttatactctatctttagaaaactgtgggcaaaggtaaagttttcattcttatggattcttttctaatttcccttttttttgttctatgaggctgaacagagattcggcctctgtctaatttttagacgggagtgtctaaaaattagacacctttgtcttcttctgaaatacgatatgcgctgataatcaggtttgtgcattctttggcacgctttctgcaatatgaaaagcaagaaaataaatctaataaacgataaacggaatgaaacaaatctattatgtaattcagactttactgcggggacgcggttcgaatatcatcaaggtcatttctttgggattgggattgacgatgagtattctgcttttctcccgcgtggcatatgaacagagttttgacacttgcttcaaggattatgataacttgtatcaggtatggtcgatattctcggtgaaaggagagaagtttgagcctcaggagtggaattgcggtcccgtggcaggggctattttggagaacttccccaaagaggtggagtcggcggtaagtttgagcacgtctatggtatctgctcctctttacaatggaagcgtgcgtcttgatgacaggaagattgcagccgattcgctgttcttccgtaccatgggtatcgacgtcctgaacgggaatcccgaaaaggatttggtgcagaaggatattattttcttgagtgaacgctttgcaaggaaagtgttcggtgaggagaatcctatagggaaaacgcttaattatgaccatcagtttgacctgacggtgaagggaatctatgccaatttgcctgagaacgccacaatcaatccggaagcggttatctcgatgcctaccttgtggagccgcaactggaataactactcgtggagcgggggagacagttgggtagagtttatccgtttccgtcccggtgccgacaaatctgttgtcaatgcgcgtattgatgccatgatagacaaatatcgcccggcagaagataagaaagagtacggttacacggcttttgtgcagcccatccgtgatacataccgcaattatgatgatgtgcagcggatgcgtgtcatcatgagcattcttggtctagctattcttttcattgcggcgttgaactatgtgctgatttccatttcctctttgagctaccgcgccaagtcggtaggcgtacataaatgcagcggtgcaagcggtggcacggttttcagcatgtttttgctggaaacgggtatcatcattgcggcggcattgctgctgatggtgcttataatgcttaacttccgcgattttgtggaagacacggtcgttgtaaagctctccaccttgttggctccggagcgtatctgggtaccgttgtcggtagtgcttctgttgtttatagtgggaggcgtgttgccgggccggctctttgcgcgtattcccgtatcgcaggtgttccgccgctatactgaggggaagaagggctggaagcgcccgttgctgtttgtgcagtttgcaggcgtggcattcatcagtggattgatgtgtgtggtgatgtcgcaatatcagtatgtactgaaaaaggatatggggtataatcccaagcagatagccataggcaatgcctactgggataatgaagcgacgcgtgacgcggcttatcaattcttcaagggattgccctacgtggaagcggtctccagtgccaacagtacgcccattagcggatatagcggttcgatgattcatagtgagagcgggcaggcacttttctcttgccgttcttcttatttcatgcgcgaggactttcctgctttgatgggcatgactatgaagacgggacgtatggcgcgcgataaagaggaagtcgtggtgaacgagacctttgccgagatgatgcgttggggagacgacgtcgtgggccgtacggtatataccgaagggaatacattcaaggtcgtagggcagttgaaggatttccagatagagagtttcagaaccgagaagatgcctttcatagcccggggaaacaagaatttttatggaacggtacatgtccgtttgaaagaaccctttaccgaaaatctgcagaagctgaaccacgatgtagccgaggctttccatgaccagactattgactttaccggctatgagaaaagaatagagaatagttataattctgtccgtgtattccgtaatgccactttgatggcggcagtgaccatgttcttcatcatgctgatggggctgattgggtataccaccgatgaggtgcgccgccgcagcaaggagattgccatccgtaaagtgaacggggcagaggcatccggcatcttggaaatgttgtcaagggatatactcgttgtggcagctccggcagttgtcatcggtacggtattggcatggtatgtcaacggaatgtggatggaacagtttgcggagcgtattcccatcagttgggcagtatacgtactggtagtgatggccaatttggtgattatcgtagcctgcgtactttggaagtcctggcagatagcgaacgagaacccggtaaacagcattaagagcgaatgataataatattaatacatagaatatcatgattgaaattaacaacatcagcaaagtattccgtacttcggaagtagagacagtagcattgaaccacgtcagcctcgatgtaaaggagggggagtttgtagccattatgggaccgtcaggttgcggcaagtccaccttgctgaacatcctcgggctgctggacaatcctacggagggcagttacaagctgctcggtcaggaagtagcggacttgaaggaaaaggaacgtacccgtgtgcgcaagggcaagctgggattcgtgttccagagcttcaacctgatagacgaactgaacgtctacgagaatgtggaacttccccttacgtacctcggcgtgaaggcaagtgagcgcaaacgcatggtagaggatattctgaagcggatgaacatcagccaccgtgccaaacacttcccgcaacagctttccggcggtcagcagcagcgtgtggcgatagcccgtgcggtcgtaaccaatcccaagctgatactcgccgatgagcctaccggtaacttggactccaagaacggagctgaggtgatgaatctgttgacagaactgaataaagagggtactacgattattatggtgacccacagccagcacgacgcctcgtttgcacaccgcacgatacatcttttcgacggtagtgtggtggcaagtgtggcagcgcaggatttgtaacagacttttaaaacaacttccatgagacaactatattacactcttcagacactgatacgaggaaaaggctccaacctcatcaagattatttccttgggactggggttggcagtcagtatcctcattttttcccgtcaggcattcgagctcaattatgatacctgctacaaggactatgagcgtttgtgtcttgtcaaaacagtatggcattacaacaacgagtatcatccttcgcatataactcttggaccggtggctggtaccattgccgaaaacctgcctgacgaggtggagagtgttaccgtcacccagcaatggtggagcaattcggcttggtttgccaatgaacgccgtttccagaccaatgccatgacggccgattcttgtttctttgccactatgggcattgatgttgtcagtggagaccctcgcgagctgaataatccggaggtggtcttcatcagcagggagctggccggcagcatgtttgccgataagaatcccatcgggcagacggtggtctataacaaacagatgccaatgaccgtgaagggcatttttgaagattttcccgaaaactccagtttttatggaagcggtgtcgtgatgtctttggctacctccttcaagcatcattggggatactggggatggggaggtggagacagctatatgtcctttgtccgtctgcgcccgggggtgcaactggacgatgtgaacacccgaatagagaaacttgccgaacaggtgcgcaagagcgatgatgtgtttatcagtctggttccgataaaggactaccgtatggaatttggtatcagtaccatgcgtatggtatggattctgttgacgctgggaaccgccatactttttattgtggcgatgaattatgtgcttatttccatctcagccatgaaccgtcgtgccaaagctataggcgtacataaatgtagtggggcaaatacgggaactattttcggtatgttcttatgggagaccggagtcatcatgctttcttccttgctgcttgtagcgctgcttctatttaatttccgtgagccgttggaggacatgctcgacgttagtcttgctggtcttttctcttgggaaaacatttgggcaccgctttcagtgatagtcattttgtttatgataggcggcatgttgcccgggcagctttttgcccgcattccggtgacgcaggttttccgccggtacaccgaaggcaagaaaggctggaaacgtccgctcttgtttgtgcagtttgccggtacctcctttattttcggtttgttggggctggtgcttatgcagagccattacatcaccaataaagaacgtggattcgattaccaccgggtggcttatgcttcgggcatatcctttgactcggatgcggaaagcgatgcaaatcgtagtgtgatgctttctttgccttatgtggaagatggagcttgtagcggtaatcttcttacagacggattgagtggagaaggggttacgactgataacgggcagtggatgagcatgcgttgggtggaatttggcaaggactatgccccgtttatgaagttggaatttgcggaaggcaagaatatggatgcccctgggcagatattggtcaatgaaacatttttgaaaatgatgcattgggaagataaaccgataggcaggcaagtgcgcaacggcgatcgcatagcgggcaatattgtaggtgtactgaaagactttgccacatccaatgccgcttatgtggcggtgcaacctatgtatgcaacttatcttgaccgattttccggaaacatccaattacgtctgaaagagccttttgacgataacctcaagcgtttgaacgaagacatggaaaagctgtttcccacccgtgacattgtattttcctcgttccaaaaggtcattgacgaccagaacagtaccgtcacggatttccgtaatgcagctttactggctgccataaccatcctttttgttacgttaatggggttgattggctacatcaatgacgagatacaacgccgcagcaaggaaattgccatccgtaaagtgaatggtgcggaagcgtcatccattctccggcttttctcgaaggatatattctggatatccttgccggccgtttttcttggagggctgggagcctggtatataggcggtgtctggatagagcagtttgtggagggagtggattttggtatctgcggattcttgcttattgcatgcattgtactattgctcatcatcggttgtgtagtattcaaggcatggcggattgccaatgagaatccggtagacagtatcaagagtgaataaagaataacttcaggaaattatgaggcggcacatttattatacattacaaagcttgttgcacaagcaaggttccaatgccattaagattgtatctttggcattgggactgctgatgtctgtatttctatttgcacggattgcattcgagttgagttttgataacttttatcatgattcggataacctttatattgtgaagacgggttggttgaaaaatggagtgttggaaggtaacgaaagtcgctttaccatcattccgattccggctgccattgccgaagagtttccggaacaagtggaaagtagcacagtgagctgttctctttttgataatagtttccagttgggtgagcgccaattagatctgtccacggtgatggcagatacactttatttttctgtactcggtttggagatgatagaaggcaatccacaggatttggcgggtccggatgtcgtattcctttctgccaagtcagcaaaggaggccttcggtgacgaaaatccgatagggaaaacactgcgttatgatttttggggatatcagactacactgctcgtgaagggtatctttgccgatattccgttgaacacttctttggagaggcgtccagaggcaatcatttcctttcctactatagggcggcatctgaagtggaacctgggttggcaaagcggcggaaactacgacggttatctcaggctgcgcagcccgcaggatgctgattggctgaatgagcgtatgtccatagctattgcccgtcatattccaccggaaagtggtttagaattgagcgtacgtattgtccctatccataatctgcatgtcgagactcctcaagtacggaagatgatttggattatgttcttcctgggtatcgtgctgctttttacgaccgcattgaattatgtactcgtttccgtggcttcgctgacacagcgtgctaaggccatcggtgtacacaaatgcagcggtgcttcgggaagtagcatcttttccatgttcatggtagagactgctatagtagtagggcttgccttgctgctcattggactgctggtgtatattttccacgaaaaaatggaagaattggcagctgtacctctcagtgctctttttgactggcagaatctttgggcaccattgtcggtgatactgttactgtttattttaggtggttgcctgcctgccatgcttttcgctcgtattccggtgacacaagtgttccgccgctacacttccgggcgtcgtggctggaaacgggtactgctttttgttcagttcatcggagcggcattcattctggggatgatgctgatggtcgtttcacagtacagttatgtaacgacgcgtgaccgtggttggcgtcctgaacgtgtggcatataccacccagcgggaagtggatggcaatagcctgcgtagtcttgtcggcagtttgccttatgtggaaggggttgcttcggcagaacgccctatattgtggttcggttctaaccagccaattcttgacaatcagggtaacgagcttttctatcctcgtaatacctggttcgacagtgattttcttcctttcattggtctgagactgaaagaggggcataacttgacgggagaaggtcagttgcttgtcaacagtgtcttttgtgagaagatgaattggacagacagccccataggcaagcgggtgaatgattatggcactgttgtcgggctgttagacagtttcagttttgccgatatgcccaacgataatttgccggtgatggtggaatggacggggaagacagctgccaccctgcatgttcgcctcaaagagccattggatgaaaatctcgcccgcctcaatgaagagatgcatcggatttatcctcagaaaagcctcgtattccgttcggtggagcaggaaatgcgcagttatgccgagtctgtacgggtatttcgtgatgtcaccctgctggtttcattgaccatactctttatcattctgatgggactgataggctatgtgaatgatgaaatccgcctgcgttcaaaagagattgccattcgtaaagtgaatggagcggagacggaaagtattttgctgttattgtcaagagatgtgctttggctggccattccgtctgtcgccataggtattgggggagcatgccgggccggaaagctttgggcgagccagttctctgatgttgtgccattccctataggcggatatattcttgtaggttgtctgttgctgttgtttattgttgttaccgtggtgttgaaggcatggtgcattgccaatgaaaatccggtaaagagcatcaagagcgaataaagttgccgcaacatacatcatgcgtttggggtagacagaccatctgtttggggcgaatagatgatgtgtttgggctgaatgaatgatatattttcgaacaatttgtttgttataacataaaatgcaatatttgcagtagaataaatcactttcacctcgctttttcggtaattcctgtgggtaatctctttacatatatccacaatgccaccgctgccgttacaaaagcaaagaagtccgataccggcatacatatccagatgccgtccagcccaaagtaatgcgggaatatcagtagtcccggcaacagatacagtaattggcgtgtcagcgacaagaagatactgattttcgccttcccgatgctttggaagaaattgccgatgacaatctgtgcacctaccagcgggaatatggctacggcaatgcgtacgcctctggaagcaatatctatcaactcttcatcactggtaaagatggcagatatggcatgggggaacaattcgcagataaggaagcctgtactggtgatacatactccggcaatgatggtcaggcgcagggtagccttcacacggtcgtgtttttgcgcaccgaagttatagcctacaatcggttgcattcccatcgtcaaccccaatacaatcattacatagagtaccagcagccggttgataatgccatatgccccgatggccatatcgcctccgtactgttggaggctgttgtttacgataatcacaatgacacatgccgtgacgttcattaggaacggtgacataccgatggataatatactgctgatgatgcgtttcttcatcttccagaacccccgttgcagacgtaccacacttgtcttttgcaggaaatggctcactacccacaccatgccgatgaactgcgagatgaccgttgccgttgcagctccccgtattccccagtcaaattggaagatgaaaatgggagcgaggattatgttgcagactaccgttaccatagacgtgagcatcgctttcttgggatatcccgtggcacgcatgatattgttcaggccaatcatggtataagtgacgggggtacccagtaatatcacctgcataaagtcgcgggcatatggcaacgtatcattgctggcaccgaagaagcgcagaatatcatccaggaatataaatgagatgccgccgaatatgaatgcattgaccaggcagaacatcagtgtgtttcccaatacttccgttgctccgtccaggtctttctgtcccaaccggatggacgaaatggtggagccacctgccgataccatcgtacagaaagccacgaccagattcatcagagggaaagtaatggcgagtccggcaatgcccataggacctacgccatgaccgatgaaaatgctgtcgatgatgttgtacaacgaagtaatcgtcatgcctataatggccggaatggagtactgcacaagcagtttgccaatacgttcggttcctaatatatgcgcgttgttcatttgatatgagtcaattaaggagcacaaaggtataaaatatttgtttgattcgcagattattcccacctttgtacgctataatgttttggtattaacagatttaggtaaaagaaagtttatggacacaacaaaagcaaccgccgtactttttgattttgacggtgtggtggtagacacggaaacacagtacagtcacttctggcatgaaatgggaaagcagtatttgggtatggatgatattgaaggcagggtgaagggccagacgctggtctatatttatgataccttttttccgggcatggcgaaggaacaggccgaaattaccgaacggctgaaccgctttgaacaggaaatgtcattcgactttattcccggagtgcttgacttcattgccgacctacaccggaatggggtgaagactgccgtagtgaccagctccaacgaagcgaagatggcagctgtctatcgggttcatcccgaaataaagactcttttcgaccgtattcttacggccgagatgtttacggcttccaagcctgcaccggattgttttctgttgggtatggaggttttcggcacaactcccgacaccacatatgtattcgaggattctttcaacgggctgaaagccggcatggcttcaggagctaccgttatagggttggcaaccaccaattcccgtgaagacatagctccgttgtgtcattatgtattggatgactttcagggattcacttacgataaattaactcaattgtacaagtaatcagaaaaaggattacctttgcgccgaaaattaaattgagtaattgtaaattgccaaattgtaaatactatcatgggttatatttcagacgacactcgtaaagtgactacacatcgccttatcgaaatgaagcagagaggcgaaaagatatcaatgttgacatcatatgactatactatggcgcagattgtggacggtgccggggtagacgtgattctggtgggagattccgcttccaatgtaatggcaggcaatgtcaccacgcttcccatcacgctcgaccagatgatttatcatggcaaatccgtggttcgcggtgtgaagcgtgccatggtcattgtcgacatgcctttcggctcttatcagggcaacgaactggagggattggcttccgctatccgtattatgaaagaaagccatgccgacgccctcaaactggagggaggcgaggaaatcatcggtacggtgaagcgtatcctcagcgccggtattcccatcatgggacatctcggactgatgccccaatccatcaacaagtatggaacatatacggtccgtgccaaggatgatgccgaagccgagaaactggtacgcgatgcgcatttgctggaagaagccggatgcttcggactggtattggagaagattcctgccgcattggctgcccgcgtggcaagcgagctgactatacccgttataggcatcggtgccggtggcgatgtggacggccaggtgttggtggttcaggatatgctgggtatgaataacggttttcgtccccgtttcctgcgtcgctatgccgacctgcatacagtgatgacggatgccatcagccgttatgtttccgatgtgaagaatttagatttcccgaatgagaaagaacagtactaacaaactcatgacactcaatttttggcggatgtgtacggcaaatctgttgctgttcatatccgtctatatgcttttccctttgcttccttttgtgatgggagagcagttgggtgtttccgtcgggcaggcgggcagcatgtttctggtctttgcggtggccatgtttgctgtcggtcctttccatgcctatctggtcgatgaatataaaaggaaacacgtgctcctttactccgcactcattatgctggcggctgttctgggatatgcctttgtggatggttatacgaaatttctgctgcttgccgctgtgcagggagcatgtttcgggctggcaaccacagcgggcattacggtggccatcgacataacgacttccgcgcgccgcagcgcaggaaacatggtatatgcatgggctgcacgcttgggcatgctggtgggtgttgtgttgggtattggaatgtataggatgtatggtttccgtatggtgacctatctgtctgtagcggccggactggccagcatatttttcgcatcgagggtatatgtggctttccgtgctccgataggcgtgtcgttgtgcaatatggaccgcttcttattgccgcgtgcatgggtacctgccatcaatatgctgttgattgcttttgtaccgggagcgttgctgccactgatgtttgtgggcgattactggtcattggcggcattggctgtattggtgttcattacagtcccgttcatgaagatgttcgtcaagctgtcgcaccattgccagcgtggaacggcaaacaccacttgccatttgttcatggaggcagggctgctggtgggcatggctgtggcttgccacctgatggacaaagcgcagatataccatgtggcgtctgttgctgctatgcttgccgtatttttctttgtactgctgacctatccttattataagaagaagcgggtgaggtaagggataaatacaatcaatcctataatggccgccgttgcagcacataccagtactgctccggcggctatgtcttttacttgccctgccacgggatgctgttggggagacaccaggtcgaccagcttctcaatggcggtattgaacagttcggctgctatcaccactccgatgcagagaatgattatcatccactccatgcgggtaatgcctaaaacgaatcctgcaatgactaccacagccgtagctatcagatggaagttcaggttctgttcttttcctatgcaacaccggatacctttccaggcatatccgaaactgcgcaactgctttttaaagtcgtacttcatggattatagttgttgcttaattccttgaaacctgtttcactccctttactgttctcagtttcttgacaagtgtttccagatgtcccgtatcgctcaccatgatggtcagtgttccggagaacagcccgtcatgcgagtcaatgccgatgcttctcaaagtaatacccgtttctttggaaatgatggaagtgatgttggtcacgatgccgatgtcatcgtgtcccactacgcgcagggtgatggggtactgtgtaccttgtgactttccggcccagcgtgccttcacgatacggtagccgaaacgtgagtgcaaatcactggcattgggacaatcgcaacggtgtatcttgatacctcccgtcacactgacaaagccgaatacatcatctccatagatgggattgcagcagcgtgccaacttgaaatccaatcctttcagattttgatcaatgaccagtacatcttctttggtacctatctcttccggtatgccttgttgaaggttatagccttcagcactgcggtagacaatatcgtcgcgcgtatcattttcccgtctttgctgttcctggtatttgtctataatctcgttgacatccagttcttcatcggctatggcttgatagaagtcggtcactatcttgaaaccgaggcgcttgatgaggcgcatcatggttccttcatcatactctatcttccggttcttgaacttgcgttccagggtttccttagcgaaggcgtgctggcgtgcagccatttccttcaatgcctggcgtattttggtgcgtgccttggaggtggttacgatgttcagccagtcctgcttgggcgtctgcgtattcgatgtcattatctccacctggtcaccgctatgcagcatttgcttcagctgtacattcttgccgttcacttttgcaccgatacatttgcagcccagtttgctatggatgtggaacgcaaaatcgagcacggtggagcctttggcaagtttgaacaaatcacctttgggagtaaatacaaatacctcgtcttcgtacaaatccagtttgaactggtccatcgtttccagtccgttgctgtccgagctctctaaggcttcgcgtacggaagtcagccattcgtcaagaccagattcacctttcactcctttgtatcgccaatgggcggccaggcctcgttcggcaatatcatccatgcgttcggtacgtatttgtacttccacccatttgccttcggggcccatcacggtgatgtgcagtgattcatatccgttgcttttaggtacggacaaccagtcgcgtagccttttcgggttaggctggtacatatctgttacgatggagtaggcctgccaacattccagtttctccttttccaggcaagagtccaggatgacgcggatggcaaacaggtcatacacgccttcgaaggggcatttctgcttcttcattttctggtagatggagtggatggacttggtgcgtcctttgatatggaacttcagtccggcttcttcgagcttcttctgtaccggtgcaatgaaggcggcaatgtacttgtcacgcgatgccttggtctcattcagtttttccttgatatggtagtaaacgttcttttctgtgtatttcaatgagaggtcttccagttccgacttcaatttgtacagacccagcttatgggcaaggggcgcatagagataagccgcttcgttggctacctgccgacgggcttcgtcattttcgcagtccttgatttgccgcatgatgtttacgcggtcggcaatcataatgagaatgacacgcatgtcctcggcgaaagtcagcaacaagttgcggaaattctcggactcgatggtagggcttttggaataaagttcgtttacacgtatcaatccccggatgatgcctgccacatcctcgccatagatttgctccacttccagagcggtgcaagtgccgcagcgcacggagtcgtgcagcatgagccccaggatagaagcacgcttcattccgatttcttccgctacaatgacagccgtctgcatatctttgatgacgggattcaaaccgaatatatcacgctggatacggttgttctgtatagtattgacaagatgtattttcagctttttgcagtcccccttctggagggtttctccggaaagttgcaacagtttgcggtagagcgagaagagtaaatctttctctttgatagtgaaaaattcatcagtttccataatcgtccgtattttatgcttcaaaggtaagttttttcttcattttcttgacggcagttctgctttttttgtatttttgggcatgaattaataaaacaagatattatgataacaccgcaagacaaagagttgctcgaaaataaaggcatctccgaagaacaaatagccgaacagttggcttgtttcgaaaaaggttttccatacttgaagctgtctgccgccgcttctgtagaaaagggtatactggctccgaatacggatgaacagaagaaatacctggatgcctgggaggcatatacacaaaccgataaagtggtggtgaagtttgtgcctgcttcgggtgctgccagccgtatgttcaagaacttgtttgaatttctcggggcagactatgacactccccagacaaactttgaaaagactttctttgagaaaatagagaagtttgccttctatgatgacttgaataccgcttgccagaggactgccggaaaggatataccgactttggttgccgctggaaactacaaggcggttgttgctgccttactcgaaggggccggactgaactatggtgctctgcccaaaggattgcttaagttccataagtatgaagacggtagccgcacgccgctggaagagcacttggtagaaggagcattgtatgctgccaataagaacggtaaggtgaatgtgcatttcacggtttcgcccgaacatcgtgccttgttcaaggctttggtagacgaaaaggctgccgcttatgcaaagaagtatggggtggattataacatctctttttcggaacagaagccgagcaccgataccattgccgccgatatggaaaacaaacccttccgcgacaatggcaaattgttgttccgtcccggcggtcatggcgccttgattgaaaacttgaatgaccttgatgcggatattatcttcataaagaatatagacaatgtggtacccgacaagctgaaaggtgacaccgtattatataagaaactgattgccggtgtgctggtagcgttacagcagagagcgtttgcttatctgcagttgcttgacagcgggaagtatacacacgagcaaattcttgaagttctgcaattcctgcagaaacaactctattgcaagaatccggagacaaagaatctggaagatgccgagttggttatatatctgaaagagaagctgaaccgtccgatgcgtgtttgcggtatggtgaagaacgtaggcgaaccgggcggaggtccgttcctggcatacaacagtgacggtactatctctctgcagattctggaaagttcgcagattgatatggacgacccggaaaagaaggaaatgtttgaaaagggtacccatttcaatccggtggatttggtttgcgctgtacgtgactataaaggacataagttcaatcttgtgaagtatgtggataaagcgacaggcttcatctcttataagtccaagaacggcaaggacctgaaagcgcttgaacttcccggtttgtggaacggggccatgagtgattggaacacagtatttgtagaagtgcctctgactacattcaatccggtaaagacggtgaatgacttgttgagagaacaacaccaataagaggatttactattagacgatttacgatgtacgattgggattgctttggcttgtggcggtttattgtctaaagtaactctaatcgtacatcgtacgtcgtcaaatcgtaaatatataaaattgtaaataaaagaattgatgaaaaagattttattgttaggttccggtgagttgggcaaggagtttgttatttctgcccaacgtaagggccagtatatcattgcttgcgactcgtatgccggagcgcctgccatgcaagtggcagatgaatgtgaggtattcagcatgctcgatggagatgctttggaacgtgtagtacgcaaacaccagccggatattattgttccggaaattgaggctatccgtacagaacgtctgtatgatttcgagaaagaaggcattcaggtagtgcccagtgcacgcgccgtgaactttaccatgaaccgtaaagccatacgtgaccttgcagctaaagagctgggattgaagactgctaaatatttttatgccaaatctttggatgaactgaaagctgctgctgaaaagataggtttcccgtgtgtggtgaaaccgctgatgtcctcttccggtaaaggccagtctctcgtaaagagtgccgacgaactggagcatgcctgggagtatggctgtaatggtagccgtggagacatcaaagaacttatcattgaagagttcatcaagttcgacagtgagataacactgctcaccgtaacacagaagaatggtccgaccttgttctgcccgcctatcggccatgtacagaagggtggggactatcgtgaaagcttccagcctgcccatattgaccctgcccatctaagggaggcgcaggatatggcagagaaagtgacccgtgccttgaccggtgccggattgtggggagtggaattctttctcagccatgagaacggtgtctatttctccgaactctctccacgtccgcacgatacgggtatggtaaccctggccggaacccagaatctgaatgagtttgaattgcactgtcgtgcggtgcttggtctgcctatccctggcatcaagcaggagtgtataggagccagtgctgtcatcctttctccgatagccagtcaggaacgtcccaattatcgtggcatggaagaggttacgaaagaagaggatacttatctgcgtatttttggtaagcctactacccgcgtaaaccgccgtatgggtgtagtgctgtgttatgcacctcttgacagtgatcttgacacgctgcgcgacaaagcgaagcgtattgctgatagggtagaggtatattaatgattagtgatgaatgattggtgatttgttgatgaatggataccatcaacaaatcaccaatcgtcagtattaatcattgaaaaagagtccgggataaatctctcctccaagttctgttacatcgaggctttgtaatagttttccatccggagcatagaacagttggaattcttcatcggaattgtattgttccacctcaattattatcactgtgggatgtttgggaaaggtgatgattcttatatcccttaatctcatgccggtcattgtactgctcatgaatgcttctgccacgggagccggcactttttccagtgactctacatccgtttcagtcataacccactccgcttgtttattgaaccagacatcaatttcctgaccgtctgcaataaattctgccacgtagcaaccggccatttgctcccattccacatccgttgcttgaggatagagctttagaaaagctgtttgtatatttgcaggaagacgcccttccgcaaaggcggacactgacaacaagataagtagtcctgccagaataccgaattttaattttttcataatcaaggttgttttgagttttctgtaagaacaaccttgttgtgtttttgtttccgggaatcagtacgttgtgtcgatgtacttttaaatatcagtgaaccggcctttgtatacaaaagctttttctccgaaatccacttccggcagtacggcaccttccttgaataatccgtaaacagatgaccccgaaccactcatggaggcatatacagctccttgccgatacatctcttccttgatttctccgatagtgggaaattgggggaatacgctttcttcaaagtcattgaccattcgtccgttccattcttcaacgggaagttgggctatttctttcagagacatttccggatgatgcggttttatttttgcaaaggcatcccgtgtagagacgaaaatgtccggcttcaccaaccatatccggtatcctttcagtgagaggggaaggggagaaaagatatttccgataccttctgcgtaagtcggacggtttctgatgaagaaggcacaatcggcccccagcttggcggcatacgtttccaaagtgtcatccggcagtccgagttcaaacttattattcagaagcttcagcatgaaggctgcatcggccgaaccgccacccagtccggctcccgaggggatatgcttgaagagatggatgtctaccggaggaaggttgaaccggtcgtccagcaacttgtaggctttcactaccagattgttttccgcttctccctcaatctccaggcctgcttgatgcagacggaactttccttttccttcgttcaagatatttatttccaaagcatcttctatgggaaccggatagaaaatggtttccagattatggtatccgtccggacgcttttctgtgatattcagtcccaggtttattttggcatttggaaaagtcagcatggcgttgaaaattaagaattaataatttaaaattaaaaggagaagctattggagtgcagcttccgaagacaaagttagtgatttctgttcatagtagattgaaaacttaacaatgatttatttactgcttataaataaattcgcttatctttgccatacgagcgaagataggctgcacctcaacataactttttcatgcaagcatgaaagttatatattcggtttgcactatctttgctttccctttctaaaagggaaattcatttaatttttaattttcaatttttaattcttaaagtggcagaacaaagaagaacatcccgtactccgaaaggaaaggcaccacagcccgtaacagactacggacgtatccagccgcaagcgccggagctggaagaagctgtcttgggagccttgatgattgagaaggacgcttattcgctggtaagtgaaattcttcgtccggagtcattctatgagcatagacatcagttgatatattccgctattaccgatttggccgtgaatcagaagccggtcgatatcctcaccgtgaaggagcagctttccaagcggggagaattggaggaagtgggcggcccgttctatattacccaacttagcagtaaggtggcatcttctgcacacatcgaataccatgcacgtatcattgcgcagaaagctttggcacgtgaattgattacttttaccagtaatatccagagcaaggctttcgacgagacgctggacgtggacgacctgatgcaggaggccgaaggaaagctgttcgagatttcccagcagaacatgaagaaggattatacacaaattaatcccgtcattgccgaagcctatgatttgattcagaaagctgccgcccgcaccgatggtttgagtggcttggaaagtgggtataccaagctggacaagatgacttccggatggcagaagtccgacctcatcattattgcagcccgtcctgccatgggtaaaacggcgttcgtactttccatggcaaaaaacattgccgtgaatttccgcaatcccgtagcactgttctcgcttgaaatgagtaacgtgcagctggtgaaccgtctgatatccaacgtgtgcgagattccgagtgagaaaatcaagagtggccagttggcagactatgaatggcagcagttggattacaaactgcgtgacttgctggatgctccgctttatgtggacgatacgccttctttgtcggtattcgaactccgtacgaaggcacggcgtctggtacgtgaacacggagtgaagattatcatcatcgactaccttcagctgatgaatgcaagcggaatgtctttcggtagccgtcaggaggaagtcagtaccatttcgcgttcattgaaaggtttggccaaggagctgaacattcctatcatcgccttgtcgcagttgaaccgtggtgtggagaaccgtgaaggcgaggaaggcaagcgtccccagttgagtgaccttcgtgaatccggtgctatcgagcaggatgccgatatggtgtgcttcatccaccgtcccgaatattacaagatttatacttctgccgatggtagtgacttgcgcggtatggcggaaatcatcatagcaaagcaccgtaacggtgccgtgggggatgtgcgtctgagatttatcggacagtacacccgtttccagaatccggaggatgatatggttatcccacctccgacggagggtggaggagctacattcggttcacgtatgaatgcgcctatcggaagtacggcaacaccgccacctccatcggctgctgattttccgccacagacggacaacccgtttggaggtgtggggtcggacgggccattacctttctgatgtatttttatggctacaccctttgccttgaatgcctataccatcgtagagtgatggctacacctttaggtacaaagggtgtagccatgttaaatactgtatttgagcctatttacttattctaaaatcttcaatgtggacagtaagaacgtcaatcttacttttgctcccttttccgttttgattgtgcctcgggcatctgctgttctgtgtttattttatcagtggatagagtatcttgttttattttttgttcctttctcagccggttgagtttccatctgttccagaaaaggagctcactccatttgttgaaatcctttttgaagataatgccaataccttgtgttgtcagatttgtccgggtgtagtagcggtcgttcgtttcgttgtacgctttcaggcggatgtctccggaacggttgacgagccattccgcttcaaagtctcccacaaaattggtatttgccatcggattgtcacgatagccaaaattaccattgataagtagtcggttattcaataattgccccgaaagcatggtctcgaactccatgtctgtccagcctctttcaccggtactgaaattggtgccgaagttccagttattgacatcgagaatgttcgataaagcgttattcaactgtccggaaagggtggatgaaacaacactggacatcatattcgaattctgggtggctcccaagttttccggggtatagaacttgccgatagccaacagatagagtatctgcatgttcatttgctcgtcagtaggaatatagttacggacaatggcctgcacttcatcgcgttcgttgggcagctcgatgtcgaattttacatcgggtgaagtcaattgtccggtaaggtccatcatacagttcacttttacatttgtctggctgatgtagccggaggttgcctcgttgggcatcaggtcatttaaggatgctgagttgaccgtatagcctgcttttatgtccagagtggcatccagcggcgaaccgttgaatgtaatggtacttccatccctgataataaagtcctttcggataacctcttgcagactgaatttatagactccctggcttatccggtaactgccgaacatctttacatctcctttattgaaaaactctgtacggatatttccggttccccgtccactgatatagtcgccggcgatagggtccatgataatcttcatggtagcgtcgggggtggcgtctaccaagagattcagccggatgtcagtgtcgctttctttctcttcctcgatttccttttgggcaatctcgtagtcggaaaggcggacagagtcttgtacggcacggcgtggcgtcttgtccacaaacttgatgaactggttgctgactgctgtagatacgttatcctttatataggtaaaggtggtgttgcgattggtagtcattgcaacgtcaatgttaacgccatcttgggcattaccggcaatagtggcattccccgtaccgtagacggtgccgtagaagggatagtccggtgattctttggtattcatcaccagcatgtcgttgacattgaaattgaaacggtactccaggttcttgaaatgctgataatgcagatagccgctcatgctgccttgatgcccttgcgtgtcgaaaatgcggttgttgcggaaggtcaacccgccgggctcgatgtagatgctgtctttgacggagaaagtggtgttgagcacgtctaccttcatggaagcatcgccgaatacacgcccttccatggtgagagccttgaatttgccatagaaatgtacatggccggtggcacgtccgttgaattcgggcgtgatgctgctcatataatgatgtatgaacttcaagttggtaccgcccgcttcaatttggagatccaatgaactggtgggcttcaagggatagacatagccatacacatggcttttggcgatatctttctccctgatatgggcatccagatagatgcccttcacgtcatggtgccattctccgtgtatgttggcatcacccagcaagccttcgttcaatccgaggttgcggataaacaagtcggtgctcatgacgggtttttccagtactccgctggcgaaagccggaccggtggcttctcctttgaaattgactccgaggtctgcaatgtcgaacacataaccgatgttgatttccttcaaatccagacgtactgtatcttcgggttgtggtgaaacgataccattgatacgcaagtgccggtctttatggctgaagtagaaatcattgacatacactttgccggagtcgagtaccacttgggagggatgtatatcccatagcgtatcgttcagtatcacgttggtgggctggacatcaatgacggtttttaaggggggaagtttcctcttgttttcattcgcttctttctgttcacggatgaagtgggcgacggcggcgagtttcccgctgtaggttacagtgctgctgttaccccagttcagcgtggtctgtatgctgttgttctgggcttgcgcttctaaagctatattgacagcgccgcttgatttgcggttgctgaagcgtaggcgtgtatggaactggtcaccgggattctcgcaaaggaacattccggattcgatgaatttgttttcatagcggagacggggaaaatagccttctacacggagtcgctgtgccttgtcattgaagtatcctttaatggtggaatgggtatatacttttaccggaatctgaaagacggtggagagcagttccgtattgtaaatgtgcatgtcgaaatggaaattgttctccgtctctatgggtttcttgtctggcagaatcaaggcggggatataacgacgcatgatattcagtacactggcaggcagggtacgataagaataatcgccttctatgcgaccttggagaaagttggattggatggtcagccgtttctggtcttcgctttctctgatggcggatatcttcagattgtccaggaagtattgtgtttccggagctgcgaacagtaagctgtcaacgttgatttcaccgttcatctcgtcaatggaaccgccggtgaagtcagccttgactttgactgatatttccgtatcttcatagttgggtgtcagatgtagggcatgaggacgaaatttgtcgatgcttgcctgaaagttgaaagtcggtacccgactggcggtattgatggtgccgttcaaaataacagaaccattggtgtcatccaaggcgacttttcccgtgaagcctccctgcttgtattctccatccagggtgatattttcgtaattgtagtcgctgtaatcaatggaggcaaccagccctttcagcagtacggatgggtattggttttcgtaatggctgctgttgacatccagattgaaagttactttacccagtttcttgttgcccagcatcttgcctagctcaaactctttggttttcactgcaccggaataggcaaaataacctttatctttgttagaacttagttttacgtcagtttggatggttccgatgtcggtgcgtacttgtccgtaagttacgaggtctgtgaagtagcccgatacttctccacggaaggaaaccgttcctaagtgttgcaggacgggaggtactccattatagttcttgctgaaattccggacaaagaaggcaattccttccgggtctgcgtacaaattggacaaattgccgaatatataagcattttccggatgggaaaggtcttgtagtgatacgtctcccctcagataaaaatgatttccgacagagacggaaaggtgcgggcaattcagttgattgacagtgccgtccgtctgtacctctacttgcaatttttccttgaaggaaccaaaagccggaacaaaagccgataaatcctgcaaggcgatttgagagggcagcaaatggaatgagaaacggacatcttgggcaagattgtcaaacgcccccagactgtcataatccatgtgtatagtatccattgccaaagaggtgttggggaggtcgatggcgaaattttcgattttcatccgttggtcattgccgataacctttaggcttagtttcttcaattcaaatccggaatgttcttcttcgatgctcagacgcttgatggcggcattgatagaatcattttgcaatgcttttagggagatgtttgcaataatgttacgcaagcggagatgctgtggattgaactttcccggagtctctttctcggacagcacatcatacgaaacctttccgcggcgtatcagtaaggaattgatacggagatccaggttatttttcttttgaaccgtatctttggatgcgaatgcgtcgagtacaaactgaaaattaggtttatcctttggagtctgcttgctcagattgatgttaaagccgaacaattgtatgttactgatggatattttgccgctgaatagggggagaatatcgaatttggcggaaagacggggcaccttcagcatttccttgccggactggtcgtccaggagcaggtcgtcgatgatgatgcggttcagcaatcctatgtttattcgcccaatggaaatcttgctgtccagtatggaagccagttcattggcaacaaatacagacatttgtcgctgaacggatggaatgttcagcaacaatatggtaccgatatacaatcccaatacaataccgagtacccagcgtactgttttttttagctttctgataggcggttaatttttataatcagccaacaaaaatatgaaataatacgttatgaatcgtacttttatcactacttttgcagcgtttaaacgtaaataaacattatgagtacaataatcttgggaatagaatcttcttgtgatgacacttctgcagctgtcatcaaagatggttatctgctttcgaatgtggtggccagccaagctgtgcatgaagcgtacggtggggtagtgcctgaactggcttcccgcgcgcaccaacaaaatatagttccggtagtgcatgaggcattgaaacgcgccggagtaactaaagaggaattgagtgctgtggcttttacacgtggaccgggattgatggggtcgttgttggtgggggtatctttcgccaaagggttcgcccgttcattaggtattcccatgattgatgttaatcatttgactggccatgttttagctcatttcattaaagcagaaggtgaagataatgtgcagccggaatttcctttcctctgcttgctggtttccggtggaaactcacagattatcttggtgaaagcctataacgatatggaaattttggggcagaccattgatgatgccgccggtgaagccattgacaaatgctcgaaggtaatgggattgggatatccgggtggtccgattattgacaaactggctcggcaaggtaatcctaaagccttctcgttcagcaaaccgcatattccagggttggattatagtttcagcggacttaagacctcgtttctttactctctgcgcgactggatgaaggacgaccccgatttcatcgaacatcacaagatggatttggcggcatcactggaagctaccgttgtagatatcttgatggataagttgcgcaaagctgccaaacaatataaaataaaggaagtggctgttgcaggaggcgtttctgccaataatggattgcgtaatgctttccgtgagcatgccgggaagtatggttggaaaatatttattccgaagttcagctacacaacggataacgctgccatgattgccattaccggatacttcaagtatatggataaggatttttgtccgatggaagcacctgcttattcacgcgtaactttaggataatatataataaggtatgaagctggaagaaaaggtaggagagctgctgaaagcaaagaaattgtccctttccaccgcagaaagttgtacgggtggagggattgccgctctgataacttccgttcccggcagttcggaatactttaatggtagtatagtggcgtattccaatgaaataaagatgtctttgctgcatgtatctgccgaaactttggaaaaacatggagcagtaagccgcgaaactgttacggaaatggtgaaaggtgcgatgaaaacgctgaaaacagattgtgcagtggctacttccggtattgcaggtcctggaggtgggactccggaaaaaccggtgggtacggtgtggatagccgctgcctataaaaatgaaatcgttaccatgaagcaggagggagacgagggaagaaagggaaatgtggaaaaagcaattcaaaatgcccttttgttgctttgtgagaagctgaaatgaggaaaaaatgctatcatacagtgaattattttaagaaaaacttgtttggtaacgataaaagtgcttactttgcgctctgtttgaaataggcaaaaaagaaaactataaaattaagatagaaatgtcaaagatttgtcaaattaccggaaagaaggccatgattggcaacaatgtttcacactcaaagagaagaacaaagagaacctttgatttgaacttgtttaacaagaagttctactatgtagagcaggattgctggatcagccttagcatttgcgctaatggtttgcgcattattaataagaaaggactggacgctgctttgaaagatgcggtagctaaaggttattgtgattggaaaagcattaaagttattggctaaagtagaggagaatactgattatggcaaagaaagcaaaaggtaacagagtacaggtgattctggaatgcacagaacacaaggatagcggtatgccgggtacttctcgttatattacgacgaagaacagaaagaataccacagagagattggagttgaagaaatacaacccgattctgaagagagtgacagtacataaagaaattaaataataaatctataacttatggcaaagaaagcggtagcaaccttgcacgaaggaagcaaagaaggacgttcttatacaaaggttatcaaaatggtgaagtctcctaagactggtgcttacatctttgatgaacagatggtccgtaatgaagatgttcagaacttctttaagaaataagataaatacagtggctgtaaagcgctgatgacttataaaaatccccttgtcggtatttccggtaaggggatttctttttaaaaagaggacgaagtttttaatattcgtcagttttgttatatctttgctgaaaatgcgaagataggctgcacctcggcataaaaaatgaacgggttcattttattctgcatccggtttgcactatctttgcagggaatgcgaaaacaggttgcataaaaataattagtgtatgggattttttagttttttctccaaggaaaaaaaggaaacattagataaaggattatctaagaccaaagaaagtgtgtttggcaagattgcgcgtgccgtggcaggaaagtcaaaagttgatgatgaagtattggataatctggaagaggtgttgataacttcggatgtgggcgtggaaacgacactgaaaattattgaacgtatcgaaaagcgtgcagcagccgacaaatatatgaatgccactgagctgaatcatattttacgtgatgaaatcgcagcgttgcttacagagaataattcggaggatgtggatgactttgaagcaccgattgcgaagaaaccatacgtcattatggtagtgggcgtcaatggtgtagggaagactactacgattggcaaactggcttatcagttcaagaaagccggaaagtctgtttatctgggtgctgccgatactttccgtgctgctgctgtggagcagttggtgatatggggtgaacgggtaggtgtacctgttgtaaagcagaaaatgggtgctgacccggcttctgtcgcttttgacacactgagttccgcaactgccaataatgccgatgtggtaattatagatacggcaggacgccttcataataaagtcggtttgatgaatgaactgacgaaaatcaagaatgtgatgaagaaggttgttcctgatgctccgaatgaggtgttgcttgtgttggatggctcaaccgggcagaatgcattcgaacaagccaagcagttcactctggcaacggaggttacggcaatggctgttacaaagttggacggaacagccaagggtggcgtagtcatcggcatttcagaccagtttaaaattccggttaaatatattggattgggtgaaggaatggaagatttgcaggtgttccgtaaaaaggaatttgttgattcactgttcggggagaatgcatgaaacgtaagactatagatatcatcactttaggatgttctaaaaacctggtggattcggaacatttgatgcgtcagttggaggaagtgggattccatgtgacacatgatgcggaaagaccgaagggacagattgccgtaatcaatacttgcggtttcatcggtgacgccaaggaggaatccattaatatgattctggaatttgcgcaggccaaggaggaaggaaacttggagaagctttatgtaatgggttgcctttcggaacgttatctgaaggaattggccgttgaaattccccaggtggataaattctatggtaaattcaattggagagagttgttgcaggatttgggaaaggcctatcatgacgagctgcacatagagcgcacattgaccactcccaagcattatgcctatttgaagatatccgaagggtgtgaccgtaaatgttcttattgcgctattcccatcattacgggacggcatgtgtcgcgcccgatggaggaaatacttgacgaggtgaagtatctggttgcacggggtgtaaaggaattccaggttatagcccaggagttgacctattacggagtagatttatataagaagcaaatgttgcccgagcttgttgagcggatttcggatattcccggagtggagtggatacgcttgcattatgcctatccggcacattttccgactgatttattccgtgtgatgcgcgagcgtgacaatgtatgcaaatatatggatattgccctgcaacatatcagcgacaatatgctgcaaaagatgcgccgccatgtgacgaaggatgagacgtataagctgatagaacaattccgtgaggaggttcccggtatccatctccgtactacactgatggtggggcatccaggagaaactgaagccgattttgaggagctgaaagagtttgtccgtaaagtgcgtttcgatagaatgggggcttttgcgtattcggaagaagaagggacgtatgccgctgctgaatatgaggattctattccccaggaagtgaaacaagcgcgcttggatgagttaatgtctattcaacaaggcatttcaggggagttgagtgcggagaaagtaggcaggcagatgaaagtaatcattgaccggctggaaggcgaatattatattggacgtacagaatttgattctcccgaagtggatcctgaggttttgattgagcgtggagacagagcgttgcatataggtaacttttaccacgtagagatagtaaattccgatgatttcgacctttttggacgaataatttaaagatttttccttatcttcttgcatatgtgaagaagatttgctaatatagcaccgtagttcaatttaaaggcttacattttgaataacaaagagtttacttctgaattgtcgcggaggttaggatacacattgaaagatacttctgaactggttgcttcattgctggcagatatgacacggcagttggaggagggaaatattatctctatacaagggttcggtacattcgaagtgaaaaagaaggcagagcgtatatctgtgaatccgactacaaagcagcgtatgctggtacctcccaaattggtgttgacttataagccgagtacattgttaaaggataagtttaagtaaccggcttttaaaaaaatctcccgtattatgaatgagaaactgaacatacaagacctgattgacacgctggctgaaaggcatggcatgagcaagaagaatgcggatagttttgtgaaagaattcttccagctgattgaggagtctttggagaaggacaagtatgtgaagatacgaggtttggggactttcaagctgatagatgtcgggagtcgtgaaagcgttaatgtgaatacgggggaaaggtttgagatacaagggcatacaaaagtgtcgtttacaccggaaccggctttgaaagatattatcaatagaccattttcgcattttgaaactgtagttttgaatgacgctacggtgcttgaggacaccctgcaggaaaatgacagtgaagatgatgaagatactgaaatcaaaactccggaacaagaggtggaggagaaggttgccttagtggaagaagccacgatagaagaacctttggtggaaactgtagtcgaagagccgttagttgagcccgaaccggaagttgaagaggagaaaccggaaaaaactgaacctgaagcaatgcctgaaaatatagttgctgttgaaccggaaccgtctgagccagtgataaaagatacggcagattcttcgactatgaaatattttataggcatcgttgtatttgtagtgttgttgtgtggtggtgccgtagctttcatgtattatccggacttgcttgacaaacttactgcaaagcctcttgtagaagaggttgcagactcggatgtgaaggaatctgttactgaaaaggtggatgtccctgccggtcaagacaatattgccttgacagacagcattgtttcaaaagatgttgtagttcctgcccggacagatactgtggcagaaactgttgctacaacaactcctgcgcttacaacaactccaaaggaaaatgtacaggtacagtctcccgctcctaaaaaagagcagaaaaagacagttgcaccgtttgaaccggattctgtggggtatacgattgtgggaacagaaaccacttatactatcaaggaaggggaaacgctgactagggtagcgcttcgtttttatgggacaaaagctctttggccttatatcgtgaagcataatcccggcgtaatcaagaatccggataatgtaccttatggtaccactatcaagataccgaaattagccaagaagcagtaaaaaattactgcttcttttttgttaaatactaaactctatgaaagtagtttaatctaaaaggtttcgcatagttttttaataaaaattagttggtatggttaatttattcccgtacttttgggagcgaaaaaaataattgccggttcaaaaccggataaatgaagaaattaaacattaaaaaatagattgatttatggctgaaacaattgacatccgcgaactgaatgagcggattgaaagacaaagtgctttcgttaccaatcttaccacaggtatggaccaggtcattgtaggacaaaagcatctggtagagtcgttgttaattggtttgttgtccgatggacatgtgttgttggaaggtgtgcccggtttggcaaagactttagctatcaagacgcttgcttcgttgattgatgcgcaatacagccgcattcagtttacgcctgacttgttgcctgccgacgtaataggtacaatggtttacagccagaaggatgaaacgttccaagtaaaaaaaggtccggtcttcgcaaactttgttttggctgatgaaatcaaccgtgctccggccaaagtacagagtgctttgctggaagccatgcaggaacgtcaagttactatcggcaatgaaactttcgggttgcccaaaccattcctggtgcttgccacacagaatcctatcgagcaggaaggtacttatccgctgcccgaagcgcaagtggaccgtttcatgctgaaagtcgtaatagactatccgaagctggaagaggagaaactgattatccgtcagaatatcaatggtgataaatttgaagtgaagcccattttgaaggcagacgaaattattgaagctcgtaaagtggttcgccaggtgtatctggatgagaaaatagaaaaatatattgttgatattgtatttgctacccgttatccggaaaaatatgatttaaaagaactgaaagacatgattggtttcggcggttcgccccgtgcttccatcaacttggccttggctgcccgtagctacgcgttcatcaagcgtcgcggttatgtcattccggaggatgtgcgcgctgtggcacatgacgtacttcgccaccgtatcggcttgacttacgaggcggaagccagcaatatgacatctgatgaaatcgtcagcaagatactgaacaaggttgaagtgccctaacgcataatagaggttttcgtaaacttgaggtttacaatcctatacctgaggcttagcgtcgtaaaccttagggttgagtaccgaaaacctcaccccttttcatagggaagtttctgttataaactaaattgcgcttgtgtgcttaaatgagattattaaaataaatcaatggaaacaacagaacttttgaagaaagtccgtcagattgagataaagacgcgcggattgtccaacaatatctttgccgggcagtatcactctgccttcaagggtagaggtatggcattctccgaggtgcgcgagtatcagtttggcgatgacatacgcgacattgactggaatgtgaccgcccgcttcaacaagccttacgtcaaggtgtttgaggaggagcgcgaattgacagtgatgttgttggtagatgtttccggtagtttggagttcggtacggtaaagcagatgaagaaggatatggtgacggaaattgccgctacactggcattctctgccattcagaataatgacaagattggtgtcatcttcttttcggaccggattgagaagtttattccgcccaagaagggacgtaagcatatactttacatcatccgcgaactgatagattttcatgcggaaagccggaggacgaacatccgtttgggattggaatatctgacgaatgtgatgaaacgccgttgcacggcatttgtcttgtccgacttcatcgaccaggaaagtttcaagaacgccatgaccattgccaatcgtaagcatgacctggttgccgttcaggtgtacgaccgtcgtgtggaagaattgccacccgtgggactgatgaagattagggatgccgagacgggacatgagcagtggattgacacctcctcgcgtgccgtgcgccgtgcccatcatgattggtgggtgaacaagcaggcggaattgaatgaaacgtttaccaagagtaatgtcgacaatgtgtcggtacgtaccgaccaggattatgtcaaggcattgatgaatttgtttgcgaaacgaaattaatcggaaaatgaaaagatatttatttctgatagcgttattgatagcatggtcgggaagggtagtagcccagtcggtaacggtagatgctacgattgactctttgcagattcttattggagagcaggcaaagataaagcttcaagtatctctggatgccgataagcgtgccatattcccggtatataccgatacgctggtgaatggggttgaaattattgatgtggccaagccggatacgcaactgctgaatgatggccggcgtgcattgataactcaagagtatacagttacctctttcgactcggctctttattatctgccgcctatggaagtgacagtggataatgagaagtatcgctccaaagcgttggccttgaaagtatattcggtgaatgtcccgttagacccggagaatccggaacagttcttcggtcccaaaacagtgatgcaagcgccttttgcctgggaagactggtatggtcttatggcttgtggtgcgctgattatcccgatagggatattacttgtctatctgataatgcgcttcttcgacaataagcctattatccgtaaggtgaaggtagaacctaagctgcctccccatcagttggctatgcaggagatagaacgtatcaagaatgagaaggtatggcagaaaggggaaccgaaggaatattatacggaattgaccgatactcttcgtacatatataaaagaccgttttggtttcaatgctttggaaatgacttctacggaaatcatagataagttgctggaaatgaaagataaggaagcaatatcggatttgcgtgaattgttccagactgctgatttggtgaaatttgccaagcataatccattgatgaacgaaaatgacgctaacctgattaatgccattgactttattaatgaaaccaaggagaaagaagaggagaatgccaagccgcagcctacggagattaccattatcgagaaacgttctttgcgtaccaagattttgctgggaacgggtattgtagtgttggctgtagcccttgtcagttcattaatatatatcggattggagttgtataattattttgcttaatacaggaaaagtgacttcaatcggatatacatgagtgaaaagtgagggatgtttggagcgaagctgaattgtaaatcgttaaatcgtacataaatatggtttttgccaatattgaatatttatttttgctgctgttgcttataccttatatagtatggtatattatgaagcggaagaatagtgaagctacgcttcagatttcggatgcccgtgtgtatgcccatacccctaaaagctataagaactatttgttgcatgtaccgtttgtattgcggataattgccttgatactgattattcttgttttggcacgtccgcaaaccaccgatagctggcagaacagtgagattgagggtattgatatcatgcttgctatggacgtttctaccagtatgctggccgaagacctgaaacctaaccggttggaagcggcgaaggatgtggcggcagagtttattaacggacgtccgaatgacaatataggtataactttgtttgctggagaaagctttacgcaatgtccgttgacagtagaccatgccgtattgttgaacttgcttaaagatatgaagtgcgggctgattgaagacggaacggcaatcggtatgggtattgccaatgccgttacccgtttgaaggatagcaaggcaaagtcgaaagtcattattctgctgacggacggtgtcaataataaaggtgatatttctcctttgacggctgctgaaatagccaagagttttggcattcgcgtttatactattggggtaggaaccaatggtatggctccttatccttatccggtaggcggaacagtgcaatatgtcaatatgcccgtcgaaattgatgaaaagactttgacacagattgccggaacaacggaaggtaactatttccgtgccaccagcaactcgaagttgaaggaagtgtacgaggagatagacaagctggagaaaacaaaattgaatgtaaaagaatacagcaagcgccaggaagagtaccgctggtttgcgttggctgctttcttgtgcgtattactggaggtactgttacgcaactctatattgaagaagataccgtaaaaacggagaatgtcttttagtgtatcagtcattgcgtagccaaattgtaaattgtaaattgctaaattgtaaataaaaagatgtttcgatttgaagaacctgcatatttgtacttgttgctgctgctgcctttattggcggccttctacttgtactccaattatcggaggaggaaagccattcgtaaatttggtgaccctatactgatggcacagctaatgccggatgtttccaaataccgtccggatgtgaagttttggttggtttttgcggctatcgggttgttcacggtactgctggcacgcccgcagtttggttccaaactggagacggtaaaacgccagggagtggaagtgatgattgcgttggatatatccaattccatgctggcacaagacgtacagccaagccgcttgcagaaggcaaaacggctggtggcgcagttggtagataagatgcagaatgacaaggtcggtatgattgtttttgcaggtgacgcatttacccagttgcctattacgagtgattatatttctgccaagatgtttttggagtccatcgacccttcgctgatttccaagcaaggtacggcaattggagctgcgataaatctggctgcccggagttttacacctcaagaaggagtgggacgtactgttattgtcatcaccgacggtgaaaaccatgaaggtggtgccgtagaagctgctaaggctgctgcagagaaaggtatccaggtcaatgtattaggggtaggtatgcctgagggtgcccccattccaatagagggtactaatgattatcgtcgtgaccgtgaaggtaatgtaatcgttactcgcttgaatgagcagatgtgtcaggaaattgctcaggcgggaaatggtatttatgtgcgcgtagacaataccaacggtgcacagaaagcgattagtcaggaaatcaacaagatggcaaaggcagatgtggaaacacaggtgtacacggaattcaatgaacagtttcaggcagtggcatggattattctgctgttgttactggctgagatgttgatattggagcgcaagaatcctctgttccgcaacattcatttattctctaataagaaatgatgcgtatgttacagaaaaaatatattggaatagttttgctgctattagtggcagtttcagcttctgcacagaaggcggaacgcgattatatccgtaagggaaaccgtttttttaaggatagcgtatatgtggatgcagaagtgaactatcggaaggctttggaggtaaacccgaagtcaacggtttccatgttcaacctgggaaatacattgacccagcagaacaagccgcaggaagcgatggagcaatatgtgggagctaccaagatagaaaaggacaaatcgaacttagcacagatttatcataatatgggagtcatctttcattctcagaaggattatgcaaaggcggtagaagcctataaggagtcgttacgtaataatccgaaagatgatgaaacgcgctataaccttgctttggcacagaaacagttgcaagaccagcaacagaaccaggatcagaatcaagatcaggataaacaggaccaacagaaggagcaggataaactgcaggatcagcagaaagaccagcaacagaatcaagaccagcaacaacaaccttctcagccggaaaagaaagataatgagatgtctaaggaaaatgcagaacagctattgaactctgtcatgcaagacgagaaggatgtgcaggataaagtgaaaaagcagcaggtacttcaaggaggtcgtctggaaaaagattggtaacaaacataataggaataatatatgagaaaaatagttttcttatggatagcactgattgcagtcggtatgaatgtctttgccgatggcaaggtatcgtttactgcgtctgctcctgacgctgtggcggtaggagaccagttcagactgtcgtatacggtgactacacaaaaggtaagggattttcgtgctccttctatgaagggatttgatgtgttgatggggcccagccgctcgcaacagagtagcgtgcagatgattaatgggcagacgacttcaaccagcagtattacattcacttatattttaatggcgactgcagaaggtgattttaccattccaggagccactatcactgctgatggtaaccaaatggtttcgaattctgtacaagtaagggttcttccggcagatcaggctgctaatggagcttctggaaatggtggcaaacagagtgagggcactgccagccgcgcttcttccgggacatctgtatcgaatagtgatttgtttattacagctactgccagtaagatgacggtgtatgaacaagaggctttgctgctgacatacaagatatataccttggtggacttacgtatgtttgataatgtgaaattgcctgacttcaaaggattccattctcaggaagtagaattgcctaatgacagaagatggggattggagcattataaaggtagaaattatcagtctacaatctatcgtcagtttgtgttgttcccgcaacaagccggtaagctgacaattgatgctgcacgctttgatgcttccattgcaaaggctacacaagttgctgatccgttcgaggcatttttcaatggaggaagcaattacgtagaagttaaaaagacaattttgactccgcaactgacaattgacgtaaagcccttgccggcaggtaagccagccgatttttcgggaggagtgggagagttcaatataacttcttctatcaatagtacaaatgtcaagaccaatgatgctgttactgtcaaacttgtcatttctggtactggtaatctgaaattgctctctaatccggaagttaaattccccgaggattttgaagtatatgatccgaaggtggacaataaattccgtctgacaaattcgggcctctccggtagcaaggtcattgagtatctggcaattcctcgtaatgctggaacttatgagattcctgccgtaaagttcagttattttgatattaattcccgttcgtataaaacgttgactacggaggagtatgaattgcatgtggaaaagggagcaggtaatgctgctcagactattgcaaactttacaagcaaggaagagttgaaagtattgaatgaggatattcgttttatcaagcagaataatgttactctgtctcccaaaggtgatttcttcttcggttcgttgacgtattggttgctttatttgataccgggtattgcattcattacattctttatcatctatcgtaagcaaatagcagccaatgcaaatgtagcaaagatgcgtaccaagaaagccaataaagtggcggtgaaacgtatgaaacaagctggtaaattattggctgagaataagaaagatgcgttttatgatgaggttttgaaggctctttgggggtatatcagtgataaactgaacattccggtatcccgtttgtctaaggataatatcgaagaggaacttcgtaattatggtgtgaatgatgcgttgataaaggaattcctcgatgcattgaataactgtgagtttgcccgctttgctccgggtgatgataaccaggctatggataaggtatattcagcttctttggaagttatcagtaaaatggaaaactcgataaaacattaatcaggaggaaatggtaatgaataaaatattgttttttactcttagtctagtgatggcaattactgcctatgggcagaattctgcatctgtagatacattacagactgctagtgactctacatccgtcggttcacatgcggaattctctgctgcaagacaagaaagcaatgtgacaaaggctgaaggtgacagcgcctatatacggaatgattatgcttctgccattcaaatatatgagaatctgttaaagaagggagaggctgcagaggtctattataatcttggcaacagttattataaggcagatgatatagcaagagctatattgaattatgagcgtgccttgttgttggaacctggtaatgctgatattcgtgcaaatttggagatagcacgttctaagacaatcgataaggtaatcccagttcctgaggttttctttgtatcttggactaaatcgttgattaattgtcttagcgtagatgcatgggctaagttggggattgtattctttatactgttactcgtttcgttctatctctttttcttttcaaaacagattatgggaaagaaagtgggatttattgcaggaatagtattcctggctcttgttatattgagtaatgtgtttgctgctcagcaaaaaggcgaactgatggaatgtaacgaagctatagtgttagcacctagtgtcacagtgcgtagtactcccagtgagagtggtacaagtctgttcattcttcatgagggacgtaaagttgagataaaagacaactctatgcgtgaatggaaagaaattcgtttggaagacggtaaagtaggatgggttccagcttctgccatagaaggtatttaattttttctatattctaaaaacagctcgtataaaccgataattccgctttatacgagctgtttctgtctatttttaggagctttttctctgtacttataattctgcatacttgaaaatgattattttttggagaggcaatattctttttgaaaaaagataaagaaatagtttgttttatccttttttttccttaagtttatagcgtgataataaaaagtacagagtattaaccattaaatttatgaatatgagaacaataacatttaatgaattacgtaagattaaagactcattgcctagtggtagtatgcatagaatagccgatgaacttggactgaatgttgacactgtaagaaattttttcggtggacacaattttaaggaggggaaaagtgttgggattcacttggaacctggaccagatggtggattggttatgattgatgatactactgttttagagcgagctttaaaaattttagatgaaatggcaggtaagactgaagaagctgttcgagcttaagaagagaaagttagatagaatcccaattgctgacaacaattgggatttcttgtttgttttaatctcaaaatcaatgatatatggaagataaattagttactttggcaatcttaacgtacgcgaaagctcaaatattgaaaaatgttcttgaaaatgaaggtattgagacttatattcacaatgtaaaccagatacaaccggttgtttcttctggcgtacgtgtacgtattaaggagagtgacttacctcatgctctgaaaattactgaaagctctgcgtggttatctgaagaggtagtgggggggaagtcacctaaactggagaaggttagtaataaagtgctgattccagtggatttttccaattattctttgaaggcttgcgagttcggtttcaatttcgctcagaatataggtgcagaagttgttttgctacatgtttattttactcctatatatgcaacttctttgccatacggagacgtatttaactatcagctaagtgatgaggagaatgtaaggagtatcttacaaaaagttcatgctgatttgaatgcattatctgataaagtaaaagagaaggtagcttccggcgagtttccagatattaaatatacttgtgttttgcgtgaaggtattcctgaagaagaggtactccgctataccaaggaatatcgaccacgcattatcataatgggaactcgtggtaaaagtcagaaggatattgatttgatcggtagtgtaacggctgaagtgattgaacgtagccgtgtaccggtattggccattcctgaaaatactccattcaagcaattttctgaggctaagcgtattgcattcattactaattttgatcaacgtgatttaatagcttttgattcgctaataaataatctgaaatcatttaagttttcagtgtctctgatacatctttcagatgttcagaatacatggaatgaaataaaactggctggtattaaggaatattttcaaaaacaatatccacaattggaaatatactatgatgtggtaaagaacgataatctgcttagtagtttagacagttatatcaaaagtaatcatattgatattataacattaacttcttataaaagaaatatattttcgcgcttatttaaccctggcattgccagaaagatgattttccattctgatacaccattgttggtaatttacggaagaccgaattaggtgttgaatataggtatatatggtttctatccaatattagtattatgtttaatatggcgctggaataatttaatctaattttaatttcttctctccctcacttaagaaataacattctttacttaatgatataacaataataaaagcctaattaaattattaattaggcttttattataaagtattacatcaacttttcaatttcttcgaattcagggcccatttgcaaattataatacactctatatagaccatttaaccacaaatctttttgatcaggtttcagttctcttgccttttcataataaggttttgccttttcatagaaagtcttcagagtagcctggtcttctttatacttcggatcattaatatctgtagttgctttttctgagaaatcttgtgcttgtaagcagtaaatcaagcctaaattagagtatgcttctgcataattaggatctacttctatagtttttttatagaattcaatagctttatcatagtccttcatattgtgataaaggtagccttttacatacaaatagaatgtattgttaggatctttagccaacatatcatcagcaaactgcatagcttcgtcatatttgttgttattgctataataatcaatcaagtgaccgaagaagaatgaatgttcaggatatttctggataccttcttttaaagaagcaatccatttaacagtatcaccttcagctttcaatgcagtagagataaattccattgcgtatttcccaacttctttatcatcttgcgcataaggagcatacttcaaaatactaggataatcttccatcttagcagctgctaaacttgcataatatgctatttggggtaatacagtatctgtttgtaatagattttccttttcaaacatcgggttgatagcaatatcaatgtatgttgcaaagaaatctaatgcttttttattgtcttcattggctgcatcgccttctttctgtgaggccaaattaaagaattggataccgccattgatcagattaccgcgttctgctaaaattgtagcagaattagattttctatatttattcttgattttgcccttttcattgggaatttgtgccaattcgtcacatttgaagtagaatttacacatgttcaatgcgctattatatacctgaagagtgtcataaggttttctcagataggcattttccatttctttctcacttctttttctttggataagacctgctacatcccacgtttcggcattgtcctttgtttcgggattggttaaagcctgatttatcagttcctctgctttggcaaagtcaggatttactccgttagcaatacttttagcctcttttacgttcttttcttgggcgaaagtaaagcttgcgacaagtagtaaaaccattgaaaataatactcttttcatgattgtagaaaatttaaattaatattatgtctattcttcattttcattgtttacctcgttctgagggctttcaagggtattttcttccccctcctctataagttcctcttcattttctgaagtgactttacatacagagccgatttcgtcattacgtttctcaaggttgattagacgcacaccttgtgtagcacgtcccatgatacgaacatcggcgactttcagacggatggtaataccggatttattaataatcatcaagtcattttcatctgtaacagacttgatagttactaatttacccgttttatcggtgatattcattgttttcacacctttacctccacgattggtcttgcgataatcttcaatatccgaacgtttgccatatccttgttccgatacaaccataattgtttccgcttcaggatctttgatgcatatcatacctactacttcgtcttgaccgtcttcatccaatgtcataccacgtacaccggtggcagtacgtcccataacgcgcacagcactttcatggaaacgaatggcacgtccgttacggttggcaatgatgatttcattgtcgccgtttgtcatacgcacttcgattacacggtcgtcttcacggatagtgatagcatttacaccattttggcgaggacgtgaatactgctcaagcaatgttttcttaatgacaccattcttagtacagaacaatacataatggctgttgataaattcttggtcgttcaggttcttcacgcgcaaataggcgtttacagcatcgtcagagtcgatattcaacaaattctggatggcacgacctttcgaattcttagtaccttcggggatttcgtataccttcagccagtaacacttacctttctgtgtaaagaacatcatggtattatgcatggttgcaggataaatatgctctacaaagtctgcatcgcgggtttcggtacctttggagcctaccccaccacggttttgcgcacggaattcgctcagcggtgtgcgtttgatgtatcccatgtgcgagatggtgataatcatttcatcatctgcatagaagtcttccggattgaattcttctgatgaatagacaatttccgagcgacgttcgtcaccatacttctcttttacttcaatcagttcatctttaatgactttgcggcagagttcgtcattgacaaggatttcttccaaataagcaatctgcttctgaatttcctcatattcggcgtgcagctggtcttgcatcaatcctgtgagctgacgcaaacgcatttcaacaatggcacgtgactgaatttcactgagttggaatcgctccatcaaacctgatatagcatcattcggggttttagcagcacggataatcttgattacttcgtcgatattatcagatgcaatgattaatccttccagaatatgtgcacgttctttggccttgcgcaaatcatactgagtacggcggatgactacgtcgtgtctgtgctcaacgaagtgttttatcaaatctttcagattcaacagacgtggacggccatgtaccaatgcaacattgttcacaccaaaagatgtctgcagcattgtcatcttgtagagcttgttgagtacaatgctggcatttgcatcacgttttacatcaataacgatacgcataccttcacggtcggattcgtcattagcattggcaataccttcaattttcttttcgttggccagatcggctatattcttaatcaattcagctttgttgacaccatagggaatttctgtcacaacgattttatcgtgcgtcgaaccagtctcaatttcggctctagcacgcattatgacacgtccgcgtcccgtgagataggcttcgcgaacaccgctcataccgtatatatagcctccggtcgggaaatcaggagctttgacatacgtcatcagctcttctatatcgatgtcattgttttcaatgtatgcaatacaagcgtcaataacctcagatagattatgggtcggcatattggtagccatacctacggcaataccagatgcaccatttaccaaaagattcggaatacgggccggcatgacggtaggctcttgcaaagagtcatcgaaattgttctgcatgtcaacagtctctttctcaaggtctgtcatcatgtcttcaccaatttttcgcaaacgacactctgtataacgcatggcagcagcactgtcaccgtctactgaaccgtagttaccttgtccatctaccaacatgtaacgcattgcccaaggctgagccatacgtacaagagctccgtaaacggacgagtcgccatgagggtgatatttacctaatacttcacctacaactctggctgattttttataaggtttgtcggaggtatttcctaatcccatcattccgaaaagaattcttcggtgaacgggtttaaaaccatctctaacatccggaagggcacgtgaaacaatgaccgacatagagtagtcaatgtacgatgacttcatttcctcctcgatgttaatctttataattctgtcttgttcaagcatttaaaaagattattaattatacattttcgggttcgtgaaaaaccacgctaaagtactgcttttttacgatatacaaaagttttcctccataaactttgttgcctgcaacataaatatggaagtactccctcccttcctcaccaaattgctattaatatataaggtataaagtggaaaaacagatttgaaatttatggcacgggatttgtatactattaaatcagttaaatatgatacgctgaattaataaatgcgtatctttgtcgtggataacctttttaattgaggagaattataaaatatgaataatcaattttcacaaagagtttcagacataattacttatagcaaggaagaagccaatcgattgagaaatcgctatattggtccggaacaccttctgctcggcatgctgcgtgatggcggaggaaaagctattgaaatattgttgaaacttgatatagatttaaaacgagtaaaaagtcgtctggagggtttcctaaaggatgccgaggacgatactctcttgccggacgctgaagtgcccttgtccccgatgacggctaagatattgaagatgtgtatgcttgaagcgcgtttgctgaaaagtgcaactgccgatacggaacatgtattgctggctatcttgaaagatggcgacaatcttgctgcaactgttttggaagaacaccgggtggattatcaggctgtatttgaacagctttcgatgaaatcgaccaatccgaatgcgggaatgggattcaccgaggatgatgaagaggatgaagaagatatgaatatgtcccgctcctcccgtactgggggagctggttcggcttcggctgcacaggctgcatccagaaagccgtccaatgatactcctgtgctggacaatttcggcgtagacatgacgcgggctgccgaagaaggcaagctggacccggttgtgggtcgcgaacgcgagattgaacgtctggcgcaaatcttgagccgccgtaagaagaacaatccggtgcttatcggtgaacctggagtcggaaaatctgccatcgtagagggtttggcattgcgtattgtgcaaaagaaagtttcgcgcattttgtttgaaaagcgcgtggtgatgcttgatatggcctctgtggtggcgggaacaaaataccgtggtcagtttgaggaacgtatccgctctatcatcaacgagttgcagaaaaatccgaatgtcatccttttcatcgatgaaatccatacgattgtaggtgccggtgctgctgccggttccatggatgctgccaatatgctgaaaccagctttagcgcgtggtgaaatacagtgtattggagctaccactctcgatgaatacagaaagaatatcgagaaagacggtgctttggaacgtcgtttccaaaaggtgattgtagagcctaccacagctgaagaaacgcttcagatattgaagaatatcaaggagaagtatgaagaccatcataacgtgagctacacggatgaagccttggaagcatgtgtcaagttgtcagcacgctatataaccgaccgcaacttcccggataaagctattgatgctttggacgaggcgggttcgcgtgtgcatttgacgaatattaatgttccgaaagaaattgaggaacaggaaaagctgattgaagaggcacgtagcctgaaggctgaagctgtaaagtcacagaattttgagctggctgccagctaccgcgaccgtgagaaggaactttctgtccgcttggaggagatgaaggttgagtgggaagcccgtttgaaggatgaccgccaaacggtaggtgaagaggaaatagccaatgttatttcaatgatgtccggtgtacccgtacagcgcatggcgcaggcagaaggacttaaactggccggaatgaaggaagaactacaggcgaaggtgatagctcaagatgctgcgatagagaaacttaccaaagcaatcttgcgtagccgtgtagggttgaaagacccgaaccatcccatcggaacttttatgttccttggccctactggtgtgggtaagacgcatttggcaaagcaattggcaaaatatatgtttggctctgccgatgccttgatacgtatcgatatgagcgagtatatggagaaatacaccgtatctcgtatgattggtgccgctccgggatatgtgggctatgaggaaggcggccagttgactgaaaaggtgcgtcgcaagccgtattccattgtcttgctggatgagattgagaaagcccatccggacgtgttcaacatcttgcttcaggtactggatgaaggccgtttgactgacaattatggcagaaccatcgatttcaagaatacggttatcattatgacctccaatatcggtacgcggcagttgaaggaatttggccgtggcgtaggttttgcggcgcaaaaccgcacggatgacaatgaacattcgcgcagcgtgatacaaaaggctctgaacaagacctttgctcccgaattcttgaatcgtttggatgaaatcattactttcgaccagctctctttggaggccatcacaaagattgtggacattgagctgaaaggtttgtacgaacgggttgaagcaattggttacaagctggttgtggaggatgatgcaaagacattccttgcttcgaaagggtacgatgtacagtttggtgcgcgcccattgaagcgcgccattcagaaccacttggaggatggactttccgagctgatagtggcggaggagttacagccgggtgatacggtaaacgtatcagtagacaaagaaaaagacgagctgagcatcaggaaggcataagctgttctttataaaaaccgtcaaaatgtcagtccttatgggctggcattttttttgtgctatatctgccggaataattaaaaatataaatctaaaaaatataaatgtagtatgcaaaaaggtaatattggggtaactactgagaatatcttccccgtcattaaaaagttcttgtatagtgatcatgaaatttttctccgtgagttggtttctaacgcggttgatgctacacagaagctgaaaacactctcctctatcggtgagttcaagggtgaagttggcgatttaaccgtacatgtctcgctgggaaaagataccattacggtgtccgaccatggtataggtcttacggctgaagaaatagacaagtatattaaccagatagctttctctggcgccaatgacttccttgagaaatataaaaacgatgccaacgccatcatcggccattttggattgggtttctattcggcttttatggttgccaagaaagtcgaaatcatcactaaatcctatcgggaaggcgcccaggctgtaaagtggacatgcgatggcagtccggagtttacgattgaagacactgataaggcagaacgtggtacggatatcgttctttacatagacgatgactgcaaggaattccttgaagaagcgcgcatttcctctttgttgaagaagtattgcagcttcctccctatcccggttgcattcggcaagaagaaagaatggaaagacggcaagcaggttgaaactgccgaggataatatcatcaatgattccaacccgttgtggacgctgaaacccagcgaattgaaagatgaagattataagaagttctaccgtgacctttatcctatgtccgacgaacctttattctggattcatctgaatgtggattatccgttccaccttaccggtattctgtacttccccaaagtgaagagcaacatcgagttgaacaagaataagattcagctctattgcaaccaggtatatgtgacggattcggtggaaggtattgttcccgacttcttgaccctgctgcatggtgtgctcgattcaccggacattccattgaacgtttcccgttcttatttgcagagcgatgccaacgtgaagaagatttctacatatatcacgaagaaggtgtcagaccgtttgcagtctatcttcaagaatgaccgtaaacagtttgaggaaaagtggaatgacttgaaaatcttcatcaactacggaatgcttacgcaggaagatttctatgatagagccaaggattttgcccttttcaccgatacagacagcaaatattatactttcgaagagtataagacgttgattaaagataaccagacggataaggatggaaatctgatttatctgtatgccaacaataaagatgaacaatacagctacatagaggccgctacgaataaaggatacaatgtgctgttgatggatgggcagctggacattgcggtggtgagcatgttggaacagaagttcgaaaaggttcgcttcactcgtgtagacagcgatattattgataatctgattgtcaaggaagacaagaagaacgaagcgttggaagccggcaagcaggaagttctttcttccatcttcaagagccagttgcccaagatggataagacggagttcaacatcacggcgcaggctttgggcgaaaatgccactcctatcatgataactcagagcgagtacatgcgccgtatgaaggaaatggcgaatatccaggctggaatgagcttctatggcgaaatgccggatatgtttaacctggtattgaattcagaccataagctggtaaaagaagttctggcagatgaagataaggaatgtgctgctgccgttgctccggttcaggcagagatggatgaagtgaacaagcagcgtactgacctgaaaaagaagcaggaaggcaagaaagatgaggatataccgactgccgaaaaggataaagtgaatgagctggataagaagtgggacgaactgaaaacacagaaagaaggcatcttcgccgattatgctgccaagaataaggttgtccgtcaactgatagatttggcactgctgcagaatggtatgttgaagggtgaagctttgaacaactttgtcaagagaagcattgacctgataaaataagcccctttaaatttgcatttaatatatgcaagggtattgtgattcttcggagtcgcaataccctttttttattcattttcaccaattagggtgtgattttcttcgttgaatacggcatttttagaaactattgtttatatttggggcaatgaacatttatcttactcggaatagcatagttatgaaaagagttttattgtttttttcgtttcttctatgtggctttattttacaagctcagaaagtggggcttgtactgagtggcggtggagcaaaaggcatgactcatataggcattatccgggctttggaagagaataatatccccattgattatataaccggaacctctatgggagctatcatcggttctctgtatgctatggggtattccccggacgatatggaggcgctgttgcgctctcccgactttaagcgttggtattcgggcaaagtggagcctaaatacgagtattattttaagaagaatcgtccttcaccggaattttttaatatccgttttgcttttagggactcgctgcatataaagccccagatacttcccacaagcatggtcaaccccatacagatgaacctggtatttgtggaattgtttgcacgtgctacggctgcatgtggcggtaatttcaacaaactgtttgttccttttcgctgtatagcatccgatgtgtacaataaaaagccattggtattgagtaaaggggatttgggagatgcggtacgtgcttccatgagctttccatttgtcttcaaaccgatagaaatagacagtacgcttgcttatgatggcggcatttacaataatttccctacggatgtgatgcgggaggattttcatccggatgtcatcattggcagtgtggtggcggcaaatcccggtaagccgaaggagaatgacctgatgagccaattggagaatatgattatgcagaagaccgattattccattccggactcattgggcatagtcatgaccttcaagtacgatgatgtcaacctgctggattttgaccgtctgcaggaattgcacgatataggctacaaccgtactcttaatatgatggattccatcaaaagccgtgttcaccgtagggtgaatgctgataatgtgcgtttgaggcgccttgtcttccggagtaacctgcctcaattccgttttcgggatattattattgaaggggcgaatgcccaacagcaagcctacatcaaaaaagagttccatgatgaagagcatgaagtctttacttatgaagacttgaagcgcgggtattttcgtttgctggcagataatatgatttcggaaatagttcctcatgctgtgtatgattcggaatccgatttgtatgagctgcatttgaaggtgaagatggaggataatttttccgtgcgtctggggggcagtgtctctaccacgagctcaaatcaaatctatttgggaataggatatcagaacttgaattattattccaaggaaatcacttttgacggtcagttgggtaagatttataataatgcccagttgatgggtaagattgatttgcctacccacatatctacgtcctttcgttttattgcttcaatcagtaccttcgattactacaagaaggacaagctgttttccaggaatgacaaaccttcattcaattcaaaggacgaacgttttgtgaagttgatggttgccttgccgtttttggccaataagcgtgcggagttcagtctgggatatggccaactggaagataactactttcaatccagcgtaatagatttcgataaggaccgttcggacagaagtacctacaaacttttgggaggttccatcggtttctatgggagtaccctgaatacgcggcaatacgcgacaaaaggctatctggagaaactgatagcccaggtatttaccgggagggaaagatttgaaccggggaatccgcgagaagggtacagtccttctccgcaagaacggcaatcatggttgcaaatttcttatatgaaagaggcatatcacacaatggggccgaagttcaccctgggatggatggcagaagcactgtattcgtcgaaaaatttctctgagaattatacggcaaccatgatgcaggcaggagaatttgcaccgactccgcatagtaaactgatgtacaatgaagctttccgtgccaaccagtatgtggctgccggtatcaaacccatatatgttttgaacgacatgttccagttccggacagaattttatggctttacaccgatttttccgataaaaaagaatgcattgaataaagcatattatggaaaagcattctcccgctttgagtatatgggagaagtttctgttatttgtcatttgcccttcggagccatctctgcttatgtaaatcattatagctcaccgagaagggagtggaatgtggggatgaccatcggctggcagttgtttaattatcgctttgtcgaataaatttcttcaaaaaaagtttgtatatcgtttgctaattcggaaaaagtacgtatctttgcacccgttaaacaaagaggccgcgtagctcaactgaatagagtagctgactacggatcagccggttacaggtttgaatcctgtcgcggtcacaagttttcataatttttttaagggtcgcgtagctcaactgaatagagtagctgactacggatcagccggttacaggtttgaatcctgtcgcgatcacaaagaacctccgcaagaaaacttgcggaggttctttgtttttacagcaatggcatatagttgatgttctccccttgtatggcactggcgcgtgttctccataatgaaacaaactgtttcccttaactaaacactttgtttcattatggagaacactttgtttcccttgacagaacactttgttccatcatataaaaacaaagtgtttttctctgctgaaacaaagtgttcagtgttgtgaactaatagattagctgaaataatagtcttgtcttgattgagctagagacgtctttttctcgatttaaccagatgtctttttgctttataacgtaatcagtagactgttttgggattattgtactgataaatatagtcacataggaaaaaaagaaggagttaattccgtgtttccacaaaattaactccttgcatatctgatattaatatgttgtatactggaaattaatatcctataggggcggtataaggccttagcatttgatgttcaattcatccagaatcttgcgcatggcttcgaaagtagtgattctggtcggcaccaatggcaggcggagcttgttctcaatcattcccattacattcagcatggcttttactccggcagggttgccgtctacaaacagaagcttgaataattcggcaaatttgtggtgaatggtcaatgcattggcatagtccccttgcagtgccagacgtaccatacggctgaactcacgtgggaacgcgtttccgatgaccgagataatgccgacggcccccagggtaatcagagggaaggtgatgccgtcatcgcccgaaataacgtcgaaattggccggtttgtttttgatgatgtcgtccatctgcgtgatgtcgcccgaagcttctttgatggctatcacattcttgaaatcacgtgcaatgcgcagggttgtttctgccttcatgttcacgccggtacgaccggggacattataaagcacaatcggcaaatccgttgcttcagaaatggccttataatgctgatatataccttcttgcgatggcttgttgtaatatggaacgacggatagaatggcatctactccggtgaaatcgtcatttttcagtgtttccactatggcccgggtgttgtttccacctacgcccagcaggataggaattcttccgttcactcgctcgatgaccattttcttgattttctttttctcttcttcagtcagagtcggagtttctgccgtggtgccgagcacacataaaaagtcggtattgttttgaagttgatagtctaccaaacgcatcaacgcatcgtaatcaacgctttcatcctctttaaatggagtaatcagcgctacccccattcctttcaatcttgtctgtatcatgagtattataaagtaatctctaattaaatgactcgcaaaagtacgaattttttcgatttaccctacaaatataagccataaaaaagctttttgtggaaatttgttaggatagcaatgccaaaaactcatcttcgctcataatctttactcccagtttctgcgctttctccagtttggcaggtcccatattttctccggccaggataaagctggttttggaggagatactgccgacgtttttcccaccgttcttttcaatcatctctttgtattcgtcccgtgagtggtgggtgaatacgccgctgatgacgatggactggcccgccagtttgtcggtgtatccgctgaggtcttcttccgtccggtggagttgcaggccgttcgatttcagccgttccaccagctctctgttggcaggattggagaagtaagttataatgctctgcgctattttttcaccgatttcatcgatgtttttcagcttttcgaggtctgcgttttccagctcttcgatgtccgtaaaggacttggctattttcttggcaaccgtttctcccacgaagcgtatgcccagtgcaaagagcactctttcgaatggcacttctttacttgccgcaataccgttgactatgttttctgctgatttttcgcccatccgttccaggttcttgatgtcgtcggttttgagccggtataaatctgcagtatcctttatcagccccaatcggtagaacatgtctacggtttcaggtcccagtccgtctatattcatggctttgcggctgatgaaatgctctattttccctttaatctgcggaggacaagcggtttcattggggcaatagtgggctgcttctccttcaaaacgtatcagtttgctgccgcattcgggacaatgggtgatgaacttcactttttcaccgataagcatactgcgggcatccttatcgacaccggttattttggggatgatttcaccgcctttttccacatacaccatgtcgcctatatgcaggtccagcccctcgataatatctgcattgtgcagggaggcacgtttcacaatggtgccggacagttgtacggggtccagattggcaaccggagtgactgcgccggtacgtcctacttggtaggtaaccctattcaagcgtgtcagtgcacgttctgcctggaatttgtatgcgatggcccaccggggggacttggctgtgaatcccaaattcttttgttgtctcaagctgttgacttttagtacaataccatcagtagctaccggaaggttcttacgctccgtgtcccaataattgatgtattcgaagacttcctccaggctgtgagcttttctggtgtgctctgatgttttaaatccccagctggcggcggcttgcagattctcgtaatggccgtcgcagggcaattcctctcccaatagatagtagagataagcatccagctttctggatgctacgatggcggaattctgcaacttcaaggtaccggaagcagcgttgcgcggattggcgaaaagcggttcctcacgtgcttccttttcccggttcagttcttcgaaaaccacccagggcatcaggatttcccctctgatttcgaatgatttaggataatccccatggaggaccagtggaatcgttcggattgtctttacattgtccgtcacgtcatcgcccttttcgccgtcgccacgggtgacggcacgcaccagtttgccatcctcgtaagtcagcgagatggaagtaccgtcatacttcagctcgcagcagatttcaaaatcctcattcaacgctttctttacccgttcgtagaagtcggtcacttcactttcggaataagtgtttcccaatgaaagcatgggatatttgtgtgccacttgtgtgaagttcttattcaaatcacttcctacacgcatcgtgggcgaattatcatcttggtattcaggatgttctttctctaagtcttgtagctcgcgcatcaggtcgtcaaactccttgtcggatatttcaggagcattcagcacataataattgtagttgtgctggtgtaattccgcacggagctggtctattttttcttttacagtcatagggttttcggattgtttgaacgcaaaaatacgggtttctccccgaatatttgtacttttgcagcttgaaatagctaaaataaagttatatgcgcattgacattatcacagttttgccggagatgattgagggattctttaactgctccattatgaaacgtgctcaaaataaagggcttgcagagatacatatccataatcttcgtgattatacggaagataagtaccgtcgtgtagacgattatccgtttggcggctttgccggaatggtcatgaagatagagccgatagagcggtgtatcaacgccttgaaggccgagcgggattacgacgaggttatctttacgacccccgatggtgagcagttcaatcagccgatggcaaatactctttcccttgcccagaatctcatcattctctgcgggcatttcaaagggatagattaccggattcgcgagcatctcatcaccaaggaaatcagtatcggcgactatgtgttgactggcggagaactggcggcggctgtcatggcagatgccatcgtccgtatcattccgggagtgatttctgatgagcagtctgcactttcagattcttttcaggacaatctgctggccgcaccggtctatacacgtcccgctgattacaatggatggaaggttccggatattttactctccggacatgaggccaagattaaggaatgggagctgcaacagtcgttggaaaggacccgtagattgcgtccggatttgttgggagagtaagtttactgatgtaaataaaaagaaaaaggacattcgtcaatgaatgtccttttttatgaatatatattgcgaatggcaatctcttgttattctttatacctcgagtgcaccgataatatcctttatagactgataaccgtgtctgtcaagatagtcatttattccttctaccactttcactgtaaccgccggatcaatgaagtttgccgtaccaatctggatggcagaggcacctgcaagcatgaattccacagcatctttccagttcatgatacctcccaagcctatgacggggatttttaccgctttggctacttgccataccatacgtaaggcaatgggtttcacggccgcaccggacatgccaccggttacagtggagagtatcggacgcctgcgttccgcgtctatagccattcccagcagggtattgatgagggaaacactgtctgcaccgccattttcggctgcgcgggctatttcagtgatgtcggtaacgttcggggagagctttacgataagtgtctttttgtaaactgagcgcacggctttcaccacttcttcggcgcccttggcggtaacaccgaatgccattcctccttgcttcacgttggggcaagagatgttcaattctatggcaggaattttgtcaagttcattaatgattgcggctgtttcggcatagtcttcgatggcagaacccgaaacattcacaatcatgttggtctgaatgtccttgatgcggggatagatgtgttcaacaaagtaatgaacacccttattttgcagtcccacagcgtttaacatacccgaaggagtctctgccatgcgcggatatggattgccttcacgtttgtgaagagtggttccctttacaataataccgcctattcgcgatagttcgatgaaatcggcgaattcttcaccatatccgaatgttccggatgcagtcatcaccggattattcatttgtaattcaccaatatttacacttaaatctgccataatagtttgtttatattaaaaaccggaccttctttacatacgcacaaatgaccttccgtggtattttctacacagcatagacaagcgcctatgccgcacgccatcatattttccaaagatacttcgcaactgatgcctttacttttggcatactttgctactgccatcatcatcggtttggggccgcaagtatatatctgctcaaagcacaccttatttaatatggagtgttgtgttacgtatcccttctctccgtggctgccatcttcggtggtggtatacacctcgccataggcggcaaattgttccaattgaagcaaatctttgtcacttctggcacccagcaggaatgttggcttgcaacctttcttggcgagctgttcgcctaaatataacataggagctgtacctacacctccacctaccaataagagcttgtctgagggcttttcaggcattgtgaagcagtttcccaacggaagcactacattgattatatcgcctgcttttgcttctcctaatcgcttggttccgtcgcctacaagttggattaagaaccagacctcgttccgttgtctatctacataattgatggagatggggcggcgcaaaaaagtggtaggcgagccgtccacgcgaatctctgcaaattgtcccggaagcatttccggaagtggggatggagaagtcagcttcaacaacacgtagttggcatgcaagcggaggttctctgtcactgtcagatctaaaatatactttttcatatctataaagagggatgtttttctttcgggtgcaaagatagtgtaaaccgagtgcagaataaaatgaacccgtttcttttttatgccggggcgttagtctatttccattctcattccttaattttccggtttgaaagtctcgtaggtattgtcatcaaagaaaattcttatttctgtgatttttctgggaggtctttctttgtagataatctcttgttttacaatctctttaggcgattttagggctgtctctaatgcaatttccttgcgatttttagattcttccggcccgttggacagattttccggattctcggcgaataaaggatagtcgaatccatcgttttcgggtgaatccggattattactcatattaccttttccggtaagcagccactccaagtttatgtcgttgtatcgttgatgcaatcggagaatgacttccgtacttggatatttgttacgcggacccaagatgtgagaaatggtggcttgggccacgccgatactctcggcaaaagctcctgctgtcagtttctcccggtccataaccattttgaacctgtcttttatactcatggtttatgtgttattacaattgtacatgttatttattggattacaaaagtaaaaaaacgacatcacaaaagcaaattaaaaatgtgatattttaaagtttacagatgaaatgttattattacaatattcatcattacaaatgctataatacaaattacgagtaaaataggtgtttatcgtaagtttaataaaataatatatttgtctaattattagcatattatatagttatttttttgatggtaaatgctgtattacatttgtttgtcgctcattttatataatatataatttaatgatttgattaattatcgtatataattgatatatacatatttatcgattataattacatgggttaacccctactctattatttttgtaaaccatcagtttgcgatattaaatattacttattacatttgtgttttcaaatataatattacatatgttatagtgcacccgtcatatagatatttatgtaatgtattaaattcacaatagtcaattatcctagttgtgtattacaactattgtactcttgaaaagtgtaacagatttcatatatgacgatttaaagctgaattgctccatctcttctttttactaaaggagaaagatgtgacataaataagaaaataagatgctttatttattttctagtcttcaagacttaaatccttgctttatttctgtataattggtcgattcgttataaaaacacgattctcagagcttataaatgaacgtaatttgctgtaaatatgattattatctcctattttactgtctatgctaagggacgaaatagaaaaaagggggataaatccccctaaaaatgacataatgatatcaaatcagtctgttttatgcttttccctttttatggaaaagtatgctgtatggaagttaatgtagaatcttaaagaccaattcccggaggatatctccatcgcttagggaggaatttcctactcctttggatttggcatctgcatatcgaatttctccgattatctgcatggtctttactccgctgtaacggcgcatggcacttaggtattcgcgcgactgccagggagtctttaatcctatgaaactggcaataccctgctcggtcttttcgggtgcataataagccaacatcaagttggagaagaagccgaaaagtaaagataaagtcatctggatagggtttattttcggattttcttcaaaatattttattattttattggcctttagtatgtctttttctacaatggcactgcgaagttcaaagttattataatccttactgattccgatgttacgttctatctgttcgggggtgacgcgtgtctgaccttttggaagagttataatcagtttttccagttctcctgtaaggcggctgaggtccgtacctacgaaatcggcaagcatggaggtggctttaggatccaagtctacacctttgcgcttcatgtatgaagtgatgaatgccggtaactgggcatccttcaccttcttggattcgaatagaactcccaccttctctatttcggccgccagcttctttcttctgtccagcaccccatgtttgtggcatagaacaagaatggtggagttcaacggtttttgcaggtagtatgaaagctcctccatgttgcggatggcctgcgcttcctttacgactacgacctggcgttcggacatcatcggatagcgcttggccgcattgatgacagtggctatatcgacatctgcaccatagactacggtcaggttgaattccttttcggtgtcagtgagaacgttgtctacaatatagtcggagatgaggtctatgtaatacgattcctcgcccatgagatagtagacggggcggtattgcttggctctcaactcttttagaatatcatcacaggtggtttcttgttttgccatataataaagtaagtgctatacgagggatgtcccgtaacggattaccagtcgaacttcaagtgttttacggttttcttttcatcaataatcatgcgcaaggatgcgatgccgatttcaacatgctcctttacataattctgggtcaccagattgtcgcttttatcggtttttacaccttccggaatcatcggttggtctgaaaccagcagaagagctcccgtgggaatatgattggcaaaaccgcagctgaatagggttgccgtttccatatcgacagccatggcacgggttttcttcagatattctttgaattcctcgtcatgttcccaaatgcggcggttggtggtgtatacggtaccggtccagtagtcacgggcataatcgcggatggcagaagaaacggcacgttgcagcataaatgccgggagtgacgggacttcaggtgggaagtagtcgttggaggtaccctcgccacggatggcggcaatgggaaggatgaggtcccctattctatttttcttgtctataccgccgcacttacccagaaacagacatgccttgggcttgatagcactcagcaagtccatgataatggcggcattaggacttcccataccaaaattaatgatggtcattccttctgcactggcagatatcatgttggcatctttaccgagaatgggaacattgaacttttctgcgaaaatctctacgtacttgttgaagttggtcaacagaatgtactctccaaaatcctccaggttacgctttgtgtaacggggcagccaattggctacgatttcttcttttgttttcataagatttcattaaatttgtgttcccaaaagacgggaaccattatttaacttacaaatgtagtaaatgttatcgttaaacctaccagcattcgatgctaaaattgccgcaaggaacggaaaaaatgttattttcgatgtaatccgtcgtcgttatgtcgccttgacccctgaagaatgggtgcggcagcacttcgtccactttcttcttgctcacaaggggtatccgcaggcgcttatggcaaatgaggtgcaggtacagctgaacggtacaaagaaacgctgtgatacagtgctctatcgacgcgaccttaccgcccggatgattgtggaatacaaggcgcctgaaatagaaatcacccaaaaggttttcgaccagattacccgctacaacatggtgctgaaagtggattatctgattgtcagcaacgggcttcagcattattgttgccgcatagattacgagcacaacagctatacttttctgcaggatatacccgagtatcaaaacttataggaggagctaccaatagcccccttgcctctctcatctcatcgcatcatataccatgcgtgatatgcgggcgatgatgttcgcattgtcctcatccgtctcgtatgagtccatgacgaaggcggcaatgtagtatttccggccgtcgggaaggataacgaggccggcatcattatctgcagttttcataccgtcggcattgcggtcggaagagccggtcttgtgtcctaccacggttttggctggcaacatacctttcagtttgttggcaccggtttcagtatctatcatggtctgccacaagaagtctttcagctccttgttggagaacaactctttttcatcagccgttctcagtagtcggaccatagcggaaggagtactccagttgcggtatacagcctcgaagctggagtgcatgccgtcttctgtttccgagaggttgaaggagtcgatactcaaccggcagatatagtcattgatatgtttgatgcctcctgcatattctatcaagatgtcgcaggcattgttgtcgctttgggaaatgctgtattgcatcagttccctaagcgtaatcgtgaaatcctggtcgggaaacttcttccgcagggggctgtaggtattgggcagcatttgggatgcctttatggaaacaatgctgtccaggctgatgctttgcttatccatcttgtccagtacggccagtgccacatggaatttgaatacactgagcaaggggaagtgtacatggtcgttataccggagcatgtctcctttgtctgtccatacggctataccaacggtggctttcttgccattgagcagactgtcaatccggttttcaagttcagacatttgctgcgcccggatgacggtagctatacaagtgaataaggtaagtatggcgatgaaatatgctttcataacttcaatttctttaagaggcaattcgcacgcaaagatacaacttttagcagcaagttgctaaaatgagttatggattatgggctataagtgtgatagcttataacccataatccataacttgtagctcatcctccctattgtttcttactgaacttctcctgcaacttctgcatcaattcgtagaaattaggaatatagaccgtggcaagcaaggtattcagtgccataccgaacactacggcggctcccagtgcaatacggcttcccgcccctgctccggttgcaaaaagcagcggcataaccccgaatacgaatgcaagcgatgtcatcagaataggtcgcaggcggatatgtccggcctggaatgccgcatcgcggattgaattgccttgtgcacgaaagtcacgtgcaaactccacaatcagaataccgtttttggcagacaaggcgacaagcagaatgattccaatttgtgtgtagatgctgaccggagtccccatgacatagcatcccagcatggcaccgagcagtgcaaccggaagtcccattacggcagctaccggactggtccagctttcgtattgtgcggcgagtacaaggaaggcaaccagcagtgccatgacgaatacgacagtcgtcgtggttcccgcctgcgtctcctgataggctaccgaagtccattcatagccgaactcgtctccgagatgctctttgattagactttccatttgccggataccctctcccgaactactgcccggagccacattgcaggtcacggctgctgtggagtacatgttatatctgtttatctggtccatgcctaactgctcttccacccgggtgaaggaagagaaaggtaccatttctcccgatgcattgggaacgctcaatttcagaacatcgtcgatgacacgctgggcacggtcgcccgcccccaatttcacttggtagatgtgtccgaactgtacatagtcgttgacgtaggcctcccccatatagtaacccaaggcggtgaatacactgttcagcgggatacccatcaactgtaccttgtcgcggtctatattcaaaaaatattgcggtacattggcttggtactggctgctgaccgatgccagtgccggataattgcggtaatgctccatcaaggtctctacagcacgctgcatctcggtggcgccgaggttgtggcggtcttccaattggagttgcaggcctccggtagctcccagtccggggatggcaggcgggaccatggcaaatatctctgcttcctggatgccatatacttccatattgaagcgctgtactacggcttcagccgtatgttcctttcccttgcgttcattccagtttttcagtacgatgaagtaagtggccgcattgctttgctctccacctcccatcacggagaagccggatatgccgatgtagtcctttatttcggggtaagaatcgagaatcttatttatctgctttcctacggcttgggtgcgctccaggctcgatgcagggggaagttgtaccactgcgaggaaatagccgtcatcttcttccggaacaaatgtggacggccatttgacaaacagcaggacagcaatcaatgtgaaaaccgcatatgaaacgatggaagcgacagggcgttggagcaggtactccactatccggtcgtagactccttgtgtcttgtcgtacagatggttgaacccccgatataggggatttttggaaggccgggtaggttgcagcatcaaggcacagagtgccggagtaagggtcagtgagttgaatccgctaagtacggtgctggctgcaatggtcaaggcaaactgtttatacagttgtcctgatatgccgctgacgagtgttgtcgggataaatacggcaagcagcaccagcactaccccgacaatgggtccggtaatctctcccatcgcttcggtcacagcctggcgggaggtgtagcgccccgtgtccagcagacgcgtggagttctccaccaccacaatggcatcatccaccacgatggccacggcaagtatcagtccgaatagtgtcagcgtattgatggagaagccgaacaaggacatgacggccagtgtgccgatgagtgataccggaatagtgatgcagggaatgacgaccgcccgccagttctgcaggaacaggaagatgacgagaactaccagcagggttgtttcaaggaacgtcaccatcacttcgtctatggaagcatgaatgacatccgtagtgtccagggttacattgtattgtatgcctgcagggaaattttgcgagagttcctgcatttttgcctttactcctttggaaacgtccagcgagttgctgccaggttgctgatagatagcgatggcagcggtgggtttcccgtccagttgggatactacgctgtaagaggccgagcccaggtcgatatgcgccacgtcgcgcagacggagtatcttccctccggtttcggtacgcaggataatgttgccgaactcttcgggtgaggtaaggcgcccttttacggtcaggctgtattgataggcatttttattgtctgtgccgatgggttgccctacgttacctgcgctgacctccacattctgtgattggatagcttggtatacatcggccggcgaaagatagcggatgcgcatggcggcagggtcgagccagatacgcatggagtagtcccctgctcccatcacattgacggcgcctacaccgggcacgcgtgttaactggtctacgagattcagcttggcatagttgctgaggtaaagtccgtcgtagtctttgctgtccgacgtcatcgtgaggaacatcacgatgttcgatgactgtttctgtacagtgacgccttgcaccacaacgggagtaggtagtgacgactgggccacgcttacccggttctggacctgcacggtagccatatcaatgtctgtgcctacggcaaaagtaatggtaagagagtaagcgcccgatgagctggagttggaggacatgtaaagcattccgtccactccgttgacttgctgctcgatggggatgccgacggtttgtgccaccgtctgcgcattggctccgggatatacggcactgacctgcacggtgggtggtgtgatgtccggatattgggcaatgggcaggatgcccagtgtgaccagtcctgctacgacgatgagcagcgccaatacggtagcaaagataggacggtctatgaagaattttgaaaacataggctttggtattaatcaattcatattagttgtcaatgggatgtactttcattccatcccttaccttcatcagtgctttggtgacgtagcgctcccggggagtgatgcctgcccttatctggcgcaggctgtctcctatcagttgtccggtttctatatggcggtagcgcactatattcgaatcgttgactacgtatatgtatttccccaactggtcggtaccgatggaggcgtctggcagcaggatagcctgctgttgctctccgtagggcaaggtgatgctgacgtagaggccgcttttcaacagtcctttagggttgtcgagacgggcgcggatgttcaaagttccggtgttcaagtctacgttgggcgaaagatagtccagctgtgcgggataagtgaggagttcgtctttacccaggctgacactcacttgccgggggatactgtctccctgctgcatcagcatggagagccattggttgtctgccacattgaagtaggtgtacaaatggtcgtctttgtagatggttgccaatgtgacgggctgcacgctgccgcctacatagcctccggcatccaccaggttacggcttacggtgccgtcgaagggagcacggacggtgcagtagctcagattggtgcgtgctgtgttcagggctgcttccgcattgctcactgcagcctgcgaagttgccacgttggattgtgcttgtagcacttgtatacggcttacagcatcgcttttcacggcttcctgcatacgtgtgtagttgttttgggcgtattccaggttggcgcgggcagtgttgagttctgcttctgcctgccgcacattgtcttgatagactgtcggttcgatgacaaaaagtacttgtccctggcgtacccggctgccgggagcgtaagcgatggtctgtaaggttccgctgactctgcctaccaggtctacggtcttttcagaagtcaggtagcccggatattctttcgtcagcgtaatgttctgcactgtcggacgggccacgcttatctcgggaacgggcatcgtttgtgccgtttctttccttcccccgcatcccgttgccagcaatggcaggatgagcagggtgatgtacatttgatttttcatatacggttcggtttagtttatattcttatttctgattcatttcatatccacctcccaatgcctggtataaggctatcagatgcagcaaggagctgccttgtgcctgcaccagctgattttcgtatgtcaggagtgagcgtagtgcgtccagtacgttctggaagggagtaagtccttgtttgtacaaatcgagggagagtttcagagtttcttctccctggttgcatacttcgcgcatggcaacaatctgttggatggagttgcgataggagttcatggcattatccgtttcctgcacggcggtaagcactgtctggttgaactggtgaatggattcatcgagctgggcacgtgccagacgggtggcattcaccagtttggtaccgctgaataaggtccagctgatgcttggagcaatttcaaacgtcatactgttccgtttagtcaagtccttcaagtcatgggaggaatagccgatggaaccttttaggaacacttgcggcagccagtcactttgagatgcgccgagtgttgccgcctgcgcgttgacttggcgttcggcttgccgtatatcggggcggcggagcagcaggtcggcaggaacaccgatgcctatgggttccatatagtcgggcagtttgctgggcttctccaatatggggcggatatgctgggggtaagtaccgagtaagattgcgagcgtcgtgatgtattggttgatgcctgcctccagttgtgggatggaggctttggtactgtaatatacggatttggcttgtgaaacgtccagtttggacaccagtccggttttgtagcgtacttcggtaatgttaagtacggctgcctgggtatggcaattgtgggtcactacacttagctcttgctgcagttcgcggagtccgatgtaggcagaagctatctgggcacagagggataccatgacagaggtatattcctccttgcttgccatgaaggtttcccgctgtgcctttacccgttggcggatacttccgaatacgtccagctcccaactggcgttgagcgaggcgctgtatgcaccggtaatggattgcggaagtgcgttgacattgccgctgctttgctgccgtgcccatcctccgtccaatgagatggaagggaaaaagctgccgcgttctatccgcaggttggatttagccatatccatacgggccatggcagaaagtacggaatagttttgagtggaggctaccgtaatcaatgaatccagcatcgggtcatcgaaggctttccaccacttgtcgtcaatgggtggtatctgtccgctgaacagattgtcatctccgggaatggcatgggaggcgtcctttccccagccttgtgggagtggtttctcaagatagcggttagctttctgtgccatagccgcaggacataggcataatatgagcaacgcagtgctccaaacttttatattcataaataaaggtttaggtggttatctttttatgggattgataacaacctaaacctttatttgtttatgagtatttactcggtataccagagtatcttagaaggcatacccgaaacccacattcaagtagatgggatacatggcaaaggtaattgtattgaaatctttcttgaaaatatcattcaatccccatgtaaggtcggcaaatacactcagatgtttgaaggcacgccagtctacaccagcttgcacgccccaggcaaacttgcgcaagtcatccgaaaagtcgtaagtggcaatggcaccgtcggagaagtttaccttttctccggtggagtctccttcacgcaaatagccttcatatacatgtccggagaattcctcatccatcagatatgagacatatatacctgctttggcccgcaatcgtgagttgattttatatgcacccagcacggggacggtgatgtaggcattgcgtactttagtttttactcccccagtccagttgcctttcaaacggttaccgtcatttcctatgatttccatgccatagttctttactgtcgctttggtaatcatatttttggtttccagtcttacaccggttattacaccccatttttttgttttgcccaaccatttgatggcatttccttccagcataaaggctaaggtaggattataggcatcgatacttcgtatttctacgggtaatggaagcggagaagtgccgccgatactgacaccggcccttatttcatattcccaaccgtgtagagcggcgtttataagcgtacggttctggttttcttgagcgtataaggcagtctgcatacatcccaccagtacgataaatgctaatattttctttatcatgttgtattccaattctatatgattcttattcgtaaatcagttccacttcgtctataagtaaagtgcttcctggagcaccctcaaaagtggcaccatccttgcttgaggcaaatatgatgcctatcttatattctcctttagccagtctggcttcgtcaatcttctttccgtaccgttggtagtcgaaaggtatatcaaagaatttccattcgtctccttctgtttcttgcggattggaaactaaagcaagagccaccatgctggagtgttcgtagttttgattcggcagatttccatccagtgttacatctgtcccctttcctgcactgtcatattttactccatcataaaatattgcatagatattgaatatatcttttcgggaggtatattcgccattttcataaaattgttctccggccttatacttatagtatccagtcagtcgtaaaggtttattgtagaaaggagtaccgaagcgcgtagcactaagcggattggtaatagcattcagcatgtcgaaactgccgataaacagattaccggcggcgatgggcatacctaccatgttacctaagtcgccagtgaggcgtgtttccaatttcacacattttccagttttgccattgtctatttgggtagtaggataatcttctgttgcggcttcactcatagcccatttgaatcccttattaccacttgcccatgtcaattcgttaccggaatcttgctcttcgtagaattcctgccatacattttgcatgattcttaccttttcaaagtggtatgtggtcggaatgttacttgccttttgttctctggcagtaatggcgtagacacgatgccaggccttgtcttccgaagtgactgtatatcgtactggagtcgtgaagttctgaacactcccactggcaggactgatggtagctcccggagtcaattcaaatatgggggccagacttgtcatgtccgtaccttctttcacactgatccgtattgggtaggcgttctggctttcgtcgtacgacgggttcagatcaatgtatgaatttgccagtacatcttcttcaaaagagatgcctgttatatcagcttcagcattgggtgcttcatcttttatgcacgatgccatcaatattccgaaaagtgaatagagtatgaataatttgtttagtctcatgctttttaatttaattctattaatttttcaagcaacaaaactacttcttttttctctaatagcaggtttttatgagcttatttaacaaaaaaacggcaataggtgctttactattgccgttttatatatagaaaatgttctatttttaattatctgagccgatatgtacgatttttcttttggctcttactggcttttcctttacaacttccactttctgttcgggagttatacctgctaattccgggtcaatcatgatacggccacaatattcgcaaacgataattttcttgcgtgagcggatgtccaattgtctctggggcggaatcttgttgaagcaaccaccgcaagcatcacgctgtacgtatacaatacccagtccattgcgtgaattcttacggatacgtttgaaggactgaagcagacggggttcaatctttgtttccagttctttggctttgtctctcagcttctcttcctcttgtttggtctcggagatgatttcgtccagttcgctcttctttacgtcgaggtctttttgtctttcttccagagcagcagtgctttctgctacttcttgagatttttcttcctcttgtgcggcaaattccttgatacgcttttcgcagagttcgatttccaatgtctggaattcgatttccttgcttaagaagtcatattcgcggttgttgcgtacgttgtcctgctggtctttatatttagctacagaagcctttgcggtttcaatttcaactttctttcctgcaatggaggatttcaactcggcaacttctgccttgattctgtctatacgggtactcagaccggctatttcgtcttccaagtcctgtacttccagtggaagttcacctctcaacgtcttgatttcatcgattttggacagcattgtctgcaattggaacaaagctttcaacttctgttctacggttaattcctgaggatctttttttgcttctttagccattttacttacatgtattttatggggtttgtattcactttggtcatctgaacctcaaaatgaggaaacaaatcccggattattgtataaaatatttctttcgtatattgctcactttcataatgccctatttcagccaataatatatcggtatcatgtccgaaatagtcatggtattttatctcgccggtgataaagacatctgcacggttgcggatggcaagcggcattaggaaagcgccggcgccgccacataatgcaacagtctgtatttcccgcccgaggagtttgttatgtctgagacaccctacttcgaaggttttctttatccgtttcaggaattcaagttctgtctccggtacttccaattcgccaatgacaccggctccggcttgtggccatgagttttgcaagggataaatatcatagaccggttcttcatatggatgtgccgcaagcagtgccttgacagttgccgcttttttgtaggcgggtatgattgtctcaatacgtacttcacgttcggtatgcagctcccctattgctccacagtatggggtggcaccttcccgggctcggaatgtcccctcgccttccatgttataactgcacaaatcatagttgccgatattgccgcatccagcgtcgaacaaggctttcctcacgtcttccgcttgggcggtcggtacaaatgtggtcagctttaccagcgcattttccttggcttccaggatacggacattcttcaaaccgattttctcggcaatcttgaagttcactcctcccggtgcattatccaggttagtgtgcgcagcataaacaacgatgtcattcttgatggctttcaagatacaacgttccacataatccctgcccgtgatggatttataccctttgaaaatgagggggtgatgtgatataaccacattatatcccaatgcaatggcttcatccagtacagcttcagtaacgtcaagacacaacaaagcccctgttgcttccgcatctgtcaatccgatttgcaggccggcattatcaaatccgtcttgcaatggcagaggcgcgaaccgttcaagggcgcttactaattccttaattttcattgtgaacagaaaatttggttgcaaatatagtaaaaagcaatggattgagaatgttttttattctttttataaaatatcagtaacaaatttgagtaatagacggttttcttccaacaaaaactcttatcgaaaaatgttttatcacgaaaaagactatctttgcgagcgattattataaaactaaatctatgaaaactaaaaaactattcggaattttatcgctcttgattataattggtgtgacctcttgtaacagtgatactccacaagacaatgtagaaaacattaaaatgaaggtctcttccgagattggcacttaccagccttggggaagtgatcatttcattgattgtatgttggtaaaggaggaaggtaaaaatgaatatgaagcgttggactttttaggaattgccgggtttgattatagcaaggggtatgaatacaccttattggtgaaaaaaacaactttgctcaaccctcccgccgatgccagtaatattgcatacgaactggtcgaggtgttatcaaaagtcggagtagaatatgaatatacaatagaggttgatggacccaatccttttattctttctcctgatggaggaaaatatgagattccttttgcatgcaaaagaaaaaaatatgtagcaggcgagtttactgaagaagaatatgctcctttaaaaggattgagatataatatggggaccaattatggaacctatacaagcattataaaagatggtgatacagttggattatataagtttgtaatcgagggtattgagccttataatatggaaggaactccctggtggtattatggtatttatcctgctgatgcagattttttctctgaaacagagccggaacctatctacaaacaattgtttgaacaaccgcaaacggaaggtgaagaacattttatatatccgataatatatgcttcatcgggtacgtttgattagttggacacattaatctcctttattatgaaaacattacttgttttgtttcttttccttttatcgttattgtcttgtcaggatacgaaccgttccggtaaagatgtatctgaggatatggaggagccggtagatactactcccaaggctacggctatcttttgggtagacaaggataaagattatcaggctaagaaaaaagacggtcctctttctctacgcaccgtcaaggcaagggtagagattgattcgctgggaaaagttaatctgctggcatataccaagccgcaaagtcaacgcatcaaaagttacctgcagtataggcttgaagaattccgtgtaaagaaagtgatgttggacagcggctttgtgaaaccgggcgtacaatatgtgcagctacgctatctccccggaaaactggatgcccaccaccgttgaagttatttatgctccttttttcccttcttctctaccatcaccggcagtagcttgccgtaggcatcgaacgacttgcgggaagccagagagattgtaatcatcagtgacagcatggaggcggtaaaggtgatgaccataatcatcatctgatatttgatggccacattcgggctgctgccacccaatatctggccaatcatggttcccggaaaagcaaccagccccatcacggatatattggcaatcagcggactgaaggatttgatgatggcttggcggatgaaaggtgcctgtgcttccgcttttgtagcaccattgccgagaagataccggtaaagctgttgttcccgtttcagtccactataataggtgttgagggctatgacgttactggatagcatgttgcccatcagtatgccgaaaatagggatgaaataccgggcgctgaatacgttttccactctcagtactattccgataaagtacaagcctacacatactacactgcataagaaacctgcggatatgggcaggagcagaatcttcctcttcaattgtgttcgtgccaatgccgtctgcgatgctacaaatatcatgacaattacccatagaaagtttatccacgggttatcccataaaaagaggtagttcaagtatatgccgatgaagaacaactggacaatcatgcgtgccgtacctatcacagtagcgcgcaacagtccggtcttgaacttccagatgtaaaacagcggtattaataatagcaataatccgatgcccaggctgaggtatgatatatctatggttcccaatagtgtgtatgttatttcatgattatatgtcggtcacatccgttggcgaatcttttgtcatgggatacggtcagtatggcacttccattttctgtctgcctgcggaagaaagagagtactttttccgcggaaccggagtcgagagcggaagtcggttcatcgacaatggtcagtggtttgccaatcattgaggctacggctatcatcatccgttggcgttggcctccggatatttcgttcacccgtttgtaatataactcttgttccagacccaaatcctcgaaacatgcaaataaacgggtttcagaaaagggtgtaccccggtttgcctttaaaccgaagggcaattgtaccatgtcctttacccattccagcggcaatgccagttcttgtggaatccatgcagtctgcttacggacaacgtcgacgtttcctttatccagcagaatgccgttcaagacgatgcgtccttcttttaacggagtaaatccaagtatggcattcagcagtgacgactttccgcatcccgaagggccggagatactggctatctctcccctttccaattgcaggttgaaacccgagaaaagtatatcgttgccgtaggcgatactggcattttctatttgcagcatggtgttcctttaatctttctgtatcgcaaagatagtgcaaaaaaatatttgtgctatctttgacgcactaattaattcaggaaagaaagactatgatacagaatgaacgggattgccgccacgaacatgtgcttgacgtggcaaggcaaatgctgactgctgcgcgcacggcaccgaaaggaaaaggtattgatgtgattgaagctgcgctggttacgggtgaagacattaagaagctgtctgaaaagatggtcgctatggttgaagagcacggtatgaagttctttctccgtgatgcggacaacattttgcaggctgaatgtgtaattataataggtacgcgcgagcagacgcaaggtttgaattgcggacactgcggttttcccacttgtgccggtcgtccggagggagtaccttgtgctttgaatacggtggatgtagggatagctgtaggttcggcttgtgccatggctgccgatttgagggtggatacccgtgtcatgttttctgccggacttgccgctcagcgtttggattggctgaaaggatgcaagactgtctttgccattccggtgagtgcatcctccaagaatccattcttcgaccggaaaccgaaggaagataagtgataattgacgagtagaggtttacaatcatagagtagaggtttacaatcatagagtagaggtttagaagtctgaagtagaggtttggcaattctaaacctaaggtttattctccctctctctgctaacttaaaaagtaacgaattagaaaagataaataatatgggatattttgtaggactgccgctgggtggtgccgcagagaaggactgtcaggtgcgttttggcaagaatatgacttttcaggtagagacacgtgctccccacttgcctgccgaatgggctttgcaaagcggcatacagcttacatggccccatgcgggtacagactggacctatatgttggacgaagtgcaggaatgttttgtagccattgcccacgaaatagccgcccgggagacattgctgattgtaaccccagaaccggatgaggtgaagaaacagattctcggcagggtgaatatggaaaatgtccgtttcctgaagtgtgagacgaatgatacttgggcacgcgaccatggagccatcaccctactggatgctgacggtgtatctctgctcgactttaagttcaacgggtggggattgaagtttgcatccgataaggataatttgattacgcgtcgtgcggtggagtcggaagtgatgaaaggaaagtatgtaaatcgcttggggtttgtccttgaaggcggttccatcgaaagtgacggcatgggtacgttgctcaccacctccgaatgcctgctttcgcctaaccggaacggacagatgaaccgggtggaaattgaggaatatcttcgttccgtttttcacctgcaacgtgttctttggctggaccacggttatttggcaggtgacgatacggacagtcatatagacacgctggcccgtttctgccctgccgacacgatagcctatgtacaatgcaaggatgcggatgatgagcattacgaagaactgcatcgcatggaggagcaactgaagactttccgtacgttgaagggggaaccttaccgtttgctggctttgcccatggccgataagatagaagaggaaggggaacggcttcctgccacttacgctaatttcttgattctgaatgatgcagtgctttaccccacctatcgccagccggagaatgatgcccgcgcgggggaagtgttgcgggaggcttttcccggttatgaaattatcgggatagattgccgtgctttgattaagcaacacggctctttgcattgtgttaccatgcaatatcccgtaggggtgttgaagtaatgtcgattatacatagtaaaacaataaaccatagaataagatgacaagaaaaataaaagtaggtattatccagcaggccaataccaaggacctcaggactaatttaatgaatttggccaaaagtatagaggcatgtgcggcgcatggggctcaattggttgttttgcaggagctgcataactctctgtatttctgtcagacggaaaacacgcagttgttcgacttggcagaaccgattcccggtccttctacgggattctattcagagttggctgctgccaacgatattgtgctggtcacttctctgttcgagaaacgcgctcccggattgtatcataacacagcggttgtttttgaacgtgacggcagcattgccgggaaataccggaagatgcatattcctgatgaccccgcctattatgagaaattctattttactcccggtgatataggcttcgaacctattcagacatctttgggcaaattgggagttttggtgtgctgggaccaatggtatccggaagcagcacgtctgatggcgctgaagggagctgaaatactaatatatcctacggctatcggttgggaaagcagtgatacggatgatgaaaaggcgcgtcagctcaatgcttggattatctcccagcgtggacatgctgtggccaacggcttgccggtggtttcagtgaatcgcgtgggacatgagccggatccttccatgcagaccaatggtatcttgttttggggaaatagttttgtggccggaccgcaaggcgagttcctggcccaagcaggaaacgaacggccggaaaatatcgttgtagaggtggacttggaacgttcggaaaatgtacgccgttggtggcctttcctgcgcgaccgcagaattgatgcctatgccggattgacaaaacgatttcttgactgataacgacggggatctctgggggagaactaacggaatgtcacccgtttgttcattaggaaattgacacttccgtagatgaataatcccaggaactgggcaaggtattcgttgcagtccagtccctccaccagccctatgaggaaaaggaattgcgctccgtaagccattccgaaagctatagaaaagagcagcacttgtcgccaagtgttgctctttttttctgtagggaatatccagtacttgcaccagatgaagttgtgtatctgtgcaagtatatatgcggttacattggagagcatatagttgatgtccagttcgtccatcattacccaaacggtaacagccataatcaaggcattcagcgtgccgattaccgcaaaacgaaaaatgcgtgcagactctttcactctcctactccgtacctgcttttactctttcacttcaacaatcagattcagttcatccagctgcttctggtcaatagccgaaggtgcatccagcattacatcgcgtccactgttgttcttggggaatgcaatgcagtcgcggatactgtcgagacctgcgaagatgctgacccaacggtccagaccgtatgccagaccaccgtgaggaggtgcaccgtatttgaaggcattcatcaggaagccgaactgctcctgagccttctccggagtgaatccgagaatctcgaacatttttgcctgcaactgtgcatcgtggatacggatggaacctccacccacttcaataccgttgcacaccatgtcgtatgcatctgcacggacagctgccgggtctgtatccagcaaaggaatatcttcgtctttcggatgggtgaacgggtggtgcatagccatcaggcggccttcttcatcgctccactcaaacatcgggaagtcaaccacccaaaggcagacgaacttgttcttgtcgcgcaatcccagttggttacccatttcaaggcgcaactcgttcagttgcttgcgggtcttcatggcgtcgtcaccgctcagaatcagaatcaggtcacccggcttggcgttgaaagcagccttcatttcctgcaatacttcctgcgcatagaacttgtcgacacttgattttacgttgccgtctgcctctacgcgcgcgtataccatacctttggcaccgatttgcggtcttttcacgaattcggtcagtgcatccagctgtttgcgtgtatagtgtgcggcgccttctgcgcagataccgccgatgtaggcggcattgtcgaataccgggaatccgtgtcccttcatgatgtccatcagttccacgaacttcatgccgaaacggaggtcgggcttgtcgctgccgtaatatttcatggcgtctgcccatggcatgcgcatgaacggctcgttcatctctacgccacggatttccttgaacagatatttggccatgccttcgaagaggttgatgacgtcatcctgctccacaaaagacatttcgcagtcaatctgtgtgaattccggctggcggtcagcacgcaggtcttcgtcacggaagcatttggctatctggaagtaacggtcgaaaccggaaaccatcaacaactgtttcagtgtctgcgggctttgaggcaaggcatagaattgtcccgggttcatgcgtgaaggaacgacgaaatcgcgtgcaccttcgggtgtggagcctaccagaatcggagtttccacttcgatgaatccctggctgtccaggtatttgcgtacttcaattgtcattttatggcgaagctccagattgctgcgtacattggcacggcgcaggtctagataacggtacttcatgcggatatcgtcgccaccgtccgtattttcctcgatggtgaagggaggggtcagcgatgagttcagaacatccagttccgatacgatgatttcaatgtctcccgtcgggatatgctggtttttgctgaaacgttcgttgacggtacccttaacttggattacgaattcacggcccaagcggttggcacgctcgcaaagttcggcattcacctcttcgttgaacactaattgggtaattccgtaacggtcgcggaggtcaatgaaagtcatgcctcccatcttacggctgcgctgtacccaacctgccagcgtcacttgcttgttaacatcggagatacggagttctccgcaggtgtgtgatctatacatctttttatttactgtttgacgatttacttatttactattttgaacatgcaaaaatacataaaacatattatatggcgcatcaaaaggggaaagttattttcagaaactcctttagtaccttttttacaacattacatttttgtcagtttcttgaattgccttttgcttttatccagtatcatcttgtttttatgggcgatgtcttccacaaaagcatcattaatttgtttcagtccgttgatatagtcttgtgcccgctgcaagacattcgaagtgtctttttccgcatcccggggaacaatgacctgcagtcctttcttcataatctttacatctacattctctcccatcatcatcgggtcgccgtcaaagtggactacccccggtttagaacggtgaatacggagtgtctggcaacggaacgtcttaatccggctgttctggtcaatggtcttgttgaagagctggaaagagagcgatggtacatcgagcacagtgaacggctcgagtatggtgacgtccagcagtccgtcgttcaaggtggcttgtggggcaatatacgcattgtttccatattgcgatgcgtttccgcaggctatcaggaacgccttgtatcgcagggtgctgccgtccatttccagttcataggtttccggacggtacttcaggctttcgagcagagtcttttccagataagtgagtggtcctctccttcccgccttggagaattgcaggcttacaaatgcgtcgaatcccacgccgcaggtgcagaagaaaggcacatcgttgatttttccgtagtcaatgatgtctatcagtccgtcattgatgatgtcgatggcctttttcggctccatcggaatctgcagatggcgggcaagtccgttgccggaaccgcagggaatgatgcccaaagcggtttttgtatgtaccagtgagcgggctatctcattgatggtgccgtctcctcctatggcgatgacggcatgtgcatcttcttgtgccttctgtgccgctatctctacggcatggcctgcccgttcggtataaatcacttcttgtgcatacctttccttatccagtttttcatcgagccacttcagtatctgctccttactctgagtgccggatatggggtttatgatgaatgctattttcttcttgttttcgttcatgcaagggttgttgctatgcaggttttccaactggcaaaagtaatataaatatctgaaaaattaaccacataattctttttaaaataagtataagtagtttttttaatgtaaatagaacatataccgacatattttgctatctttgccccctgttttttaagacttgtatttaatagaattaaatattcattatataaaagatatttcatgggtttactacaagacaaatttgcgaaatacgacctgccgcagcagtttatggcaaaaggcgtatatccttatttccgcacaattaacagccatcaggatacagaggtaatgatggatggtaaaaaggttctgatgttcggctctaatgcatatatgggactgacatatgacaagcgtatcattgatgcctcgatagctgccacagaaaaatatggcaccggttgtgcaggttcccgctttctgaacggaacactcgatatacatgttgaactggagaaggaattggctgaattcgtaggaaaagatgaagcactctgtttttctaccggatttactgtaaacgaaggtattattcctgccgttgtaggccgtggggattatattatttgtgatgaccgtgaccacgcttccattgtagatggccgccgtcttgcatttgccactcagttgaagtacaagcataacgatatggaggctttggaaaaagaactccagaaatgcgaaccggatgctgtaaagctgattgttgtggatggagtattttccatggaaggtgacttggccaatctgcccgaaattgtccgcctgaagaagaaatacaatgccagcatttacgtggacgaagctcacggcttgggtgtattcggaaaacaaggccgtggtgtgtgcgaccatttcggtgttaccgaagatgtagacctgattatgggtacattcagcaagtcattggcttccatcggtggttttgttgctggagacaaggcggtaatcaattggctgcgccacaatgcccgttcctatatattccaggcaagtagcacacctgctgctacggctgcagcccgcgaggcgcttcacatcatcaagtccgaacctgaacgcatccaacgtctgtgggacatcactaactatgccttgaagaagttccgcgatgcaggcttcgaaatcggtgagacagaatctcctatcattcctctctatgtgcgtgatacagagaagacatttatagtaacgaagctggcttttgacgaaggtatcttcatcaaccccgttattccacctgcatgtgctccacaagatacactggtgcgtgtagcgttgatggctacccatacggtcgaacaagtggattatgctgtagaaaaattgactaaatgtttcaaggaattgggtatcatcaagtaaacttgatttaaacagatattcggaaaaccgtttaataatgattaggcggttttttttatagacaaagcgaagtaggattaaaattaaatcgtaaagtacatgaaaaagaacttcttcatcattactgctgtagtatgtggaatgagttgtaccaccactgcctatgcgcagttcaaaatcggtggaaagaaaatcaatgtgaacaaagttgtccaagctggtacagatgccgtcaaggccatttcattgtccgatgctgacattgcagcgatgagcaaggaatatatggaatggatggatacgcacaatccgctgacaaagcccgatacggattacggcaagcgcctggagaagctgaccggaaatatcaaggaagtggacggcttgaaggtgaacttcggtgtttatgaagtaatagatgtgaatgcctttgcgtgcggtgatggtagtgtacgcatctgtgccggactgatggacatcatgacggatgatgaagtgatggcagttgtcggccacgagataggtcacgtcatccatacggattccaaagatgcgatgaagaatgcttaccttcgttcggctgtgaagaatgctgccggtgcggcaagttctacggtatccaaattgagtgattctgaactgggtgccatggccgaggcattggcaggtgctcaatactcccagaagcaggagacggaagcggatgattacggctttgaattctgcatcaagaataatctcgatccgtatgccatgtacaatgctttgaacaaattgcttgaactttcagcggaggcaccgaaggaatccaagttccagaagatgttctcttctcatccggatacagccaagcgcgtggcacgtgccaaggagaaagcggatgaatatatgaaggataagaaataactatccgttgcttactatgatgaagtgggatcagaggtttctctgaatcccactttttttgtgccgagactatgatatgggcttctgaggaagctaatgggatagttcgttagttcacagtgctgaacactttgttttagctatagaaaacaaagtgttttcttataggaaacaaactgttcttttaagggaaacgaagtgttctttttaatgaaacacactgttcggttaagggaaacactttgttctgtttggtaaaacttcttttatttacttatttgcttttaaattagaataattttagtatgtttgccacattatttatgaaaaacatgacttttgtatgaaaaaacaagacttcctctttatttttgttctggtgataatattcctgccattctttgtgagtgaatccatctacaattggtataagtctttcaacgctgcacatggcatggtaatgagtttcgttaaattcggaattcttgctacactgggtgagatgctgggacttcgtatcagtgccggagtctataaccgaaaaggatttggcgtactgccgcgtgccgtagtgtggggactgctgggaatgggtatcaatgcggccatgataatcttctccaaaggtgtgccgcaatttatggaatatatgggaatggcaaatgccgccgccattataaacggagaattctgcctggacaaattatggatagccctcgccatttcagttgctatgaataccattttcgctccggtattcatgacattccataagattacggatacgcatatcctggattgtggcggttcgcctcgcagcctcctcactcctatcccgatgacccgcatcattacgcatctgaattgggatgcacaatggaattttgtcttcaagaaaacaattcctttcttctggtatccggcacacaccatcacattcctcctgccgggagaaatgcgggtgctgtttgcagcgatattgggtgtggtgctcggggtattgctggctattgcggctcggatgaaataatccggcctatatattctcgaatgatttcaagcaagtcttgcggataaggtataaagaacttctctatcattttcggatactgaggtacaaaggggttgggtatcattgtgacaagggtatccaattctgccttccgttgctcttcagtctctgagacggcgtagcggatagtccaccagaacaagaaagtctggttaagataccctttgggggtgatgacttgcagttgcttgtagcgctcggactgtaacatgattttaattcttttctcctgctctttctcactgatggaacatagaatgtcataccattcatcaaactcctgacgcaagcaggcgacaaatgcccattcggcaattctatatttggcaaattctggaatcttctttagaagtacgaagatatgtcctatattcaattcgcctttatataaacctttgacttttgtatagtcttcaatggaagtgattgtgtgtaaaagggagtaatatatttccggactcatcggcacatggtgttcatcgatgaatttcagagtattctgaagcaccagttttttgtttgttctgttgttggccatgcggctgatgacattgttccagtagatttgtgtgcgtgcaatggaaatatgtaaatcatcttccatctcttttatacggctttcggcttcttcgaaggtcatgccgcgttcccgcatttgatagcatatgtccttcataattggataatgttcgacaaataggtagggtttgggaatgacggctcctaactttttcaacatacaatatgaatcgtaattgataaaaacctttttattgattgcttgctcttgcagccgttgggcgttttccttatcattctgacggagcaatgccttcatgcaacagaagataattcctccatcatatacgcccacgtccagcagacaatacacatattccagaatagtgctttctttaattttccacccttccgatgtataaatgggaaaaggctgcggaacgttgtcttgtgctcttccggcatagtatcgctggataagcatttgcttcaatacatcctttggcgcatccaggcttttcattatttcctcatttataatcagttgtatttcttccggaggaagtgaatcttgggtgtggttggtcaggtgatagagtaaatgtttatgtgtataactgttctgttgtacggtgtatttttcggacatccgctttatcatgtccactttttgttcataatagggatatatgaaccggttattgataatgatattcaagatattggcatcaggatgattgagcagtgacttgtccagccggttctcgaagaaatcccttgcgactcctccttcttccggagtctttaccttattgaacatttcggagacaacgtagggcgaatgattcaaaatctgttgttcttccggagtaatacaatcgggagtttctccgaacagtgcctgatacgcctcttcataatttgatattttcagaatgaattgtacgattgttcttatatttcgagattcatcgccgttttggggacgatgtctcttcatatgtgccttgatttcctttagggtcatgcgttggtataggataccttgtgtgtgctggctcgggtaatccagtaaagactggtctgcttccagtaaatggtatttatggaacagttcctcgcattccttaatcccgctataagtggaggtcgtatccaataagtcgttcaggtagatttcacccactttcagtttggtcttgttttcttcttcttgctgctccagcctttccataaaagtgttgaagattcctttggcctgctcaaaatttttagccttttggagcataaagttcaatgagtagccatcacagttattccccatacggttccataaatcataggcataagaggacggtatgttttcgagtgctccattcaacacttcggtcttgttcaggaacatactggtatcctcttttttgtcgacagacagttctgtcagttcgttgaagaatgcaaccagctcttccggctggctgaatcttttgaaaacttccagccaggtgtagggagcaataaagttgaagaaaaagactgcatcgtcgtggggaactacccctttatcattcttctgcaagaagttcttgatgtcgtgtatgtcagccagagtctgtgctttatgcataagctgcctggcgaaattacgtattcttttctctttcagttctgtcagataagtctcattgttgctttcctgtccatgggcgctctctgcagaatcggagaagaaatcatctatgtcgtcatcatcggcacttggggaagcttcgtatataaaggaagcgttgaggtatatttctttggcttcgtccatgtcgaggaaccgtaccaattctgtctgaaattcaatatacgagttttctatatacttgtcttgcatttgcccttgttcattgagcaaatccttgtgtacaatgtccttatcttgttgtgtctgcagtctgggtaagagccaccgcagcacattcagttctctcctattatatttttttgttaatttccaaatatggatggcctctgcattggtaggagcaaaattggctatattgccaatataggcgtccacccaatcaatggaaacgccttccgggtttgttcccagttccttacttgtatatagcgtttgttcgtttttataaatgcggcttacaacatcattgatgatatactgttggagttcgggggcatttaccgaacagtttttcacccgatgcaggatcttggttgtatttttgaaaaagttcggtctgtctttgtagtagatatagcggaatatgccctttatggctttcttttcagttgccagtaggtcatcggacggttcactgctatagtactggaaaacctgggttactatgatgtcttcaacttcaaatgtgtccttttcaatgtcctgataataaatcaaatcatctactttgcctgccaattcacagatggtgcttctgtcggccttttcgtaactgttctcataggtgaatttgaggaaatcgagcaataggtctattttattgcggcttctctttttccacatccacaaacattttatggcgtggcagagttgtcgaagcatggatttctgcaggttgcttaaattgctgttctggaactggttgttatatctggtcttgattctgtctatgtcgaaaaacaaggaaccgatagtcatgccggcttcgggtcggagtttaagatagccgtatgtcctgagctcgcgggcatattcatttatttttttgaaggataaaggtttgatgcccacttcgactatggccggaggaaccatttcattgaaagtaagcatggatttcacttccttgaagctatagcttgtagtggcaataaccttgaagtccggattgccgatgtgaaggatttccgataacttgcgaagtaattctctgtcaatgggtatcggcttttcattctcttctttccaaaacaacagctgcaaatcgtccagtagaagaatttttttgccatgctggaattgggatacagaaagccgttctaactgttctttggtcgtatcggcattcaaaatgaccacataatattcctgagggagctttttcagcattcggcaaacggcaatagtctttcccgaagtggattgaccggtgacgatgattgtcttgtttgtgctgtcaaactcctctttaagtttgttgtctacttccggacggataaaatagtagtccaggttgcctctgcgacggttggcttggctgttgggaataattttatcatactccatcttatggcaagagattgcgcaaaagggattattgagaaaactttcacgatccttgaccaacgcgtcccttagctgctccagcgtattgcactgcttctcataccgctcgataacggtatcgtcgtccaggtgcttttgcatgtattccgcatagaagtctttccataaagtagtgtttgtccagtcttcctgggtgtattccaatgtcggattctgatagaaatagatatgtttgttggatgcattttcgatggcaacattaaactctccgatggtcttggagcgtatccagtttccggcgaagaagatgatgacgtcacattgccttatctctgaatttatgatttcctgcgtatcgcctttagctaaatcgttgtctccatttttttcgtgccggtgcactacaatattgagttcgctgttgtttctttccgtcaggactttttccattaaatccctttctttctgaaaactcagcgaagaggctataaatacatggtatgttttcataatatagtgttggttactttctatgtgttgttgtttacgactagcggaatgccggctgtgatacatctgtcatacgcttttgagctttccttcaattcatcatacggacgtatatcgggatgcacaaagcgtttctttttgaagatgtctcccatttccttgctgccatagattaactcttcttcttcggcggtgggtttacggaagccaagcagcagcttctccatgttccaacggttatgttcgacttcggcaagcaatgttatctggtcgttgtccagtttcacgtaaccatccgtaatgcctatggagcgtagcttgggactaatggaatatgcactgtacaaattggaccactgaagggatacggacagtttgttccatgagtctttcagctcattgtcaggtgggcatgattgaggcacatttccatatttattcttgaaatcgtatatataattgatgatttgtccctccctccggctttttttgtccaagtcgtaacagttgtccagcattccaaaaggaaaaacatgggaatatttatgaatcgcttcatctttctttttactgttaagcatattgagcagtgcactggaggtttcctgacggacaaaaactgggatattttcatcatatacatcgtccggcagatataatcccattgccatgctttgaggaggataattgaggcagacggcaatcgtcaatacttggcctgagtcatgtacccattctttaattaggttctggatggcaggagtttccgcacggcctttgataaattcgaattccacatccagaaagtctgcatcttttcctttaaaacgggtgggaaggacaaatctctcgtgcctttcgtccttgctcatgtcgtaataatgggtagacgatatctcgaaataatggcggtatcgtccacaaaagaaattcatttcccggtcggcattttcatcaatgaaggtaatgacactttttatgttcttgtcccggcagaagtttggaaaatgcaacagatgggcagcttccactcctattgccactcccatacggctcataccgatgataacaagatgaacatgcttttcgctttcataggttattgcctcacggtcgagaggaggatattcaatacagttctccccttttccgtattgccggcttaccaatatctttttggcccagccctcgtagaagttaaagggatggaattctatatattttctccattcggcagacaaatcggtcagttggaaagcggcaaaagtagtctgatattcgaaaagaacggtgaatggtatgagggaacatttattgcatcgtttatgaatgtcaactatctttttcaggcagtctatgttcagtgagtcatggtcatgttcgttcctctctccgataaggaatacttcgcgcgctttggtagtatagagtttttccaactcctcgatagagtcgcgccgggcacgcagcaccacaattcttttttcatttttggcatccagttccgtatggattttgctacggatttcttgtgccggttgggtactctgaatcagaatatggcaattcccataatgtgtgtcatcgcaaatttgctggataagagtggggaccatgttgtcaaaaccgataatgacgatgtggttttgcaaagggtaaacgatatcgccttcacgatatcgctcaactctgcgttccagcatattggagattacggatatcaataatccgcagaacaaaattaatcccagcactacgaccaatagagagaaccaacgcagataaggtggtacttccacaatattccccggatcaatgaacagacaaatcaactgaagcaaacgccccataggtacgtctttatcaataccggtccattcttcaagagacggctcaggaaagataaatgcaaaacttaccagatatatcaataagaaaacagttactatgactccgaaaagccaagcaagctgcctccatccttttccggaaaaagagcggtcaaaatgaagggcaaaaagtcttgttagcagattcatatttgttttgtcattaggcagtttcctttttttcagtttcttgtttcaattcttttctgatattctctttcagtttattgatttctttctcatcgttattgataatctcccgtttttctttttcctgatacaaggatgcaagaatgtttctttcttgttccagattcaatgagaatacatctattaatctcttgatacatagaaaaaaacagatgcatacgctaagggaaatgatggcatggagtgtcatcaggtaggtcattccacgcgatggaaagaattgaataaggttttggaatgtagtgcatgtcacaatcaatgctgcaaccagaaagagaatgataaaggcaggaatcacgaatttccaccagtgccggataggataatacttgttctcactcgtcctcatagtactataatagatattggattattatttcttctgtatgtcgaatcccagtttcataatcagtttcagtgtctgtatggctgtttgccggtcgtattctcgttctgagtccggtaactcttcgtatggtacaagtccgggatgtgtctttaattcatcattgcgtgtctctccgtatttccatccttctttcactcttcccaaagcccatacttcatgcacattgcgtgccatggcttctgtgagttccgtcaaattatccggtaaagtgatattttctgcgttcaaaggggacggtgtgtatgttttcattttctgttatttaaaatgtggaagtaaaaagtttattggtagcaatattaggcatttcggacgacagaaacaaaaaaaaggaaagctatttccaaaaaaacatgcagattacaatggaaaaaacattgcaacctgcatataaatcgggagaagcgtgaattataagttagcttccgtcactacctgcccgtcaaacagattgatgatacgtccggcaaatccggcatcatgttgtgagtgtgtcaccatgacaatcgtagtgccttccttattcagttcattcagtagttccattacctcttttccgttctttgaatcgaggttaccggtaggctcatcggcaagtatcagtttagggtttgatacgactgcacgggcgattgccacgcgttgctgttgtccgccggacaattgttgcgggaagtgcttgctgcggtgcatgattgccatacgctccatagcggtttccacccggcgcttgcgttcggtggcaggaatgcccatgtagagtagcggcagttcgatgttttcgtatacattcagctcatcaatcaggttgaaactttggaatacaaagccgatgactcctttacgcaagttggtacgttgggcttctgtatatttggatacttccgtcccattcaagtaatattctccggatgtaggattgtccaacagaccgaggatattcagtaaagtggattttccgcagcctgaaggtcccatgatagcaacaaactccccttctttcacttcaatgtttacgtcgttcaaagccagagtctgtacttcctcggtcttgaaaatcttctgtaagtttactgtcttaatcataatgctttgtttttatgggttataaatatattatttcttactcggatttgatgcagtcaatcggatttgttttgttcagcaaataactttgcagacacactgtgacggcagatattatccagacaatacatagtggcaatagaaagtccataacggtgaagggggctttataggcaaactgttcatgccaatggtgcatgagccaatagacaatggggacagctagaatatatgcaagcagaatttgcaggcagaatggtttattcagcaacagcacgatttgtcgggatgttgctccatgaatcttgcgaatgctgatttcgcggatacgctggcgagtggcataccatgaaatgccgaataagccgaagcaggtcaatatcaagccaatcagagaataggcgataaggagtttggagagagacaagactttaccattgcgtttcataaagtcttggtgcatgtctgtgtattgaaatatctccccttcattcatcttttcccatatttgggctatttgatgtagtgtttcttgtttattgctttcaatcagcttaatctgcagatagttggcacccgacattctctctgtaggtggaaggtaaagtatgaccggggtaatttcattttccaatgaactgaacgggaagtcctctaatacaccgccgatgatgtataaagaatcggcagactggtcaaattctttcaaaggttttccaatggcatttattcctgctggaatcagcattctgacatagctttcgttgaccagtgcaggataggcatattgtttttgcagttgttcgggagcgttgccggacaagagtttgaaccccatcgtttttaccagattggcatcactatacagcattaataggtaggaacttttttccgtaccgtcggcttgtttgatggatagctcacgtatccatgaattcaatatggagccttgtgacagggcgatggactctattccttgtacatgtttctccagctcttctttaagtattgtagccggtgcggcattgaaatctcctatttcaatccgattttcgtaacagtaggcccgttccttgatgagattgatttgttcattggcaacgagagtagcgaatatcagccctatagaaatggaaaactgaagaatgaccagcaaagctatgaaacgttgtttctttttacctccgtaaagcgtcttgtattcgctgaatgagagttgtgaaagtctatggctgatataccaggcagggacaatggacataactagtacaaagagcactaacaagggtagcatctgtaggctgaaaaagaaatgtacgtttaaatgggatgcaaataatccattgaaaaaagacagacagtcgttgatgatgagtaaagataatccgaatgccagcagcacagtgaggaatgcatcaccaaacagttggatgcggatatccttcaagctgcttcccatcagtttctccacatgtatcattttgagctgttgcaatacacggctcaggctcatgttggtatagttgcagcaggctatgataagtaccaacaaggcggcagcaaggctgatatacaataattgcacattactttgattgatatacggcagaggttgttgtgtatcgtagtccggtgtagtaaagtagatgtcggacagagggtcgacgtaatattgtgtcttttccggaatcaaagtgggaattttgtcgtggttgattttttcggtaaactgttgggcatcggtatttggaattagtttcagaaacgtcattccaccccaaaagtctttgttattcccggtaatcatgtcgaattggagcaatgattgtgaccgtgactttaatatggctgccacttcataactttgggtatcagtcatggtttttatttccagcaattctcctaatggatttttatctccaaacagtttatgtgcaaaagcttcactgagtgctactttgcccggttgttccaatacttgctttaaactaccggcaatgggatgatagtggaagaaatgttgcaaagtagtatcggcagatataaaggttatatcgtggtaaatctcccctccatatttacaatattgtggaaccagagaattgatacgcaggtagtcttccacttctgcatatttttctttcagcatagggggaatattggcatcagcataggccaccttgcttccgtcctgcatcggattatcctgacgcagacagaaaatacggttcttgtcccgattgccactctctatattgtaatcatgtacataataggtgaacagcaagtttgtacatgctagccctatagccagactgactatagaaatgaagaagaaaactttgtttctccaccaactgcgggtaattatttttaggattgtaagtatggtcataatctttaggtaaatatattttcttattcgtttttaatgacttctgccggatttgtccttgctattttcagaatacggaaaataatagtcagagtagtaatgacagctacgattatgaagattgaaatccaaaatagcgggccatcattaaagaatacgatatacatgtttttccataactgcagtatggcataacataaaggaaatgccattgttgccgagagtacaagctgataaatatacgtacgggcaaacaatatgataatctgtttcaatcctgcaccatttactttacggattgccacttccttttgtctgcgttccgtatccagtgtgattgccgaatagacgcctaataaagtgattataaggctgacaaatgagaagaataagattatccctttcatgttgttctcgatggcttgcgcttggtgaatgtcttcctgcaaggtcgaaatgtgtaattgtatactcggtggaagattctcttccagcattttcttaacgaaagcctctacttcttctgcttttccgggtacacacttcaaatagcaatgacctacataatatttgaaatcacaaggcagaaagacgaagccctggctctgattgtaagtgtcggctacaaaatcggaacaaatgccgcataccgtgtagctatcttgataattgtacaaggtggttcccagtaaatccttctttatacgttctaccaatttacggtctgctaccatgtcactatttgtcttcaggacatgcccggagagaatggggatattcataaactcgaaaaagttattaggaacattcattatattgacttcaaggctactttcccggttatctttttctgtctgcatgcttgttcccgaaatacctttcagataattaatatctgtcagcattttatcttttatatccggatgttgactgatgcgctctatgagagcaagcttttcgtcatttttcataaaacggtaatccataggaatactgatgatttcggacttttctttttctgtcagtgtgttgaacagtgtggaaccggtcttgttagcctgcaaatataaagcgactgtaaagactatgaataaccaacagatgaaaaattggatacccaaaagacaatttcgtatcttctgtttgtggcgtttggatttgttcttgtaaatacttgactggatggaggcatgcttcatcctccatacggtaaacaagcagagtaataagcatagtaaaataacgcctgccatatattctattgtctgtatcaataataggtcccgttcaatgactaatgtgaaatcaaataaagagaatgaaaggtaaggggtaaatatttctatcagacagaaagtcaataagaaggctatgaacgaaatgataatggcttgggtaaaaagtaaccaaaatagtttgttgccattacttccattcactttacgaatgccgaactcgtgcgaacggttcagataactccccgtcaaaaaatgaaaaaagttgagtagaccagtcagtagaatcaaaaggccgacaatgaatgtgattccggcaaagtaaggggcaacggatttctcccgaaaaagttttccgaaattcgaggctgatacggtatttttctcattgaatattgtgtgcttcaagtccattgcacggaaacttgcttcaagttgcgcggatgttttgcccggacgaagaagagcaaaagtaagtccaccggtcatactgtctcgtccatcgaattgtataagtccttcgctgtcgttcaagattaacatatcaatcttttggagaaagctaaggctggtattcaatggaatatcttctattatcgcttgtatggtatagatggtacctcctgttcgtggtgtggtatcaggtgaagagaaaagccgttgtgctaaggtcattcgctttcctatcggattctctccgagaccaaatattttgtgtgccagagagcgtgtcagtatcacggcattgggagtttgcgatgctacagcccatgaaccttgtaatacttccggggtgaacacgctatggtaggctgtatctacttccatagcatataaatcttcgtaaggcagttcttccttgtcgatagtttccacattgtagctacgtgggcggggataggcaacaaaagtaaatgcttctacttcttggaattgcaattggcgcagactctcaaacaacgtagcgggagttccggaataaggttcttctgctggagtgtataggtttatgtctgcaatgcgttcccagtgggtaaagcacttgtcggtagaatttatatagcggctgcaatataggcagatactaaaacaaagtatacctaccgacagtccgatgatagagatgatattctgtgccttgtactttaataggtttctgaatgctgttttaatataatgtcttatcataatagtatcattattgtattattcgcttttgattacttccgccggattctgtcgtgcagccttttttacttgataaaccaatgttaatatggaaattaatgatatgatgattgctgcaataatgaacaaccaactgctgatgttggctttgtaggcaaaatctttcagataaatggttattccccaataagatatagaaatggcaatcaaaaatgacattgctaatatgataatgtattttttgagtaataacaataaaatttccttatgtgtagcgccatgtacttttcgtatagctatttcccggtatctttgttgtatgtcaaataaggacaatccaaacaaagctattgaggatattagaatggccataaaggcgaaaaaggaataggtaatagttatttgcttgtctgacttatagagattctcaacttcctgttttgcaaaagtataattgaaggctccatcagcattgtcgttgtgtaggttttccaggaaggcaacggcatctttttgatgtcctggagcaattttagcttgcaaaggaatttgtgaaagatatgtttcaccgtatataaaagctataggaagaaccggttgggataaatgtccgcaataaaaatcttcgacgatacctataatctgataagggctcaaatccctacgcggccataaaggttgttggggttccagccgggcattgattgcgctttcgagtccgaagagttgcatggctttttgattgagaatcagttttgcttcaccttcatggtcgatgtcggcatcccataaacgtccctgggataaacggaagccatgaaatcttatttcttcttctgttatgggaatgcaatacaattgtttgaaattggcttctccgagcttacggaaaagtaccggagattctgtgaaatattcataaggggataaagagtaattccatgccgtgaataaaggagaggcattcattgcagtggatatattttctttggaggctttgcgcaaggaggtctgtttcagatattctgcttcagtggtaggctgtttgcgttcatagcgttcaaaatggactttaacgatagagtctgtgtcatagcctaaatctatatgagtcatttcatacagttgtttggcgaagaacatggaaacaactattagaatgaatgccacgatatactgaatactcagatagaggtttcttacaacagacgatttttcaccactgcctattttccgtaatgaatggataggcgtgttgtatttgaatttaaaaaacggatagattgaagctgtcaatggctgtaaaatcaggatagctatggttattcctatgtcaaatataccattaggttgttgaatgacatcaaaatagttatttaagggaaagacggaaatctcgacaaggaaccaggctataaataatgatacaagtgtcagacataaattctcgatatatagttgggagaatagctgtgctgaattgtttccaaaaaccttctttagtctgaattctttgcttcgtttcaataatacaaccgtataaagactcataaaattgaagatgcctacaattaaaattagtacagcaacaagtgccaatagatgtagctgtggtaaattccccctttgcagcatgtcctgccaaacatcaatggctggatgaaaatacacttcacgcatgggaagcagttgatacctgaattcaacatccgcagcacgtggagattgccggaacgctgcatgccgtgcatttatcttcgtaaaggaagcccctttatgaattaatgccattttcatcgggaaacggaactcccaatccttctgcaatgtttcaggaacaagcaagtcgaaatgaagcgagcgtttccctctgtctttgccgataactccggtcaccgtaagagggtcaccggtagagtattcaatggttttgccgataggatttatgttcccgaatagtttctcactcagctcttctgtgataaaggcggtttgtggagacgccgcccatgattcggcttttccatatttcatgggaaaatcagtcactattagaaacaagctgtctactacaatcgtttctacatcaatatgtttttcttcctttatgatatagtctttattgaaccatacgaaagtggacatcgcttctatgtctgcatcttcgaggggacctccgataactgccgttttattgttgtcatctttgtattcctgcaccatgatgcctatccggtctttgttgggactataacaatctacatcattttcctgcttcacgtagcggaatataataatgacacaagccaagctcagtgccagtccgataatattgattaccgtatatactttaaacctacttaatgttcggatatataatagtatgagtttcatattcgtgtcttttattcgtttttcataatgcttgccggattgatgttggcagccttgctgatttgcctaataatagtcaacaaggagatggcagttgttatggctactgctacggcaaacaagtcgaatgtcaaaggggctttgtgggcaaaatcctgcaaatagagggtaatggcaatccatgacaagggtatggatagcaaagtggcgactcccatgaccgagagatactttttaatgagtaaggggtaaatatcctttgcttgcgcaccgttcactttgcgtaaacctatctcacggtaacgttgccgaatatcgaacaaggatattgacaataatcccaatgaagagatgaaaatggctattccggcaaagagcgtataaatgttcaccacttgacggtcttcacgatacatcttttggagttcatcttctatcagcgtatattcaaagtcggttcttcccgtagattcttcgtataagcggcgcaggaaatcaatgactttggctttattctcgtgcttatacgaggctgtaacagtataaattccgcctatgcttgcatcgtgataatagatgacaaccggttggatggattgtgaaaggtgccgaacattgaaatcctttatgacccctactatctcgcaaggtggattgtagaaatccggtaagctgcttgaggcgtagtgtggttcttcaggttgcagcttgtctttggtgatgtcttttattccatagactcttttagcggtttcgttgataattaccttgaaactgtttttggtgaacgcttcatctatggagtcgttccataggcgcccctctacaagttgaaaatcgtatattgccatggagtgggtcgttaaatgtgcagataatgccggatggaaaccgttttcggctctgttgagcgcaaaactgtcaaaacggaagtcggtgaacagcaagtcgtttcctctgctccaatgctcaaacagagtgctttcactcattcgtttattgaccaaagcattacttatatattgtctttttccttcatccaatccctcctctttagttgttttatataagcccaatttatcgacatacatccggcaagttatcacatcgtgcgagcggaaaccgaggtcggcgcagagcatatactccaactgccgtacaaagaatagagaaacggttattataaagatggttacgacatattgaaaacacagtaatatcatgcgtgaccgtgtggaaaagcgtgaagatgccagctcgcgtatggagttgacgggtctgctacatgtgtatttcaagaacggataaacagtagtcagcaatggcaatcctaaaagtacgatggcagagaccttccggtcaaagccggagtctgttgtggtaggtatataaagttcatggaaaaagaaaaacctggttatttctattaaagcccagcaaaggagtaatgccagtcccgtcaataagatgttctcggcatatatttgcaggaaaatgtctgtcctgcctgcaccgaacacttttttcaccccaaactctcttgaccgcttggacatgatgacagtgtagatgttgatgaagttcagcagccctatgatacctaccaggaaggctactaccatcaatacccggacatagctttggttgccatattgatagttcttgttttcttttccgtggtctttatcgtaatataaatctttcaaaggcaaatactgatagcgtactgtctcataagtactccatttgctgcgggggtgttcttttgaatactttttattcagcagtgcaatgtctgtatccggtgccatcagcatggcgtatatagggtcgaaaaaaaggaattcatccagttcatccgacataaatatatccggcatccatgatgtcttggtatcggggtcgtccaccactcctataatagtgaatttattcccttttgtgtttttgaaagtagcgcctatggcattcttccctcccagcttcttcttccaaaaagaacgggtgatgacaacatccctcgagcggactattcttccgcttccggcaatcaccctatatggaaagattttgaagaaggtgctgtctacagaaaaagcgttcgctgcaatttcttgttcaccgaacagaacgggcatatccgatatttgataaatcaccgtaaattgttctacggcaggatccttttccaatcccgaccggtagcctcccaagaagttctcaccactgctggtagaggtttttatcaggcaaatgcgtttatattcgggaaagcattggttcactgtattttcttggtggatatatcgggctacggtgagtacgcaagccaaactgcacgccagtcccaatacattgataagggtgtatgctttgaatttcagcaatgcattgatggctaagattatttgtctcatagtgcgtagttttatttcattatcaattcttccgcctcgccaaaggtatcatatcccgttgtaattacccaatctccgggctgcaaaccttccgtaatctcgtattgttgcggattttggcgaccgatgccaagcggcacgcgcacggcttttgtctttgcggcgttcagtttgtaaatccattgtcctccggtactctggtagaagttgccgcgcggaatgacgagcgcctcctccggctggccaagttctatctgtacccggaagcttttgcctacacgtacgttgtcgggcatgtcaccggtgaagacgaggtctacgtcgaacgtgcggtctttgacttcgggaaccactttcgtgatgcgcaacgggtattttcttccctgataattgatggtggcaggcaatccggtgataatgcggtcgatgtagtattcgctcagggaagtatgcactttatattggtccagcaccttgatttccgcaatgctttcaccggaagcgacctgctgtcccggagtcaccttgacaaaactgagctggccggcgacgggagctttcaccaccaggttgccgagccgttcgcaggcgcgttcatacttcttccgttcccgttcgcggtcgttcctgatgaggtctttgcggatgacggtgacggcagagtcatgacggaggctttccctttgaagatgggcatttttcactttatagttgtattcgtcctcggaaacttcgagctgcgccttgctcttgatgcccatgcggtactcctccttgtcaagggcaaaactcttgcgcaggcggttgaggtcataatcggtctgcagggcttgttgttgcaggttcaggcttttctgctccatttcaatttctttttcgcggtaggtgataagctgcttttcccagtcgtcgcgctggtcttcgatactgcgcagcaggtcggggttttccatgacgaggatggtatctccttgccggagcaggctcccctcctctcctatgatgcgttccacgcttccggcttcacgtgcattgaccttgatggtaaggatgggctgaatcactccctccacatctacatattccataaatttgccgttcttgacttcggctatctgtatgttgtcttgctcgatacgcagtttgctgggacccagcgaaagggtgactacataaatcaggaaggcaaggaaggcaacgcctcccgccagatagtagcggtaacggatgtaccagggtttcttttcaagttttatatccataatgcaatattttatatactctttttttacttttcagatacccccttcagaagtacttctgaataagggttccgagttttactaaaactttaccggagatttagtaaatcgtcaccggagttttagtaaatctccggccagcttttactaaaactattccacgattctattactgtatagattcttcattagtaaccctttccaagtcttctgccagtggcctctctttttcaaagtcatatagcgtgatgcttctcagtgcatagtacaaactccaatagttgtacaaagccgttatatagcttctccgggccgtatctttttccgtgatggatgcattgaggtcgagtaccgaggacttgccgagcagatagagttttcgggctacttcggcgcgtcgttgggctgtatggtccgtgcgggcggctatgtttacccgttgcgcctgcaggttgaattgctttacgagtttccgtacgttcaagtcgaaatccgtcttgtcttgctctacctgcgtgtagacaaggtctcggttggaacgggccacgcgtacttgtccccttccgcgcccccagtccaggattgggagggtaatgcccaagctgacgtactgctggtccagtggattccggtaggcatctttcagcttgtcggcagtttgtgtcaagccgaagcgcaggtagatgtctgccttcagtccggcattggccttggcgcgcgacacggcactctcgctttccaccttgcggcgtagcatgttctgtatctccggactgttttcgttggcaagcatcagcgcggcatccaggtcgatgtgcaggtcgggcacgcggttgtctattctcacctttataaggaggtcttcttggatgccgaggtaggaacggagttcctgcatgcagttttccacttcgatgcgggcattcatgcagttggtttcttcggtcagtttgttgagttcgagctgcaacatttcgttttcgctgatggtgccgatgttatatcgtccttgcgcatatatatataaggtgtcggcattggcgtagttggcgttggctatttcgtagttgctttgtgctttggccaggttgaagaacttctctgtggcattggcggcaacaagctcaagggtttctacgtaggttttcttggcttcgcgataacggataggttcgatgcgccggtcccacttcaggctgttgtagccaaacaaggactggctgtatccgatgttgacgggtgaagtctgccaggaataggtgtcactgctgaaaaggtcgaggcgctgcgcagccgtttcaatgaaaaaggttcctccggtccacggcacgttttgtgtcaggctcagtgtcaggtcagtgctcagcaggttctgctctatgaacttgacgttgccatcgctttgggtcactttgttgatagcacggtccagatagggattggaagtaagcttgagcgtcggcaggtagttggcacagtagtatttgtagttccaataagcggaacggaagctatggcgggcattttgggcgtcgggcgactgctggcgggcctgctcgatggtttcttccaaagtcagctccagcgtgtgctcttgagcaacggcactcgacatcagactgaatgtaataagcaataaaaatatattccggtgcatagttgttttctttactctataaagttcaaattctatgccataagtataagttgttgtattataagtgtttgttgtggttcgaagctttccaaacgtgtgcagttgcgcacaaaaatagtgcgataatgcacgcacaacacatggatattatacttatctttgcccgtacaagagatgtgggattgtgtaggccttgcctgcacgaaaagaaaacagatatggaacagtttggtaaaatattgattgtagatgataacgaggatgtcctttttgcgctgaaccttcttctcgaaccctacgccgagaagataaaagtggcagtgactcccgaccgcatcgagcattttatgaccactttccgtccggacattattctgctggatatgaatttcagccgtgatgccatcagtggtcaggaaggtttcgatagcttgaagcagattctgagtatcgacccgcaagcagtggtcatcttcatgactgcctacgcggatacggacaaggcagtgcgtgccatcaaagcgggggctacggatttcattcccaagccgtgggagaaggaaaaattgttggcgaccctttcttcgggcatgaagctgcgtcgttcgcggaccgagataaatctgctgaaggagcaggtggaagttctgagcaatgccacagcgggaggctccgaagagattattatcggtgattctcccgtcatgcagcaagttttctctactgtggagaagttgcgcgatacggatgccaacattcttatattaggtgagaatggaaccggaaaggatgtgattgcccgtatgctttaccgcaattctccccgctatggaaagccgtttgtcacgatagacctcggcagtattcccgaacagttgttcgaaagcgagttgttcggctacgagaaaggcgccttcaccgatgcacggaaagcgaaagttggacgtatggaagtggcaaccggcggtacgctttttctggacgagataggtaacctttccctgcccatgcaggccaaattgctgactgccatcgaaaagcgttgtatcagtcgtttgggaagtacgcaggctacgcccattgatgtgcggctcatctgcgccaccaatgcagacatccgtcggctggtggacgaaggagacttccgccaagacctgctgtatcgcatcaacaccatcgagttgcatattccacctctgcgggaacgcggaaacgacatcctcctgctggcagagtatttcctgcaacggtatgcccgcaaatatcagaaagagatgcgcgggctgacccgggaggcgaaaaacaagttgttgaaatatgcctggccgggtaatgtacgtgagttgcagcatacagtggaacgtgctgtcatattgggagacggttctctgcttcgtccggagaactttatgttccaagcttccgtttcccgtcagaagaaggaagaagaagtcctcaacttggagcaattggaacggcaggctgtggaacgtgccatgcggctcagtgaaggaaatgtgacccgtgccgccgaatacttgggcattactcgcttcgccttgtaccggaaacttgaaaaactgggcttatgaaacgatattcattgattgtggcactgcacatcatcggcatagccttcctttcggtcggcgtttatctgctggtggatgccggactgtggttcagtgcactgatggcttttttgatattgctggcgattgccgttcatctgtaccgcctgcagatgatgcaagtgcgcatgatgcgccatctggcagagagcctacgctatgacgacatgatgctgtcgttccgttctccctacaagaaccggtctatggaggatatggtggacgagctttccgaagcgatgaggaatttccgtacccgcgtgctggaacgcaatgagatggaagcgtggcaaaagctgatacgtgtgctgacgcacgaaataatgaattcaatcactcccatcatctccctctccgaaaccttgagcgagcgggaaatgtcggaaaagaactatcccgtcatgcggcagggaatgcagaccatccaccgccgtagtaaggggttgttggagtttgtggagaattaccggaagctgacaagacttcccgcccccgtccgtcgtccggttgccgtccgcgagctgttgcaggatttgcagaagctgttttcggaagagtatatccggatagagcttccggagaccgaccgcatactccagatagaccggacacagatagaacaagtactgattaatctgattaaaaatgccaaagaggcatgtagcaggaaagagcatccccggatagaagtgaagatgctacccgccctctcgtggcaatgcctaatcactgtcagtgacaatggtgaaggcattctgccggaagtgcaagataagatttttgtaccgttcttcaccaccaagccttccggttcgggcatcgggctcagtttatgtaaacaagtgatgaaccggcatggagggaatatcacggtgcagtctactgtgggaaaagggagttgctttacgctgctatttggataagtgggaaagagggtatatacaaaaataagctactgaaaaatcagtagcttattaatttctgtcggggtagcgggaaaaacaccgatacttataaattgttgattat

SEQ ID NO: 4429 - DNA, 17347 bp, Unknown
  gut microbiota DNA sequence
tgaagaaatggttgaagaataaaaaataatccgggcagaatgccgcactattcaaaaataatcgctatgtttgcagtgcttatcatacatattccacaaaatgcgggcagcaagcttgcattttcggtgcaggcattttttatgcccggacatattgtgtaccatatatggtatccgtgtacccccgtgtggagcgttaatgcgcccacagcattttgtggatgtgataagcagcgggaaaggcacggatactttcattttaaaaacttattgttatgcttgacaatgcaaaagtttccaccgctgccacaaacagcttcggaacgtccgcccacgaaacgggtatcaacatctccacactcaccccttacgagtatttccacagtatgggaattgatttgcaaggtttctccatccatattcttcgcaagcgccgtaagaacggtgttgccatcaccggtgtgttcaatatcagtggcatctactatacggtcggtgctgaagactatgagcacttgctggtcgatttgctggaacgataccggaagaaacgtgcttaccataagaggtgccgggaacggaaacgtgagcggaacatgctttcgttcatcaaccgttatccggacgccatggtacttccggcatacttttcctgacttgcacctttcacatcaactttatgctttattcccggtggccatcccatcgggaataaatgcttttttatattccgatttgcggacatttcattcggtttcatcaccctggtatcttatgatactcccctactccatcccccggaccccctggaatgaaaagacaagcaatatagagggagttttgaaaagaaaatatttcaaaagaggcatccaacagtccaaccgtccaacaagagaaaggattttaaaatgtaactctctgttgtatagtagtatatattttctatttaatcatatatatatactacaatggcgttgtcttgttggacgctgttggacgtgttggattgccatttttcaaccatccaactggctccgtccaacaaaaacggcaaaaaatgcggcttgttggacgtgttggacgtcctccaacagtattttctttatagtaaatttgtataactaaataataatcagtaactttaataatgctgttggactgtaggacagttggaagcaaaaataaacaaaaatggtttcaaaaaattttttttaagaaaatgagcatgattacgacgagtatttcaattacaccttatcttgctgaatatctgcgcgggaagtacaacaatggtgcggatgagcctttccgtattcctgacaatacggacttgtaccatgtgatatggacgctgatgtcacggcgccatcagaaccagtctcccatagatgacggtaatctgaccatcatactcccggaaaggcgtatcggtaaggatccggaaatatacaactatctgtctccacgggcagccaaaattatagaaatggaaatacgcaggatgttcaaccgggaacttcatacggcaatggacgagaacgacctgaacggacatgagctgaacaatctcgatatcgttcacaatttcctatgtgcgtattgcatagacagcatcagcgaggatgcgttgctgaagaacttctatcggtggcgggagaacatccgcaagcggaaaaagcgccgcgaatacaaaaagaagttaaaaaacggctaaaaaatcaccgaccgaactatgcgttttgtccaaaaatggaggacaaaatgtcctatgtatggcgaacttgttgaattacaaataaatatcctaatatgaaagaactttccattcagattaaagtctatccggtgagtaacatgcgccaggatgtctatcggttcatggccgatgagtttgagtttactccggtaccggaatcttcagaggcgggccgctgtttcaattgcaataaagatataagcataagccttcctccatccggagtgatgaaagacttcctggcaggcaggttctgcattgtcgagttcactgacaccaggcaccggagtttccggatcggggacaaaaaaatacccgccattgtctcgatatcgcccaatctgaattcggcgactctgaaaattgaatgcaaaatgctcagttccccgctattgtagcgtccttcacccctttctgcaggctgcctatcttcgctgaaaagatacgcaatgaacagaacttatctacgccagcttcttactttaaatatacaccggcttcttatcacggcagagggcttgtcttctgccatgatagaggcttttccattggtgtccgctgacagtctgcaaccgacatcctttttcttcaatgaaaatcctcccacatataaagagacatcgaaaaaggccctttcacttcttcagcaggaaatgaaggcccgttcagaactccagggtataaccgtcaccgatgacttctcttctgacgaacttcctgaaggcagtatcgcctatcaccgtatctggggattcatcacctcagattgtcagtggtatttctcctccaagcagttcgaacgggacctgcttgcggcagaagccaatccggccataacctgccatttcctgcatgtgaactctccgggaggggaagcatggtatatggacagactcagtgaaacgatgcgctcactcggcaagcctgtcatgacattggtggagcagtgcaactgttcggccagctattatataacctgccattccagtttcattgccgcactcacggcctatgataccatcggctgcataggaaccatgatttccacttgtaactatgacggatggttcgaaaagatgggtctcaaactcatccaggccaaagccacgaaatcagacctgaagaataaaaagacggatgacttgctcagagggaaaccggaacagtacatcaaagaagaactggatccacctaatgaacagttccttgccgccgttcttgcgtccagaccgcaactgggcaacctgccggaagacgatccggtattccgtggtgaaacgttcgatactccgcatgccatcgataaagggctggttgacgcctccatgacttttcccgaagctgtggctaaggctgtagaactcggtcgcagctatatggagattgagaatataaaaagaagtgctctcaactatttataacttaacttttgtttatcatgaatttaaaggaaagaattcagaccgtcctgcagaaactgaatctgctggacaaagcgaaagccaatcaactgacccaggaagaatggggacagatagtcaactcctataatcaggagtatcagtctatccttcaggatgacttggctgcggaccaggcggcgcaacggcaaacggttgccgtcacccaggaacagattgaccaggtacagtccattcttggaagtatcgtcaatccggtacaaaccaattcaacaaccacggaagaggaaaatagtgggaatggaccggtgcagaccatttcacagccagccaacggtgaaggcctggtgcaactggccaccgctgtgcagagcctggttgacaatatgaacaaccgcgcggaggatgatatcccttcccggacagtgacagccgcttccatcatgttcacgggaccggcagaccgttcccggtatcttttcggtatcgaaaaccagatgttctccatgtccgaacgttggaacaagattgctgtcaatccggcctccgcttcttcttacggtccatggaatgaagagattgaaggggccgctttccgtcgccaggccgttactttctcccgttcactgcagcagcgttacgattatctgcacagaaacggcatgcttgacgccaaacgtctggcagccggagaattcagtacgaactacgaaggggtgaatacagccggtgtgggcaaccagtatgtggtcctgcgtcaggactatttgattgcccgtgtactctcagtccgcgacctcacgcagtattttcccgtccgctatggaattcaggaccatgacctcgtgttcaatgccttcttctccgaagtttcccaagcttaccagcagggtgaaatctggaagggtgacatgaagcttgagaacgagatgggtcatgtggatgatgcgatgatcaagctcaagttcggtccgatgaaagaactggagcgcatgtacatcgcttatctgaacaaggaaggctccgatcctatcaagtggaacatgatcgagttctgcattctgaactcattggaaactgcgcaggtggagcagaacaaacgccgtatgcggggtatctatgtcaagccggaaacgggtgtcgcaggcaattacttgaacgcatcgaccggaatcatatacacgctggtccgctacatgcatgagtttaagattcttccccatgacgatgagtcctatcgcagctacacggcttccaacatgttggattccgttcaggagtttgtcggcgatgtggtggcttcctgcacggaagacatggaccttgaccgccacgtcctctatctgaataaaacccatttgccctggtggattaagaatgtccgcgccaaatatggaaaggacattgatttttccggtccggacagttaccgcaatgtggtacctgacacgaatatgcgtatcatctggttgccttacctcggccagcttcccctcatgttcatggatattccgggcaacctccagttcctggaattcgtaccgggcgagatgctctctatcaaggtgaaagaggacatggaattggtaaaggcatggtccacctggaaagaaggtaccgccgcttcgttcaccggccgccgttttgacagcctggaaaaactgaaggccaacaattacgaatggcagcagatcttcataaacaaacctaccgtcgatatggcagcggacgcgaccactgtcgatgcttcaaagggattctggcagataacagcggccaacactgccgccaaagccattacggacattacgggagccaaagccggtgtagcctacatcattgaatgtggcagcacagagaatgccactaccatcgccaagtcggacaagttcgccgatattacggaagcttatactcctaccaaagagggtgactatatcatggtaatcctgaacagcaaggggaacttcctggaactggaacgtcaggtaggaggtgtacgcaaggtgaactctgcactccagcccaacattcctggagtcagataattggctgtcaataagaacagattgttttcagatagcgcggggcgggtccacttaagcccgctccgtgttttttataacttaaaaattaaaattgtatgaaagcaaaaagaatttcaaatcctttccgtaaagggaaccaggctgcccgtaagatgcaggtccggtttttcctttcgctgatggtgcttctggcactcgtgtttattcttgacatggtcatgtcccccggttctgtgctgggaatttacggattttccggtaccacactggccgccatgatggtcatcggtgacgtggacgatgtatccgaccgtaagacgcatggctcaaacatcgcctataagatttatttggtggatatcgaccaggtaaattccgatgtgccctttccgcttcctaaccagcaacgagagataagcaccatcccgatgaaagccggacaatacatgaagtactttgcggctcacgatattcccacctacacttcaaccggcgagaagggtgacattaccaccagcggtaccaacacttttgttgccgtcatgggcggcatgcgtgaccagctgctcgatttcattgaacagcatgccggaggcaagttcatcatccttttcaaggaagtgggcgatgcgcagtggtacattctcggcaactatgaccgtccgatggtactctcctccttcgagtccaaaaacgacaaggacgggcgttatgtaacctataccttcacacgtacaagcattgaccagtactataagtatacgggcgatattgtccgtgctccggcagcggctcacacggctgacgcaacggcacttgccattaaatccaccaacaaccgttatacaatccccgatggcagtgaaggcacatacgccatttccactgtcagcggattgacagccaatgataagggacgttacatcacgcttgagggtaccggtaccgacaaggcggccaccattgccgacggcaacagctttgtactggaggacggcgccacctggacagccaaggcaggttcttccatcaccttcatggtgcttgatgcctctacacttgtcgaggtatccggcagccgagtgcagacagcttagtaaaaacaacttcttacaagcctgcataattcctttataggcagcgtgttggcttgtaagaattaaatctgtatgttatgtatagtttcaaagaaaagaagacacatttcgtagctctccggaatccggatgtggcacaatatgaccttgagttactggctaaagaagttcctggatttccgcagcttgccacattctcacgcaaccccaaacgttatgccgatgatatcctttatgcactgttagattgtgccacacgtgaggaaatacgtgagtatcgccgggctatgattgcaaaaaaggcaaaagaggctgaagatgccggagaaaagaaaacaaaaggtcctgctacgaaaaaaacggccgaaaaaaaacagcaaatgcccgaaggggaaacaacacatactgaagagaccggtccacatgatgacgtggaaaagcctgaaacagctccggcagacaactcggcagaagagttgaaacaagcgcttgaggaagcggaagcccgtgctgaagaagccgaacagcgtgccgatgaagcggaggaagccagggatgaagcggaagcccgtgcccaggagactgagcaggcgctggaagaagagaaaaaaaaagagccggccaaagaaactccggaaaagtccaaaaacaagaggaatacccgcaaatcgactgggacaacctcttcgacccgcaagtccaaatagccacactcatctacaacgaccgtgtggtcacttggaaacagatgaagcagctcgacgaaagtctggaaagaaaaccgcagaagcgtgacatcatggacatggtggaactgcgtatccgtaatctccaggcattcgatgagctgcaatcgttcaacgacactgggaagttcctctacattcatccgctcatagcccaccagtcagagagagcacaactggagaagctgctgcagacggacccgcaggagttcctgcgcctgcataagaatgtgacggacaatatccgcagatacgagtgttacctgaaacgcgctgacaggcaaaacaagcgcacccaagacaaggagaatctccgacgtcaccgtgaacgggaatcactgttcaaagcaatattgcaaaaattcaattcgaagtaaaatggaaaagctgatagaagtatttaatttgggtggtttgcctactgccccgctggattcgttcttggagcttcaggaggacttcaagaagtctgatcctgacaaattatcgaaactgcagatgcttatcatcacccgtggtttcaagtatgcattcaaagcctggcaggatccggacggaaagctctggattatcgatgcccatcagagacggaaggcactgcttgcattgcgcaagtccgggtttacaataccggaaataccttatgaacccatttttgcggcagacaagaaagaagcggtagaggaaatcgcagcctataattccgagtttgccaccaggaatccggataccctgctgttcaaaaaatataatatagattctgacaccctgcagcgcttcaacctgggttatgaggtcaagaccactgatttcgggcaggtttcccctctttttgcccaagaacatgagtcggaaaatgtgcaggaagatgccattgattttaatgttcctgcatctgaaaatactgtaattgccagacccggcgatatatggttactcggtaaccatcgtctgatgtgtggcgattgccgttccaaatcggacatcacggcgttgatggacgggcagcatgcggacttgtgcgtcacagacccaccgtacaacgtgaactatgaaggcggtacagaggaggaactcaccatccagaacgattccatggaaaacgacttgttcgccacctttctcaggcaggtgttctctgtcatgttcgccgtactcaagccgggaggatcctactatatattccatgcggacagtgaaggcgagaatttccgggcttctctcaggaaagcgggattcaagattacacaatgctgcatctgggtaaagaatactatggtgatgggacgccaggattatcaatggcagcatgaaccttgtctctatggctggaaaccgggtgccggacatcaatggaattccgaccgtaagcagactactgtctggaatttcgacaagccgcagcgcaatgccatacatccgacaatgaagcccatagcccttatggcatatcccatatccaattccagcactcccggtcagatagtcctcgacatcttctccggatccggttctacactcatggcatgccagcagatagaccgtatctgtcatgctatggagatagacccgaaatatgttacagccaccattcaccggtaccgcgccatgttccctgaacagcccgtccggttaatccggaatggagaaattctttctgttacagatacccaatccttgttgaaatgaaaaaggaactcactctaacttcagacaccgataaagccgtcctgataggcgatgaatatgtatcccaggtgcgtactttcggtgccttggggtacactccccaccgtatatgtacgcttctcggcctgcgtgggaaagaaaaaacggcacttatagtccgtctgtcgatacccggtgacgtatattacgacgcctaccgtaacggttgtgccctgggagaatacaatatcgatgccgaacttgccaagaaagccgaaaccggtgatgtgtcggccattgagaccttggaaacacgtaagcaggaacggacagtcaaagacttaagaaaccaactttttggaatatgaccagactcgacacccttgataagatacatccggacttgataaccgcattcctcaccaccgggaagtgtgatggcattcctgccgatgtgcagttattcctcaagcagctgcaatgggctgcggagatttacgaatacgaacgtaacatcacccgtgccgccaagcagctgcgccagcgcatcaatgcccagcagcagataaatgtggatgaacgtacatgtaaggcacgcatttatgcagccatcaattacttcaatatcgacaacaatgtgtccatcaaggtgtgggagtccaactatgccgacaagtacgaggatcttgccaaactatgtgcggctgccggtgactacaagacccagggcaagtgctatgccgctgctctggagtgccgtcgccgtgccgccgagattgccgaagctgaccgtaatctgggaatcgttttcctgatatctcccgaacttactccggaagacttgggatacagcaaggcctccctgaaggagattgcctccaagcacaataaagggttctatctgaacctgatagagaaccttcccattgagaaagccgaaaagaagcgcctgctgcgcgatgcggatattgaggaagctgaatacgaagaacttaatgaagagtgagatgaaaacagatattgaaaccacttcccgatttgaggaatactacatgaaccagatgcagatactggtcaatgtcatcgatgccaacaacatttttgccgaggtggcgcgtgccggtggtaagacggaaggtatcaccgggccacgtatcatccgtgtggccaatgacatgccaggcgaactgtcgttcctggtacataagacctacgttgccttgatgacgaacgtatggcccaaccttcaggcttatttctccagggaagtcaccgtaggtgggaaggtgcgctccatgctggaatatggtattgactatgtggtgggcgaaaataagctcccttctcatttccgcaagccccgatatcccatatcctaccccaaacacagtgtcgttttccgggatggccatcacatccagttggtaagctcggatcagccggagtccgttgccggacgctctgccgttcacgccatcattgaagagatgaaacacaacaaaggggagaaattgaaaacccgcttgttcccttccctccgtggtgccagtgccgaaatacgccggtcaccttattaccaaggtatcacgggcgtatccgataccgcgcgtgtggatctcggcgaagatgactggttcgaggaatatgagaagaatatggatacgaaacttatggaggaaatttctacagttgcgcttcatgtaaatgcagctatctatcagaaatacaatctcataaattcccaacgggaaacgacaaatcccgttacccttgaacgtatccgtcttgaaatcatcagacaggaccgcatcatatccttatggcagccccgtctggcagacatgcgccgtaacgccacgttgtacgtccgtgccagttccttctgcaacaaggatattcttggtccgaagttcttcaagacgcagcttgagaccttggatatggacgaattcctcacttccatctgcgctatccgccataaggaggttatcaacaagttcttcgccaactacaacaaggagaaacatcagtatgcagacagctatatctatgaatccattctacgacttgacctgcgggaacattttctactcacagcccgctatttgaagcactacaacaagcgtgacgagctactggtaggatatgaccccggccacttttccagccttgttgtcgggcaggaaaaggaatacggccgtcagctccgtattataaaggaactctattgctgttacccggatgaacagcccgaactcgcccgtcagttctatgagtttttcggtgctgattccctgaataagcgtatcattctctaccctgaccgtgccgggaacaaacgccgtgaggaactggaacagataaccaccgacagccgtgccctgaaacgtgagctggaaagttatggctttgaggtggaactgatgaacgaagggcaggccaccgtatatcattggcaacagttcaagttgttgcttcttatgtttggaggccggagcaatgccttgccagaaattttgatagacgagaacgaatgcaagaacctttgcagtgccattatgctgtcaccgttaaaaaaaacggaaggccgcatcgagctggacaaatcgtcggaaaagaaagtgcctctcaagaaccaggccggactgacaacgcagcttcccagtgccctgatttatcttcttttcgggcgttatggaaacaaagtgttgagtgaattatcgtccatgccggacaatttacctgataatctggctatataacggctgtttttcactataaaaatagtcagtaaagatacaataatggtatcgtttgacattaaaacaaacgcttttcatttggaaaccagacttttatatttttgaaaaaggaaagcgttttcttcgtgaggcgctgttcagcacgcaccgctgagttttgggattgcaaggcatcctccagcattcctcggaaatatgacggagggtgcttctcgtcctttttcccacagtagaaacctgctactttcgggcatggaaatgacaatgaccggtattcaagcgatgctatgggccaaagagatatcaaaactgcctaacggctgctttaccattgccttcttcccgtgttccaggcataagggggaggcatcagccacattgacagttaaagaaggatgcagatggcgtactcaactgcctgaagaaagattcagtatagacagtgacaacttctttctgtttacagacgcagacggggaacccaagatgtgctaccgtattctcatcaggtacatgggctttcctcaagatggtttcaaacttcataaaatagattggttatgagtaaaagcaatctcaaaatggtaggcaacttcggttgctatcttgacgatgacaatgtaatatccttccagattggagacaggccaatggcttcagtcctggaaccggacccgatgttccccctgagtggaggaagtcttccggatacgcagtggcagagcatccaaggattccaggtgtgcagccgtggcttcaacaacatgaaatgcgaggaagtcgcgtccgacataaagaagaaccggcttctgccaagactgattaccaagcaggtcagcatgctgtatggccatgggcttgccgtgtacaagccggcaatcgtggacgggaaacttcagaaacagtgggttgactgtccggaaatcatggactggctcaacagttgggaacagcgcggtcttgaatcgggttataaggaagtggccaaatcaatcatcaagaactactactatttcagggactgtttcgtaaagtggcgcttcacaaagggaaaagcaagagggacgatgcccgttgccggccttgaatccatggagaacagacattgccggctggccaccaccaagaaggatgtggcgacagatgttgtctactaccgggatttccgctacattgccgtagggcgttgggggtatggcacatccactttccgcatctatccgaagttttccttttcggagcttgccaattacagattcgcggccatttcccatcaccgggaaaaatccgtggatgagttctacggtgtgaacgaaacccatgccggtacccgctcctacatcaagggttccaacgatacggctgattatatcaactcctttttacgtaattcgcttgccgccaagatacacattgtcatccccaatgcctggcttgagtccaagaggatccagataaccaaactctgcgacgagaataaacggcgcaagaaaaacaatgaggaagaactgatgtacaatggcatcgtgattggttcggaattcaaggaatccaccctgataaagtatctgcagtctgaactgcgcaagatctcccgctatctgtccggtgcagacaaccagggtaaggcgtatgcgacaatcagcttcaagaacagccagggcgaagaggaacgctggaagatagagacggttgatttgaaatacaaggaatatatcgatgccttgatatcctatgacaaacgcgccgatgaggtgctgctgtcaagcgtgggacttgactcctccatatccagtgtcagcaaggacggggtcatatccaaatcaggagccgatgcgtattacaactatctgatatacattatgtcactgacatcggaagacgaaatctgctccgaaccgttcaatatggccatacagataaactttccccatttatacagccaggggtaccgtcttggattctatcgcgaagttccggcacgccaggaagatgtttcacctcaaaacagactaaatcagcaacagtcatgagaatattggaagaactgtttaccaccatttcggaatttcggaagtatgctccctatgcagagagcaatgtcactttcgaccagctcaattcgtctgccatttctgcgaaaaagcagatggttatcatccttaccaaagatgtctacaccgaactgacggcagacgagggcgaattgaaggaggccctgcgtcttgcgatggccaatctgaccatggccaaacagctcatttttgatgttgtatccaagcgtaaggatgatgtcgatatatacaagcatgagcaggaaagcatgcgcaggtcgtatattgagaactattataatgccatggatactgtcatccaattgcttgataacagtcagaccgtgccctcctggaaagaaacgagatacaagaagatgcttgatgttcttaaaataaagagtacggaggagttcgacatgctgtatacgatagacatgtcctatctgttctttttccggactataccgatccagagcgaagcgctggatgacgggatatcggcctattttgagcgggcagaaaaaaaggaagagatactgcgtctgctcaaacgatgcctcgccaagcagaccatagccattgccctgcggcgttttgatattctcgattttccaagtacgattcgcaatttatttgaagactcaaaagttatgcgatatggtactcaagagcaagaacgtttacttgctctgtcagactctctgcttgaagaggtgaagcgggaactggccaatatagatctgcttttgtcaacggacagttccggctctgtagatacgaacacatcctttaaccgtccggacgacataataatgctgatgccatgttgacaatagattttatagcaaaaggaatgcaatacagcatccccaattcctgggatggattaactccttatcacttccaagcactcatgcgtgatatacaaaggtttgcggatggaaaaatatccgtcggcatggttcgtgtgaattatgtttgccgaattatgggatggaatcttcaaaaaataaggaatacggatggatgggcaaatgtggcctggcttgcagagcaagtgacatttcccttcacaattgtctatccggataatgatgcagcactccaggaactggattctgaaacatacagactctgtaagaagataccaccacaccggttgcatggaataaccatatccaggtatctggacagactggactacaaatatgcagtcgactcatgtttctgcaaacaattggttccggcgatacatcttgaggatgaaactttttttgcctataatatagaaaccatgttcaaccggcttacttgctcgcttacggcactccagttcattgaggcacgtggtctccttggatgtccgaaagaacagcttccgttattggccgctatcctttactatccggaccggtattcatctgccggagcgcataagttggcacagaagttcactgggctgccgatggatgagcttattcccatagccttcaattttcaggccttcaccaattatctgtttaccaaaactgagttcaagttgcttacagaacttgaggagaccaaagtttctgccatttccacgggtgcacttgagtctctgtacaacttgagttcagacgggtttggggatattgaaaccatcgaacagatgaatgtcatccagtatttgaccatcctccggaagaaaattattgatacagtgcgcagcctgcatgcggccaaaatggataaagcggatattgccagagaagtcagacttccaatccacataataaatgaaatcctatgatacttgatttactcagatattttgcccgttttccccaaaaggaaggggttgtctccatgttcgccaacggctcaagtgactttatccaatatgcggaactgcttgggtatgtcaagaaactcccggaaccgataatgcccgaacttgagaatcttgttttcgggcagtcatacgattacgtaaagaagcgcgtcgataatattaccggcaactatctgttcgtggatttcggagaattcacatcaagccgtgacacacacaactccattcttgacagccagaaacttgcagctaccatagccatgaaagtttcggattccgcagacatggttgagacggccattgcctcggaaatgaccttgtctctccttgcggcacttcggaaaaggcttattctcgattcacggtctgaggatttaccatggcttgataagatatcggagaatcatgacattatcccttttgtctcatccgaattcaaatccataggttggacactcatgttcagttctgcagcaaccgatttgtttaatgtcaaaccatcccttagtgagtagcagatgtcagaccattaaatggttcagaaactttttgttcatgttgtttatttccatcctggccgtggctgtcgaagttcgcggtcaggagctactcctgattactcttttccgtcatccctaccacgagaaataatcatttttttactcaagcaaaataaagctaatacactgataataaacaagatattactacgttatgcgcgttaatagtgttaccttagctgtacgaaaaataaaggataaaacattatgaacgaacaagttacaaacattcttaaccagagcataacaaagacggcaaagatacagcagctccttcttttaggtctgacccgccgccaggtagccgatttggtaacaaacggaaattacggtttcgtgcagaacgtatataagaaaatgctggaagccggaagattcggccagcaaccggtcatcacagcctgccccgaattggactatactttcaatagacgtttcggcatcgagatagaggcatataactgcgaaaaggaagttcttgcccgtgaacttcgtgaggccggaattgcagttgcagtggaaggttacaaccataacacccgcgaccattggaagctggttacagacagaagtcttagagggaacgatactttcgagctggtaagcccgatacttgaaggggaagccggattgcaggaacttcagaaggtatgctgggtgctcgattattgcaatgtgaaggtgaacgacagctgcggccttcatatacacatggacgctgcagactttaccattgaaacctggcgcaaccttgcaataacttaccgccgcctcgaaccggtaatcgactcctttatgccgggtacccgccggaacaacagatattgcaaatgccttaccggaatttcggaacgcagcataacggaggcagagaacatcatgcagctacgttcagccttcggaaacgaccgctaccacaaattgaaccttgaggcttacgcacgccaccgcacagttgaatttcgccagcattcgggtaccaccaatttcacaaagatggaaaattggatacggtttgccgccaacatgattacctttgcaaaacatggcatggtgaattcgggatgcccgctttcaaatatcccttttttgacagccgaccaaaaagtttttttcaaattgagaaccaaaaaattagcataatatgatgacaacttacactttgcaggatggcggtataattgccgcctcctgccctgcagactttgtaaccaaactccgtgaaagcagccgtttcgacagtgaatgtactgaccaggagtatatgtaccatttcgccgaccgtttccatgaccagacggggcatgtagtccgagctgataccccggagcatttttttgaggatttgctttccaacgggtatatgaaagtagaataatcccctccaaacaaaagaag

SEQ ID NO: 4430 - DNA, 15800 bp, Unknown
  gut microbiota DNA sequence
cttgctttttttctccggaatctacttcttctatgcttgttcctatgggtgatgctcttaaaattaccggtacatttttagatgaggtatctcatgatattcctcatcagaattggggagaaggagaatgggatcgggatttccggtatatgcgggatattgggattgatacggttattatgattcgttccggttatcgtaaattcattacttatccttcgaaacacttgttaagcaagggttgttatatgccttctgttgatttgttggatatgtttcttcgactggcagaaaaatatcgtatgaagttttattttggtttatatgactcgggtaagtattgggataccggtgatttgtcatgggagattgaggataataagtatgtgattgatgaagtgtgggacaagtacggtaaaaaatatgagagttttggtggctggtatatcagtggcgaaataagccgtaagacgaaaggtgctattgatgcctttcatacaatgggtaagcaatgcaaagatgtatccggaggtttgccaacttttatttctccatggattgatgggaaaaaagctgttatgggaacgggtaagctgacaaaagaggatgcagtttctgtccaggaacatgaaagagaatggaatgagatttttgatggtattcatgatgtggttgatgcttgtgctttccaagatggacatattgattatgatgaactggatgctttctttgctgtaaataaaaaattagcagataaatatggtatgcagtgttggacaaatgctgaaacttttgaccgtgatatgcccattgatttcttgcctattaagtttgataagttgcgtatgaaattggaagctgccaaacgggcaggttatgacaaagctatcacttttgaattttctcattttatgagtccgcaatcggcgtatttgcaggcagggcatttatataataggtataaagaatattttaatataagatgacatgaaaaacataataagacagttattggtattttttgtttttgtcgtcagcttaaatttggcggcacaaactctacctgttataacgggacaggttaaatgtcagggacgtggagttgcgaatgtagtggttacaaatggtttcgattgtgtttcgaccgatgttgccggcaaatatactattccttatcatcgtgatgcccgttttgtatatgttactactccagcaggttatttgccccaacgggatggtagcctccctttgttttatcaacgcattactaaagggacttctgtatatgatttttctttagtcaaaaattctaagaatgatgacaagcatcttttcttggttcaggccgatgttcagcttggaaaagacgaagatgttactgcttattcagaatatctgagggatgtgaaggaatttgtcgacaaatgttcgaaatatgatttatttatgctggattgtggtgatattgtaggtaatgccttgtcgcttttttcctcatataaaaaagcatcggacgtgttggatgtccctatgtatcgagtgattggaaatcatgatatggaatatggagtacgttcttacgagcattcgtataaatcctatgaagagaatttcggccctatttattattcctttaaccgtggaaaggctcattatatcgtgcttgataactgttactatatcaataggcattaccgctacatcggttatattgatgagcgtactttgcaatggattgagaaggatttggcctttgtgccgaaggaccatttggtgtttgtttccatgcatatcccttccagttctactaaggagctggaatttaatgcgctacttcctgatgagaccagtaatgcttcaagcttgtatgacctcttgaaagggtacgaggcacatttgctgactggtcatacccataacaacggtaatgttgtattcaatgatagcttgatggaacataacacagcagctgtatgcggtactttttggaaggctgatatttgcaccgatggcactcccgctggttatggtgtatatgaagttgatggaaacaagctgacttggcgttataagagtgcggggtatcccattgaacatcaattcagggcttatccggtaggagtttcagaggattaccctgagtatattcttgcgaatgtatggaattgggatgaaaactggaaggtagagtggtatgagaatgggaaatgtatgggtgaaatggagcatttcacgggctttgatccggaagcaaaagccatttgctcggataaaaagcgcgtagagtatgattggatttctccgataaaaacagaacacatgtttcgtgctttacctaaaaatggtagtgcttcaatggaggtgtgtgtgacagaccgttttggtaatgtatataaagttaaactataaacaatgatgaagaaaaatgtaaatatcggatatttagtatttctgtcctttgttgcagccttaggaggttttctctttggctatgatactgctgtgatttctggtaccattgcccaagtgactgtactttttcatttggataccttgcagcagggatggtatgtgggttgtgcgctgataggctctattgtgggtgtactttttgctggtgtgttgagcgataagttcggtcgtaaactgacgatggttctttctgctgtgttgttttccacttcggccataggctgtgccatttgtgctaatttcgatgagttggttgtatatcgtattattgggggggtgggtattggtgttgtttctattatatctcctttgtatatctcagaagtttctgtggcccaatacagaggacgtttggtctctttgtaccaattggccgttacggtaggatttttgggcgcttatttggtaaatttccagttgcttggatattcagaaagtcatgtcgtttctggtataggtttatttgaaaaaatctttgtagctgaagtatggcgtggcatgttggggatggaaacactaccagctcttttgttttttaccattatcttttttattcccgaaagccctcgttggttgattttgaaaggtagagaagaacgtggccttaatgttttgcaacgaatttacaactcggctgaggaggctatgaaccagatgaacgaaaccaaatctgttgtatcagaaactaaatccgagtgggcattattgttgcagcctggcattctgaaagctgtgataatcggtgttgccattgccatattgggacagttcatgggtgtgaatgccgtattgtattatggtccttctatttttgaaaaagctgggctttccggtggtgattctttgttttatcaagtgttggttggcttggttaatacgttgactactgtcttggcacttgctattattgatagagtgggacgtaagaagttggtatattatggcgtttcagggatggttctttctttgttgtttatcggtatttattttttgtgggaagagagtttggggttgtcaagtcttttcttgttggtttgcttcttgtcttatgtgttttgttgtgctgtatctatttgtgcagtggtatttgtgcttctttcagaaatgtatcctaccaaagtacgtggtttggctatgtctatagcaggattttctctttggattggaacatatttaattgggcagttgactccttggatgctccagaatcttacccccgccggaacattcttcttgtttgctgcaatgtgtgtgccttatatgctcattgtatggaaacttgtaccggaaacgactggcaaatctttggaagagatagaacggtattggacacgtatgaaataaattgaccttatgaactaaaatataaaaaaatatggactttaaaaaattagcaacacagtataaggatgaactgatgaatcatattcttcctttttggcttgaatgttctcaagattatgaatatggtggatattttacatgcttggatcgtcaaggcaatgtatttgatacggataaatttatttggttgcagggacgtgaggtatggatgttttcgatgctttataataaggtagagaagcgtcaagagtggttagattgtgccattcaaggaggagaattcttgaaaaagtatggtcacgatggtaactataactggtatttctcattggacagacaaggaaatccattagttgagccttataatattttttcatatacgtttgctacgatggcatttgggcagttaagcttagccacaggcaatgaagagtatgcagaaattgccaagaaaacgtttgatataatcttgtcgaaggttgataaccccaaagggcattggaataagttgcatgcaggtacacgtgatttgaagaactttgcattgccaatgattttatgcaatttggctttggagatagaacatttattggatgagggttatctggaaaagaccatggaagtctgtatccatgaggttatggaagaattttatcgtccggaattgggaggtattattgttgaaaacatacaaatggacggacagctttccgattcgttcgagggaagacaaattactcccggacatgcaattgaagccatgtggtttatcatggacttagggaaacgtttggggcgtttggacttgatagaaaaggcgaaaaataccactttgactatgctcgattacggctgggataaagagttcggaggtatttattattttatggatcgtaaagattgtcctcctcaacaattggagtgggatcagaagctttggtgggtacatatcgagactctgatttctctattgaaagggtatcatttgactggcgaccagcaatgtttggagtggtttaataaagtgcatgattatacatggactcattttaaagatacagaacatcctgaatggtttggatacctgaatagaagaggtgaagttttgcttccgctgaaaggtggaaaatggaaaggatgtttccatgttcccagaggattgtatcagtgttggactgttttggaggaaatagcaaattcataaatagaatctgtatgagcaaaatcatagtagtaggcagttcaaatacggatatggtagtgcatacctcccatttaccagtaccgggagagacaatccttggaggtaagtttcttatgaatcagggtggtaaaggagcaaatcaggcagttgcagtgaagcgattggggggtgacttgttatttgtggcgagagtgggcaatgatgttttgggacagcagaccttgcgtgtttttcaaaatgaaggcatagaaacaagctatattgctttagataatgaaactccatccggagttgcgttgataagcgtggaccaatatgctgaaaattgtattgttgtggcttcgggggctaatatgttacttggacaagaggatattggcagtatggaaaaagagatgttggttggagatatattattgatgcaactggaaattcctctttcaactatagaatatgctgcacggaaggcttatgaaaagggagtgaaagtagtattgaatcctgctcctgcctgttctttgccggaatctttgttccaatatttatatatgataactcccaatcgaatagaggctgaaatgctgaccggagtcaagataaacagcaaagaagacgtggctatggcggctggtgtcttgtatcggaaaggtgtgaaaaatataataataactttgggtaacgaaggaagctttgtaagagaaggagaaaaaacttattatgtagatgcctacaaagtggttccggttgatactacggccgcaggagatactttcaatggagctgtttgcgtgggtgtttccgaagggatgagcttggaacaagcagtattgtttgcatctaaagcttcttctatttctgttacaagaatgggggctcaatcatctattccttatcggaaagagttggatatgaataatttagtttaatctgttaaaagaagaatattgtggatagacgtcattttttatcaatgttaggtctgggagcagttggtttgactctgccgggagtagctcaagcagatattttaaagcaagcagctgccaatccgaatataaaacctatttccggttcttggtttgaatttcagcatccgggaggtaaagaaggagtatattgggacaaagacttaagacagtttactgctgcccagtggagagaaaaaattcgtgaaatcagtgagaccggtatggaatatttggtgatgatgaatgtggctgctcacggcaaagctttttttgatacgaaattggctcctaaatttgaaatgggttgtgaagatcctattgaaacagtcctttctgcggcagatgagtttggtgtgaagttctttgtgagcaatgattattggggaccggatcttgatgctcgtcggatgatgacagatagggaactgggcaagaaaaggaatcaatcaatggaagaaatctataagaaatatgggcatcacaagagcttttatgggtggtatttccccaatgaatcgtggttagatccttatttttgcgattttgtgataccttatgtcaatgagtgtgcgcaagtggctaagtcgttgaatgctaactgtgtgaatataatagctccatacaatataaagaaagaaaaatgtgatgattattttgtgagacaacttgaacaactcaatgtggaaatcgtggcctatcaggatggagtgggagtaggtgcaaccagattggaagattctgcccgttattatgagaatttgtcgaaagcgcatcaaaaggcagggcgttccagaatatgggctgatatggagttgttttactttgaacagaccactcatggcagtttacttccagcggactttaacaatagaataattcatcaaatggaagctatttcacctttcgtggacaaaattttggtttaccaatatcttggaatcatgaacaaaccccaatctaaggctcatgccggattaagaggagagacggtaaggttatataatcaatatatggattggtataacaaacaaaattttaaatgaataggaatgatatgaaaagaattgtatactttttagtttctctgttgggatttaccaaactggcagcacaagatcctgctgattttgttcttccatctattataagtgatcatgcagtgatgcaacgtgatgccgaagtaaagctttgggggtggtgtcccagtgtttgggatttgaagattgtatgtagttgggctcccaatgatacggttcatgtatcttctgataaatataagtattgggaaacttatataaacactcccaaagccgaaggaccgtacgccattcggttttatggttgggaaggtaaactttgcgcagaagtgaaagacattctgatgggagaaacttggctttgttccggtcagtcaaatatggagtattgctttaagtggcgtgtagatgacatcaccgatagaagtacactgtttgacaataaaaagattcgttttttcaaggtggctaagtcatcctccgcgtatccggttgaaagaattcagggaaagtgggaaatttgttctcccgaaactgcagaagattttagcgtagtggctttttgctttggaaaaaggctgaatgaagaattgggtaatcttcctatcgggttgataggctcttattggggaggtacagccattgagccttggatggacgaatttacattgcgtcatgagaaattggaagaaaagactaaagcattgactgccggatgggcaccgactgcaaattcttctctttacaatgcaatgattcatcccattataaactacactattgccggggttgtctggtatcaaggagaagccaataatgaaaggcatcaggattatggagttatgtttgatgctatgattagaggttggcgtaatgcttttcatcattatttgcctttctattttgtccagataactccttggagtggttatgcggataaaaatgctgcatatttgcgtgaacaacaagccgatgtggctgctacattgagaaatactggtatggttgtggcgggagacttagtaaacgacctaacagatattcatccgagtctgaagagacaagtaggagaacgattagctaatatggctttgaaaaatagttatcataaagaggatatacaaccgtattcgcctatgctaaaatcctttagagtagatggtcgtaaagtaatagtaacaactaccgctattggcaaacttgcttgcaaggataaggtcattcgtcactttgaggtcctggataaagagggtaatttgcatccggctaaggcttctatattaaagaatggagatatcagtgtcattgccgataaggtgaaggaaccggtaggagtacgttattgtttttccaatgatgctatgcctaatttatttgatagtaacggattacctttggctccatttagaacagatcgtaaaaaatgaaaaagtctttattatatttaatttgttgttttatttgcttctctgctttttctcaagcttctgatttgaagtttcgtgacgggaagttcaagattgttcagttgacagacctgcattgggtagagagtgattcttataaattgaagaatgacagcacttgtcatttgattcgtgaagttattcgtatagaagatcccgatttggttgttcttacaggtgatgtagtagtttcctggaatgctaagaaaggatgggagaaattgaccaaaatatttggggaaaccaaaactccttttgttgtgacctttggtaatcatgatgaagaaacggatatgaacaatgctcagatattggactatctgtgtacacgaccttataacctgacttatgatgctgaaaaaggactttcgggctcgggcaactgcatgttgaccatccgttcttctgatgctgcatctgaaaaatgggtactctatttcttcgattctcacaataataccaaagaccgttcttttggttattatgattggattaagcatgatcagatagagtggtataggaaaagtagcagtcgggttaccgctcgcaacaagcgcatattgccttccttggctttcttccatattcctctgccagagcatgaaacggcaaggtggacatgccgggagtttggcgagaagcaggagggtgtttgtgctccaagtgtaaataccggattgtactcctcgtttatagaaaagagggatgttattggggtgtttgtaggtcatgaccataataatgactatatggttgatttagacggtaacataactttggcctatggtcggaagacgggttatccttctgcctataatgaaacgcttagccgaggggtacgtgtcattaatctgcatgaagacgaatcggtttttgatacttatataagagatttgaaaggaacttattttcattatcaatttgagcagaaaaataagggcagtaatattcctcgtttcagtggttcctttgtgcaagagtttttggtagcaaattgggacaacgaacgttggaatcaggaaatggatatgctgaaagaagctggcatgaagtacttgatctatgcacctgcattgctggtagatgaaaaggggaaaacaactacaaattatccgtctgctctgacgaagaagaagcaaggcaatagaacgcttgaaaagtgtttgcaaagtgcgcaaaaaaatggcattaaagtatttgtaggattaaactttaatgaacgttggtggaaagtggattatgatgctcgctggttactggagcaaatggaaatgggtaataaggtggcagatgagcttgttgttttgtataaagaaaagtatccggatgccatgtatggttggtattgggtttgggaggtagacaacttgaactgtatgacttctgagcgtcaatcaattttggcagaggcattgaatacgaatttgaatcatctttctgagattgctccggaaatgccccttatgttgtctccgtttatgaattacaaggtaggtggaaatgctgaagaatgtggcaagatgtggacgaacgtctttgcgcaaaccgacttccgtccgggagatatattcgctcctcaggattgtgtcggtgcaggtggactgaatttggataatttgtgggaatggttttctaatttgaagaaggctgtcaatactaaacctgggctgaagttttggggaaatgtagagacattcgatcagcgcttttggactagcgctcctttagaaagggttcaaaaacagttagagattgtaaatggctatgttggcaatttgatttgttttgcatacaatcattacaatagcccgtttgtagttaatccggcgtatcatcaggcatatcttcaatattgccggacgggatgtttgcctataatggatattcctgaaaaagtgaagaatgctgctgtacgaaaggtggctaagggaattgaagtttcttggataccgaatgaaatgaaagcagttgacggatatagtatctatcgtgatgggcagttgattatgaaattacaaatacgtgacggacaacttccgagaacttttgttgatgcagaaggtacagtagataatgtttatgaagtagctgtttataatgtgattggtaaagaatctgctaaagtaaaagctgaataacaattgtaaaattgataaatatgaagaatgtaacttttattatttgggcttttgttgtactgtgtgcaggatgcagttcttccacttcagttgtgcaagatgaagtctctatgactaaaaaacaattggctgataaagtgaaaggtggttgggcagcgaaaaccattggttgtacctatggaggaccggttgaatttctgcataatggtactatgattcaagactatactcccataaaatggtccaaagatagagtgaaatattattatgatacatttcccggattgtatgatgatatatatgtggatattgtatttgtgaatgtgttcgaccgtttgggtttagaggcaccggccgattcttttgctgtttcgtttgctgatgccggatttcctttgtggcatgccaaccaagttgcaaaatataatattaagcaaggcattatgccccccatgtccggacattggttgaataatcctcatgcagatgatattgactatcagatagaagcagattttgcaggtctaatgtcaccgggcatgcctaatactgcttctgaaatttcagataaaatcggtcacatctttacgtatggcgacggctggtatggtggtgtgtatgtgggcgctctatattccatggcttttgtttcagatgatatggagtatgtggtagaagaggcattgaatacaattcccgagcaaagtgatttttatgcttgcataaaagatgtgattggttggtatcggcaatatccagatgactggaaacagacttggtttgaatgccagaagaagtggacttcggaagtggggtgtcccgatggcgtttttgttccgtttaatattgatgccaagataaatagtgcctatgtggctataggtctgttatatggcaagaaagatttttatcagactattgatatttcggcacgttgtgggcaagattctgattgtaatgcggctactgctgccggtatattgggtacaatgcttggatatagtaatattccggaattatggaaagaaagtctttacgaagtagaggacatcccatttgcctatacggaagtttcgctgaataagctttatgagttaagtctgaaacaagctttgcaggtgatagagcaagaaggaggttctgttcagggagagcaggttgttattaaaacgcaacagccggttgctgtaaagtatgagaaagcttttgaaggtcattatccggcagagaagaaagctgttaaccttttgttacaggatgctacagagtttatgtttgatggtaacggatttgttttgaaaggatatgtgaagtgtgctgatgaatcgtatgttgcgagtgttgcgatgtatatagatggcgctttagcagaaactgccaatcttcccgttgctaaatctacttctatagatgacagaagggttgattcgtttcataaataccagttgcctgatgcagcgcacacggttgttttgaaatggttgaatcctcgtacggatgcacaagtttatttaggtgaggcggttatttattccagccagcccaatcaattaacctataaataattaattgtaatgtatatagttgaaaattatggattggcagtagctctttgttgggttaccatgctttgctggggctcttgggggaatactcaaaagctggcagcgaaaacttggcgatatgaacttttttattgggattatgtcgttggaattcttctcttctctttgatatggggatttactttaggaagtacgggcgaagcaggtagaggctttgtcgatgatttgcttcaggttgatatctctaatttggtgagtgcgtttttgggaggtgtcatttttaatgcatccaacattttgttatcttcttccatgtcattggctggtatgtctgtcgctttccccgtaggcgttgggttagctctggtattgggtgtatttataaattactttagtgctcctcaaggtgatgcaactgttttgttttctggagtatttctgattgtacttgctattatttttaatggtatagcttctgggaaagttgctaaaggaggaacataccaggcaatgaggaaaaaagggattattatagctgtgtgtgcaggtatattgatggcatttttctatcgttttgtagcggctgctatggatttagagaatctggaaacgccgactgcgggtatgatgactccttattcagcattgtttgtgtttgcagtgggtatttttgtcagcaactttttcttcaatacattggtcatgaagaaaccctttgtcggcaagccgatagcgtatagtgactatttcagtggaaatatgaagacacatcttgttggaattctgggaggaaccatctgggcattggggactgcttgtagttatattgctgcagggaaagctggtgcagctatctcctatgctttgggacaaggtgccactatggttgctgccttatggggaatatttatctggaaagaattcaagggcgcatctaagtcaataaatatgctgcttgtatttatgctgatacttttcctttcaggcttggggttgataattatatctggtggtaattaaattctttattttaaataatatactatgagacaaaaaaaacaaatgaaaatgttgggactattgggattgttggctgcattaccgataatttctgcatgtgcgggaaataagggttctgacgaatctcgaaaagaaaaaatggtccaatcggtttctgtggtacagcctattacgggtacatggattaatttagcctacaaggatgtgcggaataagtatactaatccacaacattttgataatatggatcctaaattatggactgctaaagtgcgtgaattggctaacatggggattgaatatttggtgttcatggaggttgctaatgaagggaaagcatattatccgtcaaagttgatgccgtggttatataatgataaattgcaaagccccgttgatgcgattcttgacgaagctgccaaacatggcatgaaggtttttatgagtaccggttgggcaaaagatcaggatgataatctgcttgatccagtgattaaggagcgtcagcttcagattatggaggaattggcatctctctataaaaatcataaagctttctatggctggtatcttccggttgaagattgtctttgccctatctttgccgagcatgctgttcagtcagtaaatgcattgacagagaaggctcattctttgactcccggaaagaagaccttgatttctccgtatggtattggtctgtccgaatttgatcatcctgattttgagaagcagatggcaaaattgaaagtcgatattattgcttatcaagatgaggtgggatgtgtacgtgacaaatttactcttcctcgcttgaaaaagaattggcaaaggatgcgcgatattcacaatcgcctgaatattgagatgtgggcgaactgcgaaacctttacttgggaagagggaaccaatgaccgccaatctgctttgattccggctgcttattcccgtttgctgtcacagcaggtagcggcttcggttgctggtgtcgacaaaataatttcgtttatgttcggtggaattatcgaagacccaaagtctgcttatcaattgggacaacctgtgtggtctaataatttatacaacaattatatggcttggaaagaaggtgacagtttttggaaattatttgaagctgctttgcttgacaagttggtcaattcagccaaatcggaaatgattggtaaagttgatatgaaggcactggcagatggtcgggtagccgaagaggatagtggagacagccgttgggtaaggtttgaaaaaggtcatcatgaggtagtgattgatttgcaaaagaatacttcgcttcaaaaggtgctggtacgtactttgaactataatcaggaaaagataggtgctcctttgaaggtttatgtttacacttctcaagatggccagacttataatctggcttcaataaaggatactccgtattttcctaacaacaagcatgatgcttggattgacgcagtcttgatagataatttaaaagaaaagacacgttatgtgaaagttgcttttgacgctttggaaaatgtgtatatggatgagatttttgtaaatccaagtattcgttaaccaggtaatataatgaaggaataatagggtcatccggaaaatatgaaatatagtttgagatgaattgatattatatgggaatgaagccgcccggatatggaagatgcagccatcttaaacagatatgtctaagtagaaaaagtatgatttcaggctaatagaaacgttaattatcgcatttcattaatacaatgaagtgcgatataaaaaacaatacaatgaaaaaaatcttaatttattaatccaaaaatgaatctatgaaaagattacacaaagctatgactcgaattgtcggagtgcttttaatggcacttatgatggttccaagtggtttgaaagctgagacgacagaaatgcttcaaacttctaaaattacgggtgtagtaactgacgatttcggcgagccgataatcggtgttactgttcgtgtgaagaatgcacagaatggcgctgtaacagatgttaatggacgttactctgtaaatgctcctaaaaatgcgacattggttttttcttttattgtatttagaatctcaaaacaaccaaaaataaccagaaatattcaagcgtaagtctttatctatcagaatattctaaaaattaacacttttcggctgctttttgatgcttcccaaatttccacatatttttgagacgtatttctgacgtggagaatttgcggagcttgttttttgccacatcgtgcggacagttgacaagggtttacaaccgtttacgatgagcgacaacaaccgccctgatatgcagcaatagtaacattgtgcagaaaggcgacaacggttgacctccgtttacatccgttcaccatttcagagatatacgattgaaggaatgaaccagtaaacgataaaagcagcatgaaaacaaccagaaaatgcaatttttgcagcaagtcatttgtaacccggagcggggtacagaaatattgcagcgaggcttgtcaggcggaagccaaacgagctagaacggaacagaagaacaacc
